United States Patent Application Publication US 2026/0242817 A1, published August 20, 2026 (application 19/415,370).

The application's sequence listing, which the Patent Office published only in electronic form, follows.

SEQUENCE LISTING (21318 sequences)

SEQ ID NO: 1 - protein, 112 aa, Zea mays
  VARIANT 3: note = Ancestral polymorphism is G, Derived polymorphism is D
  VARIANT 36: note = Ancestral polymorphism is P, Derived polymorphism is S
  VARIANT 44: note = Ancestral polymorphism is G, Derived polymorphism is C
  VARIANT 46: note = Ancestral polymorphism is A, Derived polymorphism is V
  VARIANT 51: note = Ancestral polymorphism is D, Derived polymorphism is H
  VARIANT 53: note = Ancestral polymorphism is T, Derived polymorphism is I
MIGVECLEEDSDGKVLRVLRIARKDGQAEHKIIIKPDFIADNLGIAGYYFDFTIGSGRKKAHVILKNNTLNNKIEGFACCNSCAVWLHKRSRGVLITLKKLMGPGVSGRAIG

SEQ ID NO: 2 - protein, 351 aa, Zea mays
  VARIANT 42: note = Ancestral polymorphism is S, Derived polymorphism is L
  VARIANT 197..351: note = Derived polymorphism lacks residues 197 to 351
MDGDAGPEQHGCVHYRRGCKIRAPCCGEVFGCRHCHNEAKDSLEVSVHDRHVLPRHDIKLVICSLCNKEQDVSSLTKQGQCSSATVGVTCHTPHEKKNPSRLSTGAARLCELRSMSRQILLREMQLLRRRCKLSPPFFDVLSEVADGILRANLDVISEVFPLLFSPVLLSRSLAFQVSKNQFHCDGCGICRQDWWRREFLSLWQMWMLLHHYAEGFSPLRGRSYASQLPCLHGGDFWPQYLFDSMKAISVLHCGHTIHLECLYEMRAHQQFSCPVCLRSACNMSDIWQKLDQQVAASPMPAIYQKKMVWILCNDCGVTSNVQFHILAHKCPGCSSYNTRQTRGDPAACSRV

SEQ ID NO: 3 - protein, 254 aa, Zea mays
  VARIANT 198..254: note = Derived polymorphism lacks residues 198 to 254
MAIDHESPFKELRLKNRRIMGGGGPDPEPEEEEEVATAAYAGQWPRWLQPLLSARFFAHCRTHGDSHRSGECNMFCLDCSAAGAGAGARALCSLCLAQAHRDHHTIQIRRSSYHDVIRVSDIQRFMDIAGVQTYVINSARVVFLNERPQQQRPGCKAASASANLCEVCARSLLDNFRFCSLGCKVVGCSPDAAKARSWLLRPAVGGSGDGDSTSSSPLRDAQKRQSFTPPTPQPAKRRKGIPHRAPFGSFIVEY

SEQ ID NO: 4 - protein, 161 aa, Zea mays
  VARIANT 17: note = Ancestral polymorphism is R, Derived polymorphism is Q
  VARIANT 22: note = Ancestral polymorphism is R, Derived polymorphism is Q
  VARIANT 26: note = Ancestral polymorphism is R, Derived polymorphism is H
  VARIANT 53: note = Ancestral polymorphism is S, Derived polymorphism is F
MHLLLVLPGNEVWHCGRRRPCRMRGRPCFVSPRRAHPAFTLNIDRIAWQGTNSVPSIRSVVLLQLIYPTQPCNPAVGGPAKSQLVHEVDAFGGEIGKNTDRCYLQKRVLNSSKGPVVRALRAQTDKREYAIEMKNSVERSVYTKLLTLLGFVILSGTSISG

SEQ ID NO: 5 - protein, 362 aa, Zea mays
  VARIANT 28: note = Ancestral polymorphism is S, Derived polymorphism is L
  VARIANT 30: note = Ancestral polymorphism is H, Derived polymorphism is R
  VARIANT 65: note = Ancestral polymorphism is T, Derived polymorphism is I
  VARIANT 72: note = Ancestral polymorphism is W, Derived polymorphism is C
MVKAKARVCYEYHFDKLLITLNWNSLFSLRFPTFCCPFNSIYEPGPAFEEVKEEAMLDISPTDSTEFWLIQWPKDQSELEYLSFMYVNPTSCAQLRKRVEDLYKAHEQELEEANRILRQKIAEDQFLDLVSVETEVRSVYKELYSGVVIGSQVYSILICNHVLGLVHGIWTPVPQAVEDYIATPKPNGYQSLHTTVIPFLNESLFHLEVQIGWLNAIREWQEEFVGNMSSREFVDTITRDLLESCVFSPLSSVALTLVVAMSFMLMKPSQEATASVVVVDLVAVLVADVVVVDLVKDMGAGMVAADSMADVVVGMAVVDTVAVALVTSRALALPVQERRPLLVMIDDERGGCGKRRNDLLIQ

SEQ ID NO: 6 - protein, 179 aa, Zea mays
  VARIANT 26: note = Ancestral polymorphism is I, Derived polymorphism is T
  VARIANT 42: note = Ancestral polymorphism is I, Derived polymorphism is V
  VARIANT 77: note = Ancestral polymorphism is I, Derived polymorphism is N
MVKIVEIKEEQDDACPDDDDCYEIGIEEFAKKLNVKEDDDVILVAAKGEIVKVEAGQPEDSAKARDVDANAECSCRIRGSGGGSRGRRAAAAGGDCLDNRPYKVADDETSLVTVGDMAFVIGKPSDVPGVLLVPPVVKSEPAGDNGVETAEEASYDHCPETMALAHEKRIFDEDDDEDA

SEQ ID NO: 7 - protein, 116 aa, Zea mays
  VARIANT 21: note = Ancestral polymorphism is C, Derived polymorphism is Y
  VARIANT 29: note = Ancestral polymorphism is R, Derived polymorphism is C
MGQKPSYLLLLVGLLAIAMLCAGPGHALCQLNDANGGGLEFSLGSKAATAGAKTEPLDPSLSDDYENGTSHVEFEPELGRATVVPAATTVTVTADITHRTGWKQMGGGNQQAPYTI

SEQ ID NO: 8 - protein, 104 aa, Zea mays
  VARIANT 15: note = Ancestral polymorphism is S, Derived polymorphism is Y
  VARIANT 31: note = Ancestral polymorphism is G, Derived polymorphism is D
  VARIANT 72: note = Ancestral polymorphism is R, Derived polymorphism is W
  VARIANT 87: note = Ancestral polymorphism is D, Derived polymorphism is V
MAPGASDYLTVEYHSRELPSFPSDDEGATAGSGVLFDVFSGAEGVLYAKKDYNLAKHPQIDVPNLQDSRYHWLFFRHNMYQLRQERDMKHETFAILSLGRSYSQ

SEQ ID NO: 9 - protein, 86 aa, Zea mays
  VARIANT 2: note = Ancestral polymorphism is V, Derived polymorphism is I
  VARIANT 3: note = Ancestral polymorphism is F, Derived polymorphism is L
  VARIANT 6: note = Ancestral polymorphism is P, Derived polymorphism is S
  VARIANT 8: note = Ancestral polymorphism is T, Derived polymorphism is R
  VARIANT 14: note = Ancestral polymorphism is P, Derived polymorphism is L
  VARIANT 15: note = Ancestral polymorphism is D, Derived polymorphism is N
  VARIANT 22: note = Ancestral polymorphism is R, Derived polymorphism is C
  VARIANT 27: note = Ancestral polymorphism is G, Derived polymorphism is R
  VARIANT 29: note = Ancestral polymorphism is Y, Derived polymorphism is C
MVFAMPETALGLFPNIGASYFRSRLPGFYGRLISLIFLYIQLNYMLPCHFHLYNIESMLLLLVPVCQIGWWGNACMWSDNSFCPVK

SEQ ID NO: 10 - protein, 104 aa, Zea mays
  VARIANT 40: note = Ancestral polymorphism is P, Derived polymorphism is L
MVGDTIRKVDREVLVDMEQIQYSEKYYDDTYEYRHVVLPPEVAKLLPRNILLSEKQWRLVGVQQSRGWVHYAIHRPEPHIMLFRRPINYQQQQEEAAAAHVLPK

SEQ ID NO: 11 - protein, 520 aa, Zea mays
  VARIANT 305..520: note = Derived polymorphism lacks residues 305 to 520
  VARIANT 318: note = Ancestral polymorphism is P, Derived polymorphism is L
  VARIANT 333..520: note = Derived polymorphism lacks residues 333 to 520
MRATIPALSLLVTPRLPSLAVPLAGGRLRVGGRSRTRLRVAAPTSVPGEAAEQAEPSTSAPESGEKFSWRDHWYPVSLVEDLDPSRPTPFQLLNRDLVIWKEPKSGEWVALDDRCPHRLAPLSEGRIDETGCLQCSYHGWSFDGSGACTKIPQAMPEGPEARAVRSPKACAIKFPTLVSQGLLFVWPDENGWEKAAATKPPMLPKEFEDPAFSTVTIQRDLFYGYDTLMENVSDPSHIEFAHHKVTGRRDRARPLTFRMESSGAWGYSGANSGNPRITATFEAPCYALNKIEIDTKLPIFGDQKWVIWICSFNIPMAPGKTRSIVCSARNFFQFTMPGKAWWQLVPRWYEHWTSNLVYDGDMIVLQGQEKIFLAATKESSTDINQQYTKITFTPTQADRFVLAFRTWLRKFGNSQPEWFGNPTQEALPSTVLSKREMLDRYEQHTLKCSSCKGAYNAFQNLQKVFMGATVVCCAAAGIPPDVQLRLLIGAAALVSAAIAYAFHELQKNFVFVDYVHADID

SEQ ID NO: 12 - protein, 77 aa, Zea mays
  VARIANT 43: note = Ancestral polymorphism is M, Derived polymorphism is T
MTHDETHALKGFRKVNPDRWEFGNELFLASQKHLLRSIKRRLMLVPIPSLISYWTPRFGCQVGPKAQIVVHPREHGG

SEQ ID NO: 13 - protein, 518 aa, Zea mays
  VARIANT 110: note = Ancestral polymorphism is C, Derived polymorphism is S
  VARIANT 132: note = Ancestral polymorphism is C, Derived polymorphism is Y
  VARIANT 407: note = Ancestral polymorphism is W, Derived polymorphism is G
MGKPPRPIEGGAGQSQARFFLGHAVVQESALAAGTSSALGKVNHRRPCSHPLSTKRWSPRQAPHSTPAFRPAPSFDDQGWTTVESKQGRRRRLRASRRPSRVPAELVGRCFNCLGCDHRAAGCDSEPRCFLCSELGHKSSSCPKTPVWKRLGRPRVPVWERLSLAVEGRVQRVAGRRSVWKRIATPEAGPIAPSILVGSMLGVSAAQGNGGPASSRRKRWRKKKHLEREDEPPLEIVAPPPPPPVQTVDATACVIDWSVQMSIAEDNLNTAAVITVVCSRDISANEIVSVLAPRLEMEEGGLVLRQLSQSSFLAVLPSRAQLDTLVDSFPIIREENSMLSSRRWTRFGGAGGNSLKHLVELELRGLPVHAWETSVVQQLINPHACISQVLPDTLEVQSLEAFRCLAWCSDPERIPAAKDLWITEPDQASAAEGKKALVYPVQIRWVPADLSLLTGDPPLLIGGDDQDKSDTPPSRRRCSDNPPRTQHDAINDVPGNKTHTQRRPIHDRLGPLRRSDSP

SEQ ID NO: 14 - protein, 170 aa, Zea mays
  VARIANT 29: note = Ancestral polymorphism is R, Derived polymorphism is W
  VARIANT 32: note = Ancestral polymorphism is G, Derived polymorphism is W
  VARIANT 56: note = Ancestral polymorphism is A, Derived polymorphism is T
  VARIANT 81: note = Ancestral polymorphism is A, Derived polymorphism is V
  VARIANT 110..170: note = Derived polymorphism lacks residues 110 to 170
  VARIANT 132..170: note = Derived polymorphism lacks residues 132 to 170
MLRNVYVANALVEMYAKCGSIRRAWKVFRGMGTRRDLCSWNSMIMAFAVHGLWTEALALFHKLRMTGAKPDGITFVGVILACTHGGLVDEGKLLFNSMRGEFGQVSVELQLLREKWGLLLAGLIFQHKEKAWFSSSVKSRLQYFGPQPGIPVLDDEHVMMSMLRAFISIL

SEQ ID NO: 15 - protein, 195 aa, Zea mays
  VARIANT 12..195: note = Derived polymorphism lacks residues 12 to 195
  VARIANT 96..195: note = Derived polymorphism lacks residues 96 to 195
MRHTGTCQSRTQQPMALAHTATESRCRRAPCHLASSWPLTGATPHKRATSSTATPTPERRATTIAASHSRTPRPQMTNVVGPAPVDVAAIIRQQPQDVCPTISGVAPALRPPDLDGRPQNRCPCRRRGLRVDHNREHHPGSSPNAKATARTPLVGRSKEVVAPTTAAVKAVRGEVAKKRAPPHNTCTSPNQLPPP

SEQ ID NO: 16 - protein, 131 aa, Zea mays
  VARIANT 123: note = Ancestral polymorphism is R, Derived polymorphism is W
MQRLSLGSPAGKNSRLSVAVDEEAEATDEKAVKAMVRTPALNRSIHLVPVLTLLCFLVLFLLSHDPSAALTNSPVLAAAATVTATARPLEAAVAGGADATVASSGVYRRLKEDPRQQQQPRGRRLGMARRR

SEQ ID NO: 17 - protein, 88 aa, Zea mays
  VARIANT 72..88: note = Derived polymorphism lacks residues 72 to 88
  VARIANT 68: note = Ancestral polymorphism is A, Derived polymorphism is D
  VARIANT 64: note = Ancestral polymorphism is G, Derived polymorphism is S
  VARIANT 63: note = Ancestral polymorphism is S, Derived polymorphism is A
  VARIANT 53: note = Ancestral polymorphism is A, Derived polymorphism is E
  VARIANT 50: note = Ancestral polymorphism is R, Derived polymorphism is W
  VARIANT 43: note = Ancestral polymorphism is R, Derived polymorphism is W
  VARIANT 31: note = Ancestral polymorphism is P, Derived polymorphism is S
  VARIANT 23: note = Ancestral polymorphism is H, Derived polymorphism is Q
  VARIANT 14: note = Ancestral polymorphism is V, Derived polymorphism is M
  VARIANT 2: note = Ancestral polymorphism is A, Derived polymorphism is T
  VARIANT 1: note = Ancestral polymorphism is V, Derived polymorphism is M
MAADDVCAATIMSVEGIVKVSVHYDISYFTPAKLHDEVEMDGRVVEQKGRMTAVAVEIRKKESGELVAIRRQWMTASRPKCVAAHSKI

SEQ ID NO: 18 - protein, 249 aa, Zea mays
  VARIANT 185..249: note = Derived polymorphism lacks residues 185 to 249
  VARIANT 100: note = Ancestral polymorphism is G, Derived polymorphism is C
MEATAATLSRSASLSAGRPHRSRTARFPPPPPHLTPLSAAASPRGLPLRRARSDAEVAYFARSAVLVRHAPIPAIIVADEEERQDDNSKAPAGLDGAGAGRNGSSHRGGSGGRGGGGGGGGCDMGEYYRRVLRVDPGNPLLLRNYGKYLHEVERDLAGAEGCYARALLACPGDADLLSLYGRVIWEARQEKDRAAAYFERAVQAAPDDCYVLGSYASFLWDAEDDDEETGTPAVDVVASCDSPALVPAC

SEQ ID NO: 19 - protein, 70 aa, Zea mays
  VARIANT 24: note = Ancestral polymorphism is A, Derived polymorphism is V
  VARIANT 25: note = Ancestral polymorphism is G, Derived polymorphism is R
  VARIANT 47: note = Ancestral polymorphism is Y, Derived polymorphism is D
MYPNYASAETGEELDVDKDNKLRAGARENAAKIRSHGSTAMFVTVDYALLVAFIGFLAYLLGSWILPFVS

SEQ ID NO: 20 - protein, 327 aa, Zea mays
  VARIANT 66: note = Ancestral polymorphism is C, Derived polymorphism is R
  VARIANT 129: note = Ancestral polymorphism is A, Derived polymorphism is T
  VARIANT 137: note = Ancestral polymorphism is E, Derived polymorphism is K
  VARIANT 181: note = Ancestral polymorphism is L, Derived polymorphism is R
  VARIANT 263: note = Ancestral polymorphism is G, Derived polymorphism is S
MCPGSVESSSAAAAGKSVCVMDAAGPLGHALVDRLLRRGYTVHAATYARDGEEGAAAAALLGHLSCAADACRHRLKLFRADPFDYHAIADAVRGCAGVFCMFNTPDDQAQCDESTVETEVRAAHNVLEACAQTDAMERVVFTSSVTAVVWSGAGAGVGAHREEVADERSWSDLAFCRKFKLWHALAKTLSEKTAWALAMDRGVDMVAINAGLLLAAPGLGLTAAHPYLKGAPDMYDGGVLATVDVGFLADAHVAAYESPTAYGRYLCFSNAVCRPEDAVKLAQMLSPAAPRSPPPSDELKVIPQRIQGKKLNKLMLEFASGVYGELD

SEQ ID NO: 21 - protein, 961 aa, Zea mays
  VARIANT 187..961: note = Derived polymorphism lacks residues 187 to 961
MLRSEGSNSNQKQPSNGRATSAHRVSRPSKPASKPADRAPSGPSPLQHHAASRTHLNRSSASIDLTPTTKPSPGGAAGRRSFKAPPASRSSSTTDRQQPRAARTSELQPQQLTLLQEDLKNARDHLASLENDRAQILEELAVSKCLAADAYGKLEDLLVAQRRAEEALELERFKSTEREQAAIDLAQRTEDEWQRKYDSVRTRHAEDVASLVATTRELEAVRDELAATAQAKESALNQADELQEIANGKAEKVEVLTAELARLKSRLDTELENKAKEAAKVVERLESEASALRGELRKAKEFEEKLAKAERAVDGLKRAEADASRSAQEWKSKAGSLETRLEAASQLNKRNEESLASLTNSFEDCTSMLQDKQSQLLQLVSKVATLEKEASEYKERFLETSRRLEVAAEEACELRAATDGLRSEQQLLHEAHRQAVGAEKTASARVGHLTEGNNKLLMELANTREERDKAKKAIEDLAAALREVSSEASEAKERVLAKQAELDSAQLQMSELKAAMKNAEEMYQLRIGEPNYETECLRKTIERMGSEAKISKDDWVSKEAGFVDMLKRSDDGISSVQLEMNRLTESLRAAENQVQELGAHKTQLLSKLQEFEVQATNTEEEAKAESAHLKDLLSSKDKELLALNHELAELRLRESAALEKASEVSKLLREITARKAVVEESTDKSKALLTKLEMDSVLESLKATEGEAKAAKEEKAQLQNRLRLLESKITEANLTSEEAKVSSLRLKETLEDRERQLASIVQENREVRAREAAAQAKIDELATLLAQATTWKGGEPLNGAVTRSPEKQPSVLLKLICSPAHHNVRDDDGNNAEITQNQKEDIKHVEMETVRQAKHEKEGDVSLSASAVDANPLENSMIVEDDLSKERDEGSESSDDDDAESAGDDALVDQMNGLLIHGPTSSFSRDQQHVQKKKKRALLKKFGSLLKKKAHFTKLSSQSHS

SEQ ID NO: 22 - protein, 56 aa, Zea mays
  VARIANT 31: note = Ancestral polymorphism is L, Derived polymorphism is I
  VARIANT 34: note = Ancestral polymorphism is F, Derived polymorphism is L
  VARIANT 49: note = Ancestral polymorphism is R, Derived polymorphism is H
MAAMSKKATLHPFRVPSSFSPPPLACTVSNLPYLFMTIVPRINKYSSERLKNGIKR

SEQ ID NO: 23 - protein, 1786 aa, Zea mays
  VARIANT 1363..1786: note = Derived polymorphism lacks residues 1363 to 1786
  VARIANT 1539..1786: note = Derived polymorphism lacks residues 1539 to 1786
MASSSAAASAAALEAVQVLVASLADDSPVARDAALAALRDIAPLNPMLILDCCATVSRGGRRRFGNMAGVFLVMASAVRALDHSDAESEFLRKIAKIATAEIVTSKEFNVDWQRAAACLLVAIGSHDPDLMMGEIFLHFSGPTSALPAMLQILADFASSEALQFTPRLKDVLLRVLPILGSVRDGQRPVFANAFKCWCQAAWQYLGDAPSELPLDNDVMSFMNSVFELLIKVWTGSRDLKVRSSSVEALGEMVGLVTRSQLKSALPRIVPTMLDLCKKDQEVAFVASHSLHNLLNASLLSHSGPPLLDFEELTVILVTLLPLVSANNNKDEHYVSKGLKTYNELQHCFLVIGLAYPEDLCMFLLSKCKSKDEASIVGALSTIKHLLPRLLESWHTKQAPLVEIMKSLLEQQSLGIRMALAELIVVMASHCYLSGHPAELAVEFLLRHSAITDADLNDLGTLRNEYFQDKRFEMKVSLAGLSELRAVCEKGLLLLAITIPEMELVLWPFILKLIIPKKYTGAVATVCKCITELCRHKFSHTNPLYTEFNASNETPNPEDLFARLVVLLHNPLARGQLATQILTVLCYLGPLFPRNLSLFWQDEVPKMKAYISDPEDLKQDSTYQEKWDDMIINFLAECLDVVNDTEWVISLGDAFARQYDLYSISDGHAALLHRCLGMLLQKVDDRIYVSEKIDWMCRHSSMSIPINRLGLAQGIGLVAASHLDTVLEKLKNILDSAEQSAFQRFLSFFSFGPKVEDVDDTYAALALMYGYAARYAPSTVIEARINALVGSNMLGRLLHVQHPTAKQAVITAIDLLGRAVISAAEMGISFPLKRRDQLLEYVLTLMGRDQSNDLTDFNTELLHTQSLALSACTTLVSLEPRLPMETRNRVMKATLGFFALPTEPSSIVESLVTNLIILLGAILLTSGEDGRSRAEQLLHILRQLDPYVSSSLEHQRRRGCVAVQEVLIKFRNLCSGGFGALGSYPTFTMNKQIDRGTRSLSSLPSAFVLPSRDSLSLGERTMAYLPRCADTDTEVRKVAIQIIALFFDISLSLPKQKAYPNDIDLESSYSALSSLEELVSIVRREASVDQTELFQRVVSSVCILLSKDELVVLLHSCTLATCDKIKQSADASIQAIIMFIIRRGKELREADVSRTTQSLLSSAISLTDTHSRQEVLNAVSIDSFIYHISCLAENTNHVVVFDEVLSVAGKDICTKDIPRIRGGWAIQDVFYAFSQHKELALLFLEYTLSILHKEPVIINSSEKGESTSESLADDCILQATMFALNAFMRYWSPFDGSLLMLRMVGTFSSADFTYFKKTSKLYRGGGKIGKQAVEKSYPSVLSGLILKLGSLNGVAELGRNELLRSLLIAFQSFCECVGDVEMGKVLPTCVILCNALNRNQRAEREAAAAALSEFIHHIEKEPTLLEQMVEEMCQHVSDDSPTVRSLCLRGLVQVGLYSLTNIEFKAPESHMLKYIQQVLGVILALLEDPNESVQLTAVQCLLNVLNLSEQDAVGPILINLLVRLRNLQAAVEAAQAVAAQETEQEALPKPSKVSMNTKMRSNAFAAYGALSAYGVGLQRTAFIEQLNANIFIYGIKYNHVLSTRLGEVLAPPLLNTFQLLATLMEVEGLSVLLSKQYFASDRRSDYEDFIRDLTRQLCRLSPARVDSYLESAIQAFDAPWPVIRANAVCLRFIAPYFSQVFATLVGRMSQSPDAIVRASASSALGILIKRSNMLRSLVSRYDRADSSRNSQSGDSNTKTPSEFQEQAEGNPNDGASGAAIKGTEADH

SEQ ID NO: 24 - protein, 347 aa, Zea mays
  VARIANT 66: note = Ancestral polymorphism is Q, Derived polymorphism is R
  VARIANT 33: note = Ancestral polymorphism is Y, Derived polymorphism is F
MASSSAALAVLMLSWAAALAAASSPVTLFEAGYMPLFGGGNLVPSPGGRSVRLKLDRHTGSGFVSRSSYHHGFFSASIKLPDHHTAGVVVAFYLSNADVFPGNHDEVDFELLGNRRGHEWRVQTNIYGNGSTSRGREERYLLPFDPTLRPHAYAVAWTPTAILFYVDGTPIREVVRVPAMGGDFPSKPMSVYATIWDGSAWATEGGRYKVDYAFAPFAADFSSLVLSGCPVAGGGDDLAAAECQVATMTADCAVMTPAKRAAMRRFRRRYLLYTVCHDMYRYNGTVFPECDADGSERDDFHKWGESKRVSPSSRGYKQQQQRADKAVAVAAPGRPDTWPTVGTLRVD

SEQ ID NO: 25 - protein, 408 aa, Zea mays
  VARIANT 70: note = Ancestral polymorphism is C, Derived polymorphism is Y
MEHQCASVLVLIVMEGGSVEGKGKEPCIGESSAAAYEWVVTTDGTRKQLQGSIDDPWSHGEKWKKQGFKCAYCGCAKESGGKTRLRCHLAGLSGDGKSCLNVPKRVREVMLNDYARGKKRRADSKEHKLFVEVALGQAIPPHHSAILAVTLAIKKLADSPIEASIAIDQFTRTFSKKEKLFGSLEARSSALRVDANPVYVHYNLKLLIQQFELDNPQEKEIDPYSVMMDVVLFDENNPILEWFSNSRSESRPLLDEYDDDNDDWDAPGSFLIEELQMSKSDVAAFKRNLGFDKNSRGKKPMSQLDEEEEFEDDYESESPHGSPLYDEPWDICSDDEGNNSGGVDCLEDKSGSDVGKNKSDCTEGGGSGSRGGALGASAMWKRNDHRNMTHFWITLSLLLEILILESMN

SEQ ID NO: 26 - protein, 252 aa, Zea mays
  VARIANT 220: note = Ancestral polymorphism is P, Derived polymorphism is L
  VARIANT 213: note = Ancestral polymorphism is W, Derived polymorphism is R
  VARIANT 212: note = Ancestral polymorphism is L, Derived polymorphism is Q
  VARIANT 186: note = Ancestral polymorphism is Q, Derived polymorphism is L
  VARIANT 135: note = Ancestral polymorphism is N, Derived polymorphism is D
  VARIANT 107: note = Ancestral polymorphism is L, Derived polymorphism is F
  VARIANT 92: note = Ancestral polymorphism is R, Derived polymorphism is C
  VARIANT 84: note = Ancestral polymorphism is E, Derived polymorphism is K
  VARIANT 83: note = Ancestral polymorphism is P, Derived polymorphism is H
  VARIANT 78: note = Ancestral polymorphism is G, Derived polymorphism is C
  VARIANT 68..252: note = Derived polymorphism lacks residues 68 to 252
  VARIANT 66: note = Ancestral polymorphism is L, Derived polymorphism is P
  VARIANT 62..252: note = Derived polymorphism lacks residues 62 to 252
  VARIANT 45: note = Ancestral polymorphism is R, Derived polymorphism is C
  VARIANT 44: note = Ancestral polymorphism is S, Derived polymorphism is R
  VARIANT 2..252: note = Derived polymorphism lacks residues 2 to 252
MQMSSEASKVAVPESVLRKRKREEQWATEKKEKALVKKKKSIESRKLIFTRAKQYAEEYDAQEKELVQLKREARLKGGFYVSPEAKLLFVVRIRGINAMHPKTRKILQLLRLRQMCSLMYIFNGVFLKVNKATIDMLRRVDPYDAYGYPNLNSVRELIYKRGYGNLNKQRIPLSNNQVIEEGLDKQKIICVEDLVHEIMTVGPHFKEANNFLWPFKLKAPLGGLKKKRNHYVEGGDAGNRENYINELIKRMN

SEQ ID NO: 27 - protein, 166 aa, Zea mays
  VARIANT 99: note = Ancestral polymorphism is L, Derived polymorphism is P
MRTYSHLWSTTKRSAMAFVIGVSISDRWANFTWVTGESMYPTFTAANSFWGGDFVLAEKRCLEQCKFSHGDVILFKCPSNHKEMLVKRLIGLPGEKIQLPGSLNPTKIPEGHCWVEGDNSTRSWDSRAFGPIPLGLVQGRVTHIIWPPSRIGRLERKMHEGRISPD

SEQ ID NO: 28 - protein, 447 aa, Zea mays
  VARIANT 97: note = Ancestral polymorphism is S, Derived polymorphism is L
  VARIANT 44: note = Ancestral polymorphism is R, Derived polymorphism is H
MHAPPLVAFAGGACPASAASSLSPWLASLRPAIVAAPARLLWFRRGALRLEAKAAWRATGGGRGPRVPAKGAVLASYMGAEEVVGPLSLLDEEELILHIRKERDNGKLPADVAINLEELYYNYRNAVLQNGDPNAYEIMLSNMTALFDRVLLDVQNPFTFPPYHKAVREPFDYYMFGQNYIRPLVDFRNSYVGNISLFHDMEEKLHQGHNVVLMSNHQTEADPAIIALLLEKTNPWISENIVYVAGDRVVTDPLCKPFSMGRNLICVYSKKHMNDFPELIEMKRRSNTRSLKEMALLLRGGSQLIWIAPSGGRDRPNPSTGEWYPAHFDSSTVDNMRRLLEHAGVPGHIYPLSLLCYEVMPPPQQVEKEIGEQRVISFHGVGLSATEETKYGDITCHTKNADEGRELFTNTLYNSVVNQYNVLKSAIFRDRGAAVSNNAISLSQPWR

SEQ ID NO: 29 - protein, 1159 aa, Zea mays
  VARIANT 1019..1159: note = Derived polymorphism lacks residues 1019 to 1159
MASKGILKNSGSRRMPPQGAGSRPPTAPTSAPTVVFGRRTDSGRFISYSRDDLDSEISSVDFQDYHVHIPMTPDNQPMDEDDSGTARAEDQRYVSGSLFTGGFNTVTRAHVMDKPDGDAAGRRGGGGAKGPSACMVEGCDARAMRDARGDDVLPCECDFRVCVDCFTDAVKAGAGVCPGCKEPYKNTEWEGLGAGAAEEVTRALSLPRGPAGANGHRMERRLSLVKQANVNQSGEFDHNLWLFQTKGTYGYGNAIWPQDEADDDTDGGAPAGHPKELLTKPWRPLTRKLRIPAAVISPYRLLVLIRLVALAFFLMWRIKHQNEDAIWLWGMSIVCELWFAFSWVLDQLPKLCPINRATDLSVLKEKFETPTPNNPTGKSDLPGVDIFVSTADPEKEPVLVTANTILSILAADYPVEKLACYLSDDGGALLTFEAMAEAASFANLWVPFCRKHDIEPRNPDSYFNLRRDPFKNKVKPDFVKDRRRVKREYDEFKVRVNGLPDAIRRRSDAYHAREEIQAMNLQREKLKGGGDEPPFEPVKIPKATWMADGTHWPGTWLQPSQDHARGDHAGIIQVMLKPPSDMPTTMYDAASKTPLDLAGVDTRLPMLVYMSREKRPGYDHNKKAGAMNALVRASAIMSNGPFILNLDCDHYIYNSKALREGMCFMMDRGGDRLCYVQFPQRFEGIDPSDRYANHNTVFFDVNMRALDGLQGPVYVGTGCLFRRIALYGFDPPRSKDHSPGFCSCCLPRRRKPSAASREETMALRMGGFDGDSMDLATFPKKFGNSSFLIDSIPVAEFQGRPLADHPSVKNGRPPGALTIPREMLDASIVAEAISVVSCWYEEKTEWGIRVGWIYGSVTEDVVTGYRMHNRGWKSVYCVTQRDAFRGTAPINLTDRLHQVLRWATGSVEIFFSRNNALFASSKMKVLQRIAYLNVGIYPFTSIFLIVYCFLPALSLFSGQFIVQTLNVTFLTYLLIITVTLCLLAMLEIKWSGIALEEWWRNEQFWLIGGTSAHLAAVLQGLLKVVAGIEISFTLTSKQVGDDVEDEFAELYIVKWTSLMIPPLTIIMINLVAIAVGFSRTIYSTIPQWSKLLGGVFFSFWVLAHLYPFAKGLMGRRGRTPTIVYVWSGLVSITISLLWIAIKPPSQAANSQFGGSFSFP

SEQ ID NO: 30 - protein, 125 aa, Zea mays
  VARIANT 38: note = Ancestral polymorphism is G, Derived polymorphism is E
  VARIANT 25: note = Ancestral polymorphism is R, Derived polymorphism is W
MPSTDSCLVRLCVSSLVMASVKRFRVTRKDKIMRRCAGKQHLLAKKNTKRKKRLSKMEMFADLWAKGFSLLGICLGMEKCHRTQDEDDSKNPPMSGLEDAFTSRSRALSNNSATMFGLLFTYGSV

SEQ ID NO: 31 - protein, 625 aa, Zea mays
  VARIANT 197: note = Ancestral polymorphism is G, Derived polymorphism is R
  VARIANT 181: note = Ancestral polymorphism is G, Derived polymorphism is A
MLHGTRRRTAPLAAAFFASKPQPQPPPQLPTPQIVEAAVARCPSDGIALSFFLWCARRPGYFHPPSSFDRLLPAASRLASRLGTANKLIRELQALGVHVKPQTFLLLLRLYWRGGLYPIVLDLFYQMRLWGFQPNAFACNVVLDVQLRTGHLDAARHTLQYYPAPNYLTYAIVLTHLCRAGGWSGARSCFIEMLQLGFVPSAASLTAVFACCSKAGTMSELLQLFSFALVSGCNLTSAMWTCLIARLCREGRLEEACNMLAKMADSGSSPSVVTYTPLVRGLLRAGRHEKASELLGSMMSASCRPDIVLYNVLMDSMLKERRYNEALNIYMHILGSQIKPDAYTLSTLAQVLQFSQNMGLLHSLILSSDISLDLVACNSVLSSLCKSGFPSEAIQFYIDRIDTCTSPDSYTHAGLLDSLCQLGRVNHAIDVYHNIIASAPELNAYVHAAILRGLVRQGQSLAALRILREAVRKNYAVDSVCYTVVLHGLFRVHLVEEAFRLFDQMKNSGLAPNTCTYNVMLCGLCRTRDLHAVKQLLTEMECADAKMDSISFNTVAVLLIKSKRIDSAVALIRDMLNLGMKPSTKTRLLLSQSTVYKSVLVDNATPTVESDGSDSSSDLLVCSAS

SEQ ID NO: 32 - protein, 382 aa, Zea mays
  VARIANT 321: note = Ancestral polymorphism is R, Derived polymorphism is L
  VARIANT 314: note = Ancestral polymorphism is L, Derived polymorphism is Q
MGVAFGCFGGCVRQSDGGGRQAVEDPKPVMEPSPSFDFREEYTSAFRTESYNDFWARVLDITLAHGAGLVPRPGGDGGVTASSKRLPSYRLFAEQLLEPDQRAVRAALASPRSGQLHPGVRDLLVTYYNETASASFLCSHLLRDIEQIRLRYRPLKTTLRKLACDVEAPNLSDVSAALGQPFAALAVSQGKLRQVQLSSADLLRSLDASRKKARLRISSLARLRQLLSASFVTVVAAVAVVGAFIGVHILAAFAAFPMMSPAWLGLFSGRSVRRALVQLEAATKGTYILNRDMDTISRLVARLRDEGEHMLALLQLCVEHLAMAGEKGRLVKEVLKQLCKNEESFRQQLDDLEEHLFLCFMTINKARSMVMNFIAGAEQNSS

SEQ ID NO: 33 - protein, 204 aa, Zea mays
  VARIANT 38: note = Ancestral polymorphism is K, Derived polymorphism is M
MQTVSSVLILTRMPRMTCRVALAAVLLCAAVAAALGGKRAPIPDDLRDVIDDEEDDEWRRYGTPPSRGPGRGDGPPPDLSRMDPAALQDELLRGQTGPSFGFVKLRPGTARSREDVVGIATRWSNVLRTGSVDAKFVAVNFGTLMFTMERGRDILELKEFILSQDEAYEFKVGDRVFRRPGDPPLDQVLDKPQKKKRHKSRDEL

SEQ ID NO: 34 - protein, 183 aa, Zea mays
  VARIANT 132: note = Ancestral polymorphism is R, Derived polymorphism is H
  VARIANT 41: note = Ancestral polymorphism is E, Derived polymorphism is G
MSSPSKRREMDLMKLMMSDYKVDMVNDGMQEFFVEFRGPNESIYQGGIWRVRVELPDAYPYKSPSIGFINKIYHPNVDEMSGSVCLDVINQTWSPMFDLVNVFEVFLPQLLLYPNPSDPLNGDAAALMMRDRPAYEQKVKEYCEKYAKPEDAGVSPEDESSDEELSEEENDSGDEEIMGKPDT

SEQ ID NO: 35 - protein, 441 aa, Zea mays
  VARIANT 365: note = Ancestral polymorphism is K, Derived polymorphism is N
  VARIANT 97: note = Ancestral polymorphism is Q, Derived polymorphism is E
MYSCWCVRPVAAVGLLCLVLAIESRPAEIDLLVDRSGSFPSVSRCLLGTGTGGGVAMALQYVEAQRQLRPDLSDWYASLADLYQRKLWHQLTLKLDQFLQLQVAQTGDTIIQLYNNFIVDFETKINLLKLAHFAVITSRQYPDKDAAITFLEGVITKLRETRESRINEPILYVKMQIAAINLEKGNKKECKNLLEDGKTTLDSMTDVDPTVHASFYWISSQYHKACQEFAEFYKNALLYLAYTTVESLSESFKLDLAFDLSLAALLGDNIYNFGELLAHPIINSLIGTKVEWVYHMLQAFNSGNLALYQELCRVHNAALTAQPALVQNERKLLEKINILCLMEIIFSRPSEDRTIPLSVIAERTKLSISDVECLLMKSLSVHLIEGIIDEVDSTVHVSWVQPRVLGIPQVKALRDRLDAWVGKVHTTLLSVEAETPDLVAV

SEQ ID NO: 36 - protein, 398 aa, Zea mays
  VARIANT 128: note = Ancestral polymorphism is S, Derived polymorphism is F
MRKAGVTSASSGGGEGWPCGGGLNLGVKLNVLLLLLVVATNLVSLYHLSLRAATVPPVLLQQQRDGDKDLVLIRQLEAIRAGVSQLNHLRSSSPPPPLPPAELVLYSRLAPVASACSAHPELLHRYMSYTPYALCPDDALSIAEPLLLRGCHPLPRRRCFSPTASASASKLLPTDPFSPLPDAAVRWPKEAKCKSFSCLPPSLGFDVARTEAARFLRARGPLDLTAPQLLRLASLSRAGPIRLGLDIGGGTGTLAARLKKLVNATVLTTTMNLGAPYSEAAAARGVVPLHVPLQQRFPVGDGTMDVVRAGHAVNRWIPEVALEFLWYDADRVLRPGGLLWVDHFWCRRSDLEGVYAAMLRRLGYKTIKWVAADKSVAIGGNSSKDEVYLTALLQKSFS

SEQ ID NO: 37 - protein, 636 aa, Zea mays
  VARIANT 375..636: note = Ancestral polymorphism lacks residues 375 to 636
  VARIANT 125: note = Ancestral polymorphism is T, Derived polymorphism is I
  VARIANT 92: note = Ancestral polymorphism is G, Derived polymorphism is S
MQDAVATHGPANAAAGATFYCAAAGVYASTHPPVALPSDPSLSLVPHIFARLPAARPDAPALVDAATAEALSRADLRRLVSALAAGLRRRRGLREGDVVLLALPNSIAFPVAFLAVLAAGSIATTMSPFSAPAEIAARVRDTSPALVFATLDNVGKLPPLRVPVVLVPDAFHLADEGAPEFAPFRELLLLDSEPLPGPSVGQDDAAAILYSSGTGGRSKGVVLTHRNLIATVELFVHFEASQYAAPACDNVYLAALPMFHVYGLSLFAVGLLSLGSTVVVMKRFDAGEAVKTIRRFKVTHFPVVPPIMAALVHTTKPAAMPLECLVQVSTGAAPSSRRLIDDFVKAFPHVDLIQLMIAEKYLSRLVLPNGLARLQLFRKGTIKSLRGSVFNYQSITSVLKIKDESRLWIQVGYHRGYGMTESAAVGTRGFNTSKHKKYGSVGLLAPNMHARIVHVETGCSLPPGSCGELWLHGPAIMKGYLNHVDPCAINGGWLRTGDIAYFDFDGYLYIVGRLKEVIKYKGFQIAPADLEAVLIEHPGIVDVAVTSTEDEEAGEVPVAFVVRKSGSGLSCTQVMEYVAKQVSPYKKVRKVVFVESIPKSPAGKVLRRLLRESLAASAVAGPTSYSESNSMRHSRL

SEQ ID NO: 38 - protein, 142 aa, Zea mays
  VARIANT 24: note = Ancestral polymorphism is L, Derived polymorphism is Q
  VARIANT 57: note = Ancestral polymorphism is Q, Derived polymorphism is H
  VARIANT 64: note = Ancestral polymorphism is Y, Derived polymorphism is S
MPAEHQFAYRHNCNGLSIDQMKELETDDVPLHTIEVIHAYWQDKRQKRGMPLIRHFQSAMWKIYEQQLHEWESKVCRMQSSSNGYQEKKLPPKPALFAFCLRPRGLHVPYKGPKQRSHKKLMSTGCHSFSREHDGFYGQGIL

SEQ ID NO: 39 - protein, 115 aa, Zea mays
  VARIANT 111: note = Ancestral polymorphism is P, Derived polymorphism is A
MAAVVRGVLRGIKEKGLTNFIRDVRDEGYFKCLLDGNLLQTKIHNIGATLVGVDKFGNKYYEKLHDTQYGRHRWVEYAEKGRYNASQVPAEWHGWLHHITDSTGDKASFAPCYLL

SEQ ID NO: 40 - protein, 362 aa, Zea mays
  VARIANT 8: note = Ancestral polymorphism is A, Derived polymorphism is T
MDSAFRRALNEPMCLEETVVQQGIERCPFLRNINEPTSFSFSSVNFPIPARGAKGPIFEDGPNFDMAFRVFHGRDGVVPLSEGSLAQIEKPLPKPNPEFNPLAAKAATISLSAFGGFFSFGDFSNKRNKKNSNKKNPNNLPQNKGQPNNNNHEALSNEWLEMGQCPLAKSYRALSGIVPLVAKMMTPPAGMKLKCPPAVVAARAALSRTAFAKGLRPQPLPTKILVIALLGMAANVPLGIWREHTQKFSLQWFAAVHAAVPFIGMLRKSVLMPKTAMALTIAASILGQTIGSRAERIRLKRAAAAKLARESHGDAADYIKAPMSLKTGNHTVQFWDPLSLRAESTVAAGTTAVLVPAISAFN

SEQ ID NO: 41 - protein, 318 aa, Zea mays
  VARIANT 231: note = Ancestral polymorphism is T, Derived polymorphism is A
  VARIANT 208: note = Ancestral polymorphism is I, Derived polymorphism is M
MSTNPTAPKSGERRRCSCRRHQSSPPRSDMATGSASAIASFSVAAAAAAALRVRRPCARACAWAPSQRPQQGALVSLKPCASLAPQAPLWRAESDAAGGGAGAGDVMGLLLRERIVFLGNEIEDFLADAVVSQLLLLDAIDPDSDIRLFVNSPGGSLSATMAIYDVMQLVRADVSTIGMGIAGSTASIILGGGTKGKRFAMPNTRIMIHQPVGGASGQALDVEVQAKEILTNKRNVIRIVSGFTGRTPEQVEKDIDRDRYMGPLEAVDYGLIDGVIDGDSIIPLEPVPERVKPKYNYEELYKDPQKFLTPDVPDDEIY

SEQ ID NO: 42 - protein, 562 aa, Zea mays
  VARIANT 250..562: note = Derived polymorphism lacks residues 250 to 562
MRIRRYAARLLSSTSPGSAATAAPSSPPRPPAASWLHTDDDDCCAFCELSRPASQEGLDAIKHKGYIADRVLESVVRADERVGLPERPPVPEVKKCKIDHVPPVNKACVGLQVVKLAAKPEGAAPASEDAADPATKAGVFVVNDAAIEQGVKCIASLSGGASKMEVTVENSLANGPTTELEVSNSLANGPTTELGVSKGTSLANESADLPGVTCIMPEVTDKPVTDLGVISTVVEVSDTGPVVHETTELESAGEDYIASEATAEPEDAGRASCNVDDTAALDEPQPPNCDLYLGNVQDGNAIDTVTSTLQPSRCDAAEGGGSVNFTTNIPVRARGPTFKGGVLKDKSVAPSVLLVLDVLTRSIGKSGRTDVICYARRTGKRKAELLKVKKENIDLEDGVICEKEETLVSTDRCECVLSTAGSIDVKLADIKKDLMDNSAVGKVKKMKRNRFECNIDYCHMVFKTEAELAVHKKNMCTVSSCSRHFRSHRYLRRHQSAHNDDMPYKCPWDGCNMAFKWSWDRAEHFKVHAGAKPYKCTTPGCSKIFKFVSDFTRHRRRCKPQR

SEQ ID NO: 43 - protein, 159 aa, Zea mays
  VARIANT 109: note = Ancestral polymorphism is K, Derived polymorphism is Q
  VARIANT 69: note = Ancestral polymorphism is A, Derived polymorphism is T
MRPAAASTGGFHLVLPAAHRLPPSLPSISSRRGVRIRAAAAAGGGGALLGRPMEDVYKVRVERGEVARARMEALRVMETWSSWRTGGRCRMPWDWQVDQLVYIVSGEVKVIPAGAVHGDDYMHFVAGDLVRYPRWFEADLYFDGPYEERYRFLAYGDDN

SEQ ID NO: 44 - protein, 433 aa, Zea mays
  VARIANT 284..433: note = Derived polymorphism lacks residues 284 to 433
  VARIANT 257..433: note = Derived polymorphism lacks residues 257 to 433
  VARIANT 181..433: note = Derived polymorphism lacks residues 181 to 433
  VARIANT 177: note = Ancestral polymorphism is S, Derived polymorphism is Y
  VARIANT 159..433: note = Ancestral polymorphism lacks residues 159 to 433
  VARIANT 75..433: note = Derived polymorphism lacks residues 75 to 433
MAPAFPRRRPTSPDSPPHTAAAPMAHPPCSPPWPPGGGFGLPESPPNVSPPNQSEKSTGRSFCTSRTGEGRGARQHYVPAGRVSPGPMASAMSSRSRPAGHFGVFPVNAMAGTGGSDGGVQLADKLKIIKTDNFDPDAYVQSKCRAMDEKKMVVFVMQQAVWNVDTNNEAVQGFRRSLHDEEQGNCWRGRATGKTTYKVQAAVRYCVLMLGVKMVATLRFLSFKKKHRGREVTVIDCTSPPAACGSPLAAAAVCSLQSLGAASPTKSELAEIVPQEKSPKGNASFFSFHSTNAAESKVFYLKMKGDYHRKDAAGSTMNSYKVAQVSSDCSPLLEAGQAESLGTELLEMVPSREEEIKLKEYREDAVSTFVVDDYVRLEFKGSTFSGSWKSFSSPKISSTFLVVIAIVSNEIVIHVWMMKTATRCEVHQYYSSY

SEQ ID NO: 45 - protein, 244 aa, Zea mays
  VARIANT 185: note = Ancestral polymorphism is V, Derived polymorphism is A
  VARIANT 154..244: note = Ancestral polymorphism lacks residues 154 to 244
  VARIANT 145..244: note = Derived polymorphism lacks residues 145 to 244
  VARIANT 104..244: note = Derived polymorphism lacks residues 104 to 244
  VARIANT 80..244: note = Derived polymorphism lacks residues 80 to 244
  VARIANT 42: note = Ancestral polymorphism is K, Derived polymorphism is N
  VARIANT 40..244: note = Derived polymorphism lacks residues 40 to 244
  VARIANT 39: note = Ancestral polymorphism is L, Derived polymorphism is F
  VARIANT 18: note = Ancestral polymorphism is N, Derived polymorphism is D
MCLKLCPANDQLVVTRYNSWDEINTREKRKMLAATDLMLWHKVTTVSGNPPFFFTLFTPDQRAKRKGVIQNYRSFFSLRSNGLAHIVPVPSHPHRGAAWGAHHQAPQRCEYQSCPLQYFCCCGTSRLIYKEVEGELERRGRCWWRRIRGCGTRSPPSPVWHTTSLYHLVHTTALLGAPITKRPNVWRAPHYWNCALLWNRIYNFVRCYTVAYLEDRKFSSPAPLGGFAFIAAWASLLCVYYVWY

SEQ ID NO: 46 - protein, 194 aa, Zea mays
  VARIANT 111: note = Ancestral polymorphism is I, Derived polymorphism is T
  VARIANT 109: note = Ancestral polymorphism is A, Derived polymorphism is T
  VARIANT 102: note = Ancestral polymorphism is R, Derived polymorphism is S
  VARIANT 101: note = Ancestral polymorphism is G, Derived polymorphism is R
MGQAFRKLFDAFFGNKEMRVVMLGLDAAGKTTILYKLHIGEVLSTVPTIGFNVEKVQYKNVVFTVWDVGGQEKLRPLWRHYFNNTDALIYVVDSLDRERIGRARAEFQAIINDPFMLNSVLLVFANKQDMRGAMTPMEVCEGLGLYDLTNRIWHIQGTCALKGDGLYEGLDWLATTLDEMRASGRLTSASSSAS

SEQ ID NO: 47 - protein, 201 aa, Zea mays
  VARIANT 55: note = Ancestral polymorphism is G, Derived polymorphism is D
  VARIANT 62..201: note = Derived polymorphism lacks residues 62 to 201
MWLGARYWQQALHELDPVFKKFSFSESVASLFSSLGYKRPAVIQSMYIFKQPGIGGEVVPHQDNTFLYTEPRTCTGLWLALEDATINNGCLWAIPGSHKKGLVRRMVRDENGTHFDRPSPVYDQKEFVPLEVKSGALVVIHGDLIHQSFENLSPASRHAFSLHVVDTEGCKWSEDNWLVHIHNGIIEEFFIYNTILIFHCP

SEQ ID NO: 48 - protein, 167 aa, Zea mays
  VARIANT 84: note = Ancestral polymorphism is R, Derived polymorphism is H
MASSGSGGGSPGSPCGACKFLRRKCAAECVFAPHFCAEDGAAQFAAIHKVFGASNAAKLLQQVAPADRSEAAATVTYEAQARLRDPIYGCVAHIFALQQQVASLQMQVLQAKAQVAQTMAAAGPQGGSSPLLQRWPLEPESLSTQSSGCYSDMYCGFGDQEEGSYTR

SEQ ID NO: 49 - protein, 568 aa, Zea mays
  VARIANT 103..568: note = Derived polymorphism lacks residues 103 to 568
MPPAQAPSSGGAAWRQLLLLLTVLPLTLAALAFVLQWRGGGGVDDPTTRWPSHAFPGMAEPTPPSLPSSDCADVLVGSSAPSFPYIRGWSFTSDSGAAMGSVEEHLQPKVCVQTSTSAGLEQILPWLFYHKVVGVAQFLLFVEGKAAKPNVAGVLESIPDIACHNVWLGMFFDRVFITHLCHLPDVFYCLGSSRIWNETWLSGFFYKPCNYELFVKQSLNMEMAIVMARDGGMDWIIHLDTDELLYPGGAAEYSVRRLLAEVPRDVDMVIFPNYESSVEHDNIKDPFSEVSMFKRNYDHLPKDTYFGMYKEATRGNPNYFLTYGNGKSAARIQDHLRPNGAHRWHNYAKSPNEIKLEEAAVLHYTYTKFSDLTSRRDRCGCKPTKEDVKRCFMLDFDRAVSKDVFICNSEAQEIYAVLGASHWMTPFAMQAFIIASTASEEEMLRWYNERVVWTDKQLNLKLLRKGVLTRIYTPMTIVQSLRESGVFTSAITAGQPAVNAKLSPKETNAQSQNVTAPGNMTRVVRSTDSKASGRKILQAVDLAFSDTNVTAVPPLSPPSLDEHRHHSE

SEQ ID NO: 50 - protein, 126 aa, Zea mays
  VARIANT 10: note = Ancestral polymorphism is A, Derived polymorphism is V
  VARIANT 15: note = Ancestral polymorphism is R, Derived polymorphism is C
  VARIANT 66..126: note = Derived polymorphism lacks residues 66 to 126
  VARIANT 94..126: note = Derived polymorphism lacks residues 94 to 126
MGEEINPSDALALYRLEYKPYSSKRSAKSKLSISPLNEIQQQMDRLTADSPMESKQTARSKPKANQKGTNANIHLHVNAHNQVNAPNAYQATPQVNQMTLMNGSVVYGPHLPHSKDIIYGPHAPHG

SEQ ID NO: 51 - protein, 273 aa, Zea mays
  VARIANT 187: note = Ancestral polymorphism is E, Derived polymorphism is K
  VARIANT 240..273: note = Derived polymorphism lacks residues 240 to 273
  VARIANT 241..273: note = Derived polymorphism lacks residues 241 to 273
  VARIANT 248..273: note = Derived polymorphism lacks residues 248 to 273
MEFFIEYGEASQYQIQEVIGKRSYEVVATTADTRTGERVAIKKINDVFEHVSDATCILREIKLLRLLRHPDIVEIKHIMLPPSRREFQDIYVVFELMESDLHQVIRANDDLTPEHHQFFLYQLLRALKYIHATNVFHRDLKPKNILANADCKLKICDIGLARASSNDAPSAIFWIDYVATRWYRAPKLCGSFFSKALADPYFASLANVEHEPSRHPISKLEFEFERRKLAKDDVRELIYREILEYHPQMLEEYMKGGEQINFFSLKKSSLLAW

SEQ ID NO: 52 - protein, 164 aa, Zea mays
  VARIANT 8: note = Ancestral polymorphism is G, Derived polymorphism is R
MGFVSFVGRVLFVAAFLLSAYQEFNEFGADGGPAAKALRPKFNVFVKNVSAHLGVAVPHIELKHVIAATIGLKGLGSLLFILSSSLGAYLLLLYLALITPIIHDFYNYDMEKAEFAGLFAKFTQAITDFSDLALIGALLFFLGMKNSIPKRQGGKKKAPKAKTN

SEQ ID NO: 53 - protein, 539 aa, Zea mays
  VARIANT 54: note = Ancestral polymorphism is P, Derived polymorphism is L
  VARIANT 33: note = Ancestral polymorphism is R, Derived polymorphism is P
MGDYYYRRRSPHLLPAAVLALLAVVVVVSSSLPSAAAAGAGRNVITHIKGFEGPLPFHLETGYVEVDEEHGARLFYYFIESERNPAEDPLILWITGGPGCSALSGLLFEIACMAQWMTQFFPSEFRNWTNIWGSWFLDLCYQEEESCSSTTSPIGPLKFDVAGYTEGFPRLVYFEDSWTKVSNVIFLDAPVGTGFSYSREEAGLNVSLTESGRQHHVFLRKWVAEHPEFASNPLYIGGDSYSGYTVPVTAMDIATSSDDEEPPKLNLVGYLVGNAATDDRYDTGGKVPFMHGMGLISDELYEAAKQGCGGDFYVAPDPTNARCASAMMAINMVTFAVNPVHILEPFCGAAVRAGGGSIFQGYGGGARRSMLVRDDVRHPGFFAKQRLGLPVECRDNGYRLSYIWADDPEVREALGILEGSIGSWSRCTMLSHYRHDVTTVIPYHVNLTKAGYRALVYNGDHDLDMTFVGTQEWIRSIGYPIVSDWRPWFANRQVAGFTRTYAHNLTFATVKGGGHTAPEYRPKECQAMLDRWTSEAGQL

SEQ ID NO: 54 - protein, 566 aa, Zea mays
  VARIANT 13: note = Ancestral polymorphism is I, Derived polymorphism is T
MSPLALLQALIFILCCSPLASASSSELTLAGAACGDDQLVIFDASDGLLNLSVNGVLMQDRVFACQKLGFYFGSGCLRCSNLSDAWRSAVKQYCGEGSEKSHATLHQDVPRKLLRWSTENSSRNACERSGLNENNQDIGDSSEKQEHLLAVPGVILLCCGLMLPCFHAERKEVSRHDNATIQRNAREFIFQLILFLLSAPSFFSEPKIFSLSTEGGFSLNILKNIESVSSYEGSMSSEKVPPTPHRIPPSPSRFAPSPQIARVGSVNLSIQQILRATQNFSPSFKLGEGGFGMVYRAVLPDGNVVAVKRAKKDQFAGPRDEFSNEVDLLAKIDHRNLVRLLGFTDKGNERIIITEYVPNGTLREHLDGQHGRVLDFNQRLEIAIDVAHALTYLHLYAEKTIIHRDVKSSNILLTDSYRAKVSDFGFARSGPSDTEKTHISTKVKGTAGYLDPEYLRTYQLTPKSDVFSFGILLVEILSARRPVELKRTPEERITIRWTFKKFNEGNTREILDPLLEDHVDDEVLEKLLSLAFQCAAPTRDDRPTMKEVGEQLWEIRKEYGKSVRKV

SEQ ID NO: 55 - protein, 426 aa, Zea mays
  VARIANT 56: note = Ancestral polymorphism is L, Derived polymorphism is H
  VARIANT 57: note = Ancestral polymorphism is T, Derived polymorphism is M
  VARIANT 321: note = Ancestral polymorphism is P, Derived polymorphism is L
  VARIANT 332..426: note = Derived polymorphism lacks residues 332 to 426
  VARIANT 390: note = Ancestral polymorphism is R, Derived polymorphism is L
MATVARLRWSTIWLLVPVAAAIVLSKFASTTRRAPQQLPPVVVVPGYATNELDARLTELYHPSSPRCGAHKGKGWFRLYLNYTALEDAADVRCFAEQMATAYDAASDDYRNAQGVETRVPFFGSTRAFRYPDPDRRNFSYMDKFVSRLERLGYRDGENLFGAPYDFRYAVAPPGHPSRVGDAFFGRLRRLVERASRANGGGPVTIVAHSYGGTLAHQFLLRRPLPWRRRFVRRFVPVAAPWGGVVLGMLTIVAGNNLGLPFVDPLALKGEYRSLQSSLWPLPNPNAFRAGQPLVTTRSRTYTAHDMADFLDAIGLGAAIVPYQSRVLPLFRELPSPRVPVACVVGVGLDTPEMLAYPGDDFDVTPMMVMGDGDGLVNLVSLLAVDPAWRLPAAYFRMLKVRNVSHTGLFVDDAALAVIISAILRPN

SEQ ID NO: 56 - protein, 176 aa, Zea mays
  VARIANT 85: note = Ancestral polymorphism is T, Derived polymorphism is N
  VARIANT 76..176: note = Derived polymorphism lacks residues 76 to 176
  VARIANT 65: note = Ancestral polymorphism is W, Derived polymorphism is L
  VARIANT 55: note = Ancestral polymorphism is L, Derived polymorphism is P
  VARIANT 50: note = Ancestral polymorphism is G, Derived polymorphism is V
  VARIANT 11..176: note = Derived polymorphism lacks residues 11 to 176
MSSLASVLDSQVKTSDSDPVPITCASSQICLSAAGGDYYSPASHLLELEGVCFLLDCPSTSPPSWPSRRCPSPVMQGVSSMWCHTTGCQRPGRKVVWMSCSCLPLQGCSDSPSSLGSLDSPTRRYQMQSLHFHRGHLFLPRGYYQESSIQIQDVQHHSNISIVNRFYKRNQLCFYL

SEQ ID NO: 57 - protein, 169 aa, Zea mays
  VARIANT 38..169: note = Derived polymorphism lacks residues 38 to 169
MTHFQLSLLPNANPILSSVLSRTTTLPWHKKSLISNLQGYQIVPKNFPQNENQKRDSKQIIQRGTRTRGLTLRWRATTSPGSDRRDPPRSGGGGEERGRWRQQWGTGEERGRWRQQWGTSEERGRWRQQWGTDGGGSRWGGEMKEGREKGMVASHEGSKVKEAGRRMVA

SEQ ID NO: 58 - protein, 578 aa, Zea mays
  VARIANT 16: note = Ancestral polymorphism is P, Derived polymorphism is T
  VARIANT 87: note = Ancestral polymorphism is A, Derived polymorphism is T
  VARIANT 93: note = Ancestral polymorphism is K, Derived polymorphism is R
  VARIANT 150: note = Ancestral polymorphism is G, Derived polymorphism is V
  VARIANT 230: note = Ancestral polymorphism is G, Derived polymorphism is V
  VARIANT 265: note = Ancestral polymorphism is A, Derived polymorphism is T
MRRLAKSLLLASLSRTLRHRPQLPLLHPWPPQPRRPEPRLLPFSTQTLAPGPAPPPALVAASTGEPTGLALLESAELHESEGDHQEALGLALKALAPLQASHGGWSLPVARALRLAGAAATRAGSLSDGLESLGAAADIVDYLAPARRKGVPAEVAVVGAAVYEQLARAKMAIGRRWDAVGDLQRALDLKTLFLEAGSAELGNAYRDVAEAYAGVLDFDKALPLCSKALGIAERRFGEDSAEVAKLRRLLMSVYTGLGRHEEALAQIELAKVVYERLGLNVELSQAEIDGANIRILLGRSEEALNNIKRVMQRADKESEERALAYVTMAKILMSEDTVLDSKRCLEIAQGIIDAKDSIDPGRFAEAYAEISMLYESLANFETSSGSFEMASNLMKKTLAILESAKEMHHIEGSISARLGWLLLYIKNVDESVQYLERAVDKLKNCFGPRHFGLGFAYRNLGQAYLEMNQHQSAVEFFKLALDIIEATFGPLHDDTIDTKQCIANAYGLMKSYKLAMEFQEQVMDAYSRCGHGALDDFKEAERLLEQIKMKAQGLRHAVFPANSLPDSALALAQRNKDD

SEQ ID NO: 59 - protein, 130 aa, Zea mays
  VARIANT 24: note = Ancestral polymorphism is E, Derived polymorphism is A
  VARIANT 25: note = Ancestral polymorphism is I, Derived polymorphism is L
  VARIANT 56: note = Ancestral polymorphism is A, Derived polymorphism is T
MEDDKKEGKYRGVRKRPWGKFAAEIRDPERGGSRVWLGTFDTAEEAARAYDRAAFAMKGATAVLNFPASGGSSAGAAPGGRTSGGSSSSTTSAPASRGRARVPDSEKVELECLDDRVLEELLAEDKYNKN

SEQ ID NO: 60 - protein, 77 aa, Zea mays
  VARIANT 13: note = Ancestral polymorphism is A, Derived polymorphism is V
  VARIANT 15: note = Ancestral polymorphism is D, Derived polymorphism is N
  VARIANT 28: note = Ancestral polymorphism is G, Derived polymorphism is S
  VARIANT 29..77: note = Derived polymorphism lacks residues 29 to 77
  VARIANT 36: note = Ancestral polymorphism is A, Derived polymorphism is V
  VARIANT 42: note = Ancestral polymorphism is P, Derived polymorphism is S
  VARIANT 51: note = Ancestral polymorphism is S, Derived polymorphism is G
  VARIANT 75: note = Ancestral polymorphism is P, Derived polymorphism is L
MSEDDLPYHVRVADDGDLETVGRYDFDGQLGCPMIAHPKLDPATGELHALSYEVVRRPYLKYFYFKPDADNVEIPLA

SEQ ID NO: 61 - protein, 262 aa, Zea mays
  VARIANT 184: note = Ancestral polymorphism is R, Derived polymorphism is C
MEQEEVGLALGLSLGSGHHHQELKPQHPSHPCAALLEPSLSLSGPATKDDGPTAPVRRFAAVKRELQTMEGNDDEATGRVLVYSVASSAVVTADDDEGCNSSRKKLRLSKEQSALLEDHFKEHSTLNPKQKAALARQLNLSPRQVEVWFQNRRARTKLKQTEVDCEILKRCCETLTEENRRLHRELQQLRALSHPHPHPAAFFMPTAAAAALSICPSCQRLVATGASAAAATTAGADNKPKAGGPGGRAPHVFSPFTNSAAC

SEQ ID NO: 62 - protein, 179 aa, Zea mays
  VARIANT 164: note = Ancestral polymorphism is K, Derived polymorphism is I
  VARIANT 159: note = Ancestral polymorphism is T, Derived polymorphism is M
  VARIANT 132: note = Ancestral polymorphism is S, Derived polymorphism is L
  VARIANT 125: note = Ancestral polymorphism is K, Derived polymorphism is I
  VARIANT 120..179: note = Derived polymorphism lacks residues 120 to 179
  VARIANT 116: note = Ancestral polymorphism is A, Derived polymorphism is D
  VARIANT 108: note = Ancestral polymorphism is D, Derived polymorphism is N
  VARIANT 88: note = Ancestral polymorphism is A, Derived polymorphism is T
  VARIANT 75: note = Ancestral polymorphism is E, Derived polymorphism is K
  VARIANT 49: note = Ancestral polymorphism is A, Derived polymorphism is D
  VARIANT 37: note = Ancestral polymorphism is G, Derived polymorphism is S
MRYEALLLRDAKYCNDLHLQVSCQEWLTFATDCLDNGFYTIASKAFANALVHIHPSHLGHLDSANSIEEKDKIIEITGLQNLAKSLSAQHCGKFSVLWIAQIAGRETDFLMTFTCAVTIQIKSTKYMERRASSVHEKYNLQSGKPKLTRSSMFRLGIKTRNIKKLLRSQERNLGDLTQS

SEQ ID NO: 63 - protein, 104 aa, Zea mays
  VARIANT 37: note = Ancestral polymorphism is N, Derived polymorphism is S
  VARIANT 19: note = Ancestral polymorphism is S, Derived polymorphism is G
MDRVTKLASQRAVVIFSASSCCMCHTVTRLFRELGVNPTVVELDEDPSWGKEMEKALARLLGRSPAVPAVFIGGRLVGSTDKVMSLHLSGNLDTMLRNAGALWV

SEQ ID NO: 64 - protein, 524 aa, Zea mays
  VARIANT 229..524: note = Derived polymorphism lacks residues 229 to 524
MLLCCCTFPQQIQTCAPRSSFHPSCLPRSLLSSGEQGRSKKSKLHRVRAHVFKSKNQSLRSQSHLVDSHGGPADKIPRKDFPCSAAPSLPDAEAVAFWLRFCRRELDVRRAHAVALRSLGSLGVFVSNNLISAYVRFDEVANARKVFDEMPERSIVSWTAMMNGYQKLGCHGEHGHSDKALQMFPTMVSEGFRPNEFTVCSALKACAEEKALRFGKQLHGAIVKKLYKYDIHVGSALVTMYARCGEVFDAQTVFDKMPRRNTITWTSMISGYAQSGCGEEAVLLFRKMKMRRVFVNHLTIVSLLSACGSMQSIYHGKELHAQIIKNCMEENLQIGSTLVWFYNRRGEHTYATRILEAMPDRDAVAWTAMISGYNNLGHNVEALKSLDEMLWDGVVPNTYTYSSALKACARLEALQDGRRIHGVVNKTQAFSNVFVGCSLIDMYMRCGKVDEARRVFDAMPEHNLVTWKVMITGFTQNGRSEEALKYMFLMQQEGYVVDEFVLSTVLSSCGDFQLKSDRISFIVQ

SEQ ID NO: 65 - protein, 618 aa, Zea mays
  VARIANT 323..618: note = Derived polymorphism lacks residues 323 to 618
MLLCCCTFPQQIQTCAPRSSFHPSCLPRSLLSSGEQGRSKKSKLHRVRAHVFKSKNQSLRSQSHLVDSHGGPADKIPRKDFPCSAAPSLPDAEAVAFWLRFCRRELDVRRAHAVALRSLGSLGVFVSNNLISAYVRFDEVANARKVFDEMPERSIVSWTAMMNGYQKLGCHGEVARLLMDMLIAGVQGNSLTFVCLLKSCGERCDARLGQQVHCCVVKGGWSNVIVDSAITHFYAQCGDVAAASTVFDRMASRDVISWTTMITAYVQHGHSDKALQMFPTMVSEGFRPNEFTVCSALKACAEEKALRFGKQLHGAIVKKLYKYDIHVGSALVTMYARCGEVFDAQTVFDKMPRRNTITWTSMISGYAQSGCGEEAVLLFRKMKMRRVFVNHLTIVSLLSACGSMQSIYHGKELHAQIIKNCMEENLQIGSTLVWFYNRRGEHTYATRILEAMPDRDAVAWTAMISGYNNLGHNVEALKSLDEMLWDGVVPNTYTYSSALKACARLEALQDGRRIHGVVNKTQAFSNVFVGCSLIDMYMRCGKVDEARRVFDAMPEHNLVTWKVMITGFTQNGRSEEALKYMFLMQQEGYVVDEFVLSTVLSSCGDFQLKSDRISFIVQ

SEQ ID NO: 66 - protein, 156 aa, Zea mays
  VARIANT 10: note = Ancestral polymorphism is C, Derived polymorphism is F
  VARIANT 21: note = Ancestral polymorphism is T, Derived polymorphism is I
  VARIANT 42..156: note = Derived polymorphism lacks residues 42 to 156
  VARIANT 54..156: note = Derived polymorphism lacks residues 54 to 156
  VARIANT 63: note = Ancestral polymorphism is P, Derived polymorphism is L
  VARIANT 69: note = Ancestral polymorphism is A, Derived polymorphism is V
  VARIANT 76: note = Ancestral polymorphism is A, Derived polymorphism is T
  VARIANT 84: note = Ancestral polymorphism is T, Derived polymorphism is M
  VARIANT 90: note = Ancestral polymorphism is E, Derived polymorphism is K
  VARIANT 113: note = Ancestral polymorphism is L, Derived polymorphism is F
  VARIANT 140..156: note = Derived polymorphism lacks residues 140 to 156
  VARIANT 141: note = Ancestral polymorphism is G, Derived polymorphism is W
  VARIANT 148: note = Ancestral polymorphism is I, Derived polymorphism is N
MLQLHSCLICTYHFLQLGAGTSLPGLVAAKVGADVTLTDIAQNAEVSGLTWGDWDESVFDLRPDIILGADVLYDSANFNDLFATVTFLLENSSGAVFITTYHNRSGQHLIEFLMVKWGLKCLKLLDGFSFLPPCKAALLQGNIQLVEIALDKEKYK

SEQ ID NO: 67 - protein, 507 aa, Zea mays
  VARIANT 174: note = Ancestral polymorphism is R, Derived polymorphism is W
  VARIANT 444..507: note = Derived polymorphism lacks residues 444 to 507
MTMNVVVAGVLLLVLGGLNNPPSVAADFCDNLKQVAATLPKNTSTSPLHFATATFGQAPDVVYALALCRGDVLDDTTCGDCVANTFDKVKPPPPQVCYPAAYYYGGACRLVYSGDNILAPPNTTAANGDDTPYPLWNIKNITAADADDVRLIVRLVHELVVETVQLAASTAPRRFATGVMDSGAMFPKVYSLAQCTPDLSAAGCLACLQRLLGMVNSTMALRMGAQIHVIRCYFRYEAYAFYDSKPMLQVGPSAPAPAPSPNPVEHKRRSSKLWVIPVVVVPLAAVAFLCFIFYSPCFRRYRRGKAMRLQAGSRRTQGLHGDEELVWDGKNSDFSVFHFEQVLEATDSFSEENKLGHGGFGAVYKGQFADGLQIAVKRLASHSGQGFTEFKNEVQLIAKLQHRNLAWQLWDEERWIDIVDASLVNKSQSSEMMRCVNIALLCVQENAADRPTMADVVAMLSTETTTVLAEPKKPAYFNVRVGDEEAPTTATESCSVNDMTISVTTPR

SEQ ID NO: 68 - protein, 674 aa, Zea mays
  VARIANT 319..674: note = Derived polymorphism lacks residues 319 to 674
MAGDALIVIVTSFLLALPSATAIGKVCGNAGNYTANGRYRSNLDSLAAALPANTSSSPQLFANATAGQAPDAVYALALCRGDLTGNLTGCSACVNGSLQYARRACPYAKAASVYDDNCLIGYSSANILVPAYNATRDTSTLFDYWNSMTIAGNGTLVAAHVDDLLTQTAQQAASSPRRFVTAYMDGSSNAVIPTLYSLAQCTPDLSAGDCLACLQRILGLLNATTSVSLGGRVLLLRCNFRFENNMFFDGAQMTQIRPSSGAPAPPPPSPTTNKGSGVKPWVIAVSVAPPVAVVAFCFILYNRRQRRRFRRGRSKLRQKHPRNNLKGDELDWEMETELSEFSVFDFHQILEATDNFSEENKLGEGGFGPVYKGQFPDGTEIAVKRLASHSGQGFVEFKNEVQLIAKLQHTNLVRLLGCCSQGEEKILVYEYLPNKSLDFFIFDENRKSLLDWKKRLAIIEGIAEGLLYLHKHSRLRVIHRDLKPSNILLDSEMNPKISDFGLAKIFSSNNIEGSTTRRVVGTYGYMAPEYASEGIFSIKSDVFSFGVLILEILSGKRNSGNHDYGDFINILGYAWQLYEEARWMDLVDASLVPMDHSSEIMRCMNIALLCVQENAADRPAMLDVVAMLSNKAKTLAQPNHPAYFNVRVGNEEESTAATASGSINEMTVSVTTGR

SEQ ID NO: 69 - protein, 453 aa, Zea mays
  VARIANT 5: note = Ancestral polymorphism is K, Derived polymorphism is N
  VARIANT 31: note = Ancestral polymorphism is D, Derived polymorphism is N
  VARIANT 132: note = Ancestral polymorphism is C, Derived polymorphism is F
MVTFKAHRSDPELVTPASPTPQGSKTLSDVDSQIPLWFYATVIEFFRPRNAVDGHDTQAVVDVAEAIREALAKALVYYYPIAGRLREVSKGKLAVECSGEGVVFVDAHADVRLDELGEPLLPPYPCIEELVCDIGDAKDVVGRPLMFMQVTRFKCGGFAIGVSICHNMADAFGVIQFLKCVTDLARGDEHPAVLPVWDRELLTARNPPDLTSLPFVQESHESSPVQPMTMDKMVGCYFLFGPREIAALRSQVTEPATNFELITAAMWMCRAEAIALALGCGSAGSQQQRASSSLLITMNVRGKAKLTPPLPRGFYGNGFVFVEAELCGATRSLGGTVELVQKAKRGMTEEYVKSMVDLFSLGGAPPYAQGWTFVVSDITRIGEDELDLGWAERVAGGVPIVGNDDATKMVSYQMRCKNADDEDCVVASMYLPEPAMNKFKEKILILATSKLAT

SEQ ID NO: 70 - protein, 259 aa, Zea mays
  VARIANT 8..259: note = Derived polymorphism lacks residues 8 to 259
  VARIANT 26: note = Ancestral polymorphism is E, Derived polymorphism is K
  VARIANT 54: note = Ancestral polymorphism is S, Derived polymorphism is I
  VARIANT 56..259: note = Derived polymorphism lacks residues 56 to 259
  VARIANT 64..259: note = Derived polymorphism lacks residues 64 to 259
  VARIANT 127..259: note = Derived polymorphism lacks residues 127 to 259
  VARIANT 148: note = Ancestral polymorphism is P, Derived polymorphism is L
  VARIANT 160: note = Ancestral polymorphism is D, Derived polymorphism is V
  VARIANT 161..259: note = Derived polymorphism lacks residues 161 to 259
  VARIANT 172: note = Ancestral polymorphism is E, Derived polymorphism is K
  VARIANT 178: note = Ancestral polymorphism is Y, Derived polymorphism is H
  VARIANT 210..259: note = Derived polymorphism lacks residues 210 to 259
  VARIANT 214: note = Ancestral polymorphism is R, Derived polymorphism is S
  VARIANT 216: note = Ancestral polymorphism is Y, Derived polymorphism is H
MTQLHHLQNKGRVCFPRPPHALLPHETRTTRRLSPPTTTGMEWKQKEGIKTNFSMGRKKMEGRWHGWSPADGIIWCSVEEVWCRVARTHKLITPAAAGVCLLLNSHALPCALGVYLLKVSDEKIKDWSNVVVAYEPVWAIGTGKVATPAQAQEVHASLRDWLKTNVSPEVAESTRIIYGGSVTTANYKELAAQPDVDGFLVGGASLKVMGSKTRIYMVLDFVMGGELHDIIVVLNLEHYEDARACCIWIFVLLIGLFRI

SEQ ID NO: 71 - protein, 189 aa, Zea mays
  VARIANT 146: note = Ancestral polymorphism is Y, Derived polymorphism is C
MGGGRDNHHADKGCYPPTVYPPVHSTGSYVFAPPVAYPYPYAQHGSMAPPPLGSYPYPSPMYSSHSGYPPSGYPTYNQSAYPSMGGYPGASLHATQHHGNGYNMGATLIGGAAAAAAATYGVHHLTHGHHPHNHHLGHFGKFKHHYNGHYGKLKHGKFGKHIGLGGKHGLLGWKHHRHGFFGGKYKRWK

SEQ ID NO: 72 - protein, 154 aa, Zea mays
  VARIANT 117: note = Ancestral polymorphism is R, Derived polymorphism is C
MGGSGRAGEMGEDGREGLGVRRRRRESRRPSATRNRGPPRVATRSLVASASASAQDTTPGHAASSAALARPTASKASLGRERLICTARSGAAPEEESGETSTKASQPLTKQSWKKSRSVPVAVDGLACCLAATVSDTIRSRRAAGGRGGEQRGG

SEQ ID NO: 73 - protein, 821 aa, Zea mays
  VARIANT 300: note = Ancestral polymorphism is T, Derived polymorphism is I
MADGGIVVAICQYGGEFTSGPNGNLTYKGGEAHAVDVTRDMPLENFKDEVSKVFHVDVTDMSLKYFLPNNYRTLITISCDRDLQRMVDFTTSATQVEVFLISRVENRSIVTYSGASASKPGSNAPGDKRKRPPSKNKVSKSNKKTPTPSAPGTSVQPSANNVKQPRPIAIETNDNRVFQLEFGSDVAFATPAGGASTAPDILDQQNLALVDTAHREPIGHFDDSGDSYVGSEITVDPQHGLDNPVMFWDDIIKGVGQEFDNVKDFRAQLCKYAIGKGFAYRFIKNETTRVTVKCVAEGCTWRMHASESSRNKKFVIKKMTDEHTCGGGNGEGQRRATRQWLTTVIKEKLHDNPMLKPKDLVKEIYEQYGVTLTYSQVWRGKEVAQKELYHAIRETYSHLPWYCERLTESNPGSIALLSPMVDTKFRRFFVAFHASLHGFANGCRPLLFLDKVPLKATNEYKLLVAAAVDADDAVFPVAFSVVEDENYESWVWFLMQLKFPVQNHSYAYNAMTFLSSGQKGLDAAVSQVFEDSHHAFCLHHIMEEFKGELRKGPWSQQIREGMIEDFTRAAQACSIEDFNTSIESIRNISTEAAEWIIASKPEHWSDAIFRGCRYDHFSSNIVDAFNNWIPTKKEGSIVLMVDSLRTKIMEIIETRREACKAWSGPLTPSMEFKAQEEVTKAGKMTVLCSSETVFEVRGNAIFVVNLANWECTCRRWQLSGLPCLHAVAVFNRIGRSFYDYCSKFFRIESYHMTYSGTIFPIPDMDTVDFSAGANLIPPPKPRTSDKPRRKRFNPNKIPTVIRLCSRCKQAGHNKATCEAIL

SEQ ID NO: 74 - protein, 631 aa, Zea mays
  VARIANT 21..631: note = Derived polymorphism lacks residues 21 to 631
  VARIANT 266..631: note = Derived polymorphism lacks residues 266 to 631
  VARIANT 385..631: note = Derived polymorphism lacks residues 385 to 631
  VARIANT 409..631: note = Derived polymorphism lacks residues 409 to 631
MSGRRLAIYRHFVKLKALAISIAEQIESQFDCGDISLASASKSDLRLINISIDDEGHEEDGRDWTSQMGLNLKYSAKLKKEKSEKQEESLLSFGGLFSCSSPVSVVPNLKWLCKRARTLYTVTDIIRNSSATATAEDLKPGMRTEIVTNVNVCKDDSRQHTFRQSGLEQPGGLQDCDKPSCSEQNDHGRHCLVNIPIAVAVHPLMHQVPEGPVSVSTCHDSICSPGSLDSPPLASPVEVTRYQGCIQSSELSSLPAFSVQHFLNDESTSVEGSINCVSNDCLVSQDVTLWSRDECLQVQLDQEKMGICNNPVMMSVDSHLIEGLAVSEGKRGDTVSASLEKEECYAKTSYCSNTEIKTTKSAVDNQMETHDLGTGPVKLNSSFDEMPSADVPASTQPPSVPPGLVSDESKVDFSHSAVKAFEHQSHNPANLKHESPHIDSHILEDAQVASMAALPGHDGISVDTVSNTFDILLGALAEESKATDAPGKDEVGKASLTLMTLASNEPSAYDVTDVRAVEVVETDTILGAAKDDKQVGLSDVVARCIGFSNRTNIICYVRRNHKRKRDSLSNTDSSQSHLSFVRSPCESLRSRTKPAVVEESEWSRTAEASFAKRCKRTKTVGSFQCDIDLCD

SEQ ID NO: 75 - protein, 320 aa, Zea mays
  VARIANT 167: note = Ancestral polymorphism is A, Derived polymorphism is S
  VARIANT 16: note = Ancestral polymorphism is G, Derived polymorphism is R
MDSTASHEWLAELEVGELDSIDAMTMEQLAKSLADELWDQPATTTHHQEQQQVELSDQRQQLTKTTGFPFLGDMSRRSYAEADEGFLPTTAAISAGGNDSLFSFTGGKSKQLSFASREPKHESNGGGTTAAGTPMESSKGGRRASSGVHEHIVAERMRRQKMNHQFAALASMIPDITKTDKVSLLGSTIEYVQHLRGRLKALQEERRQSSSSTGSAAESSPPLDARCCVGSPDDGGGVIPTVEADVRGTTVLLRVVCREKKGALITVLKELEKHGLSVVNTNVLPLAGSSLNITITARIEDGFSTAIELVNALNAALKKN

SEQ ID NO: 76 - protein, 583 aa, Zea mays
  VARIANT 201..583: note = Derived polymorphism lacks residues 201 to 583
MDAQDGDERPLIIHRLPLLQDESTSEFTSDGTVDLRNQPARKQRTGKWKACFFILGAEFAECVAFFAISKNLVTYLTGVLHESNVDAATTVSTWIGTSFFTPLVGAFLADTFWGRYWTILAFLSVYVTGMTVLTASALLPLLMGASYSRSAHRLFAYLGLYLAALGTGGIKPCVCALGADQFDASDPVERRAKGSFFNWYYFSINIGSLLSATVVVWVQDNVGWGVGFAIPTLLMLSGLVLFVAGRKVYRYQRVGGSPLTRASQVVVAAVRNYRLVLPEPDDSSALLHQAPPGTTEGNDSTMQHTSQFRFLDKAAIVAPSSGEKGATASPWRLCTVSQVEELKTVLRMFPVWVSMVLFFAATAQMSSTFIEQGETMDNRVGPFTVPPASLSTFDVISVMVCIPIYDKALVPLARRATGKERGLSQLQRLGVGLALSVAGMVYAALLEARRLSLARAAADGRPPMSIMWQAPAFAVLGAGEVFATIGILEFFYDQSPDGMKSLGTALAQLAVAAGNYFNSAVLAAVAAVTTRNGEAGWIPDDLDKGHLDYFFWFMAVLGVVNLLHFLHCSVRYRGSSNNSTYSS

SEQ ID NO: 77 - protein, 105 aa, Zea mays
  VARIANT 2: note = Ancestral polymorphism is A, Derived polymorphism is D
  VARIANT 5..105: note = Derived polymorphism lacks residues 5 to 105
MAQASSSFSIVLLFLALVLVVEVSAGTANEELYRPAGAEGSVPIEQCPEKCDYRCSATSYKKPCLFFCNYCCNKCLCVPSGTYGNKEECPCYDNMKTKQGGPKCP

SEQ ID NO: 78 - protein, 97 aa, Zea mays
  VARIANT 2: note = Ancestral polymorphism is T, Derived polymorphism is I
  VARIANT 4: note = Ancestral polymorphism is R, Derived polymorphism is C
  VARIANT 10: note = Ancestral polymorphism is H, Derived polymorphism is R
  VARIANT 12..97: note = Derived polymorphism lacks residues 12 to 97
  VARIANT 24: note = Ancestral polymorphism is P, Derived polymorphism is L
  VARIANT 34: note = Ancestral polymorphism is A, Derived polymorphism is V
  VARIANT 60: note = Ancestral polymorphism is L, Derived polymorphism is R
  VARIANT 61: note = Ancestral polymorphism is Y, Derived polymorphism is N
  VARIANT 62: note = Ancestral polymorphism is G, Derived polymorphism is R
  VARIANT 68: note = Ancestral polymorphism is G, Derived polymorphism is R
  VARIANT 71..97: note = Derived polymorphism lacks residues 71 to 97
MTARHVLAPHRRLLRLMRAQPPGPVDEGAIVLAAKHAETMAGKPLLYGIGTLLVMPLRTLYGVGCVFGARWFLYNMTSISPSLQIEFVSGPKHLGSY

SEQ ID NO: 79 - protein, 959 aa, Zea mays
  VARIANT 456..959: note = Ancestral polymorphism lacks residues 456 to 959
MVKAYLRYEPALTFGVIASPESNVVYDPSGRRLLAAALDRLAAWDIKRGLPSVSFAPSSSSPSLAVSCIASSHSAAVSSSVPLIPLRLSLSSALFEFGRLIASGHADGSIRLWDAETGACEATLHGHRSAASALRFGPSGAVLASGSKDCDVILWDVVAQAGLFRLRGHRDQVTDLVFLDSGKKLMSCSKDKFIRVWDLETQHCLQIVGGHRSEIWSMDVDPSERFLVSGSADPELQVFRIRQSVEEGEDWSKWDVLKLFGEIPRQSKERVANVRFNRDGSLVVCQVAGKTADIYRVLDETEAARKAKRRVSRKKEKASAKSMIAEENGTIIDPLPVQNLQNPTVIVTDVFKLFQVLRASKKICSITFSPSNPPRGCLATLSLSLNNNMLETYSVDKEKVSKMYSVEMHGHRSDIRSVSLNSEDNLLMSTSHNAVKIWNPSTGECLRTIDSGYGLSSAFVGNRYALVGTKSGTLEIMDIASGSLTEAIEAHAGSIRSIVPIPDEDGTVGARGFVTGSADHDVKFWEYQLVQKSDNDSKQLTVTNVRTLKMTEDVLAVSISPEGKHIAVALLDCHVKVFHMDTLKPSLNLYGHKLPVLCMDISSDGALLVTGSADKNLKIWGMDFGDCHRSIFAHSDSVMDVKFVYRTHYMFSVGKDRTMKYWDADKFELLLTLEGHHAEVWCLTLSSRGDFVVTGSHDRSIRRWDRTEEQLFIEEEKEKRLEETFEADLENDNDYRYGQKDDAPDEGSVGVPGRKTKETVTSADAIMDALDTAEEELKRINQHKMEEQITAKAAKFQPNVIMQGHSPSDYVLNVVSSIRPNDLEQALLALPFSDALKLMSYLKEWSLVPSKVELVCRVCLVLLQTHHNQLTATPAARSLLTELKDILYCRVKECKDTIGFNLAAMDHIKELLALRSDAPFRDAKAKLMEIKKEQSKRSSSRLDGDEKRKKKRKKASAES

SEQ ID NO: 80 - protein, 255 aa, Zea mays
  VARIANT 82: note = Ancestral polymorphism is V, Derived polymorphism is D
MQAVHAGQSTKVQSACNNVPNATTLAVDELAEGAHSSTAKNLLISRTKRRGESKTTKKKGGVIMEVHVAVVCSVVGFLGFVVLILGVAGEAATAKALAGTSYDIYGTTKCQYRATAALGCGIVAALLVITAQVGVTAAGLCCGCCQTWEVPKQARRIVGMVLAAVSCPLFAAATVLSVAATVMQIASYILLQVTTPTARSTKPELATQQPELAMAQPAVQPAPQQNAEEVVAVDGQPPPSAPAVSSHATEPASQV

SEQ ID NO: 81 - protein, 407 aa, Zea mays
  VARIANT 239: note = Ancestral polymorphism is L, Derived polymorphism is P
  VARIANT 25: note = Ancestral polymorphism is N, Derived polymorphism is K
MGAGKGGDGGEAAPEAAQPVVLKMKLHCAGCAHKVKKAIKRVPGVDSIVTDVAANTVVVVGTADAGALKARLEAKTNKPVEIVSAGGAPKKPPAAEPKQDAGAGVGEKKGVKSASPNEEEKEKGKKQQAEEKEREKEKGKKQQVGTRQAMPPTQPNYSSDPQQQQQLKNASSAFGSPQVESVLLKIRLHCDGCADRIRRRIGKIKGVKDVVLEANAKDEVEVTGTMDIPNMVSYLKEKLNRDVEAVALPVRKEGGGSEGEGEGKDDKKHSGGGGGKDKVAAGAAGDDRMDKGKGIEASAAGPSTAAAAAYMSAPAGASTYHVAPPHGYVAYEQAPPPASYYPYPYYGYGSGDGMGHANPSYYQPQPQPQPDGNQQPQVAYPPYPYQFDMAPAPQLFSDENPNACSVM

SEQ ID NO: 82 - protein, 386 aa, Zea mays
  VARIANT 118: note = Ancestral polymorphism is R, Derived polymorphism is G
MVSGAAPNPDGGGAQNTQRPPPLTQAGARTALATPPAVSGGAAHSASTSGGSAGSPPSSRSEQHAPDGAAKGPALGAAPAAAASTPASDSTFLRLNNLDINGDDAPSSQAPTSKKKRRGTRAVGPDKGNRGLRQFSMKVCEKVESKGRTTYNEVADELVAEFTDPNNNIEAPDPDNPNAQQYDEKNIRRRVYDALNVLMAMDIISKDKKEIQWKGLPRTSISDIEEMKTELVGLKGRIEKKSAYLQELQDQYVGLQNLIQRNEQSYGSGNTPSGGVALPFILVQTRPHATVEVEISEDMQLVHFDFNSTPFELHDDSYVLKEMRFCGREQHDSTQESISNGGESSSVSNIYWQHVQHVERPNNGTGRLPSSPPIPGILKGRAKHEH

SEQ ID NO: 83 - protein, 444 aa, Zea mays
  VARIANT 121: note = Ancestral polymorphism is E, Derived polymorphism is K
  VARIANT 143: note = Ancestral polymorphism is R, Derived polymorphism is C
  VARIANT 163: note = Ancestral polymorphism is T, Derived polymorphism is I
  VARIANT 172: note = Ancestral polymorphism is V, Derived polymorphism is A
  VARIANT 193: note = Ancestral polymorphism is A, Derived polymorphism is V
  VARIANT 278: note = Ancestral polymorphism is T, Derived polymorphism is S
  VARIANT 293: note = Ancestral polymorphism is T, Derived polymorphism is I
MSSQQWWTAPAKEEAPPPPEFMCPITLDLMQDPVAAPTGITYDRAAIESWLLAGGQRACPVTHGELRAGDLVPNHTLRRLIQDWCATSRCCCSVDRVRVPATPEEAAVAELESATRAGDAERCAAAARGVRRLARAAEQNRRRLESAGAARALSMAFTSFADTADAAVAIDVLDAVLAALVLVMPMDEEAILVVGSSSASVARLVAVAANGDLHRRLQAVVVIREIISLSVYRGTACTIGLCANTEAIARVLVKTIRDAICPPATRACLVAAYHLARSGESAATRLSVAGIVIVLVELLVDADRSTAEKALAALDAALASRDGRARARADALVMPVLVKKMFCVSDAATALVVSALLRICKKCPEDDEDGTAVAGAARRHAIVEALQLGALQKVLLLLQAGCREETKGNATQLLRLMVRYQGCGECVDAMDVRGLKRDTAILTG

SEQ ID NO: 84 - protein, 470 aa, Zea mays
  VARIANT 373..470: note = Derived polymorphism lacks residues 373 to 470
  VARIANT 53: note = Ancestral polymorphism is S, Derived polymorphism is R
MVFFKARRMDPELVLPARPTPAETKALSDLDDQRTLRYYETVIAFFRSRRGYSSHRRRPDDPAKAIKAALAEALVYYYPIAGRLREAAGGKLVVDCTAQGVVFVEADADVRLEELGRPLLPPYPCVEELLCDAGETRAVIGKPLVLMQVTRLKCGGFVIGFHMCHSIADGFGMVQFFRCVAELARGEKVPTLLPVWRRELLTRHRSNTTAYNHTATVRSESDSDDYKSDDVMLSTPMDDMVVQYFLFGPREIATLRSHLRGDDQLLLATSATSFELLAAVMWRCRTLALGYESHRRVRLMVTMNARGKWNQHTPIPRGYYGNAHVSPMAEATAGELCSQPLARTVDLVRRTKLSVTKERMESMVDTIASTRQWPPPTMDRIYEVSDTKWIATNATQFGWAELVGGGIPLAGDLASKLGSDHMSCRNQDGDHSTIVSMLLPKPAMDKFSSELSVWLNNKHDHKNLVILSSL

SEQ ID NO: 85 - protein, 414 aa, Zea mays
  VARIANT 142: note = Ancestral polymorphism is P, Derived polymorphism is R
MASKPRAFAKVFLPALPPPPLLTAPVFSRRPTNRGAGAAAMSAAAAAPAQAPRKWEGLVDEVLEREVLAACLDQAPERRRIREAFKDVQLSIDHCLFKVNPSPYFAYLLKIQLKGQYSGIRTKESCEHNSRGVEIFSKCWFPENRRMRAIVCLCHGYGDTCTFFLDGVARKIASAGYGVFALDYPGFGLSEGLHGYIPSFDTLVDDVAEHFSKVKGNPEYRGLPSFLFGQSMGGAVALKVHFKQPNEWNGAILVAPMCKIADDVVPPWPIQQLLIFMAKLLPKEKLVPQKDLAELAFKEKKKQEQCSFNVIAYKDKPRLRTALEMLRTTQEIERRLEEVSLPLIILHGEADMVTDPAVSKALYEKAKSQDKKLCLYKGAYHAILEGEPDQTIFQVLDDIISWLDQHSTKEGISL

SEQ ID NO: 86 - protein, 266 aa, Zea mays
  VARIANT 211: note = Ancestral polymorphism is G, Derived polymorphism is R
  VARIANT 88: note = Ancestral polymorphism is T, Derived polymorphism is I
MAPNTLSAPAAAPPPGSPPPLGVQACPTMAAPPPSPPSPPGYPDSMAAAVPAISLVADLAPAPATAPPSALLLQALSLSHGTRGFLRTARLKAPEERRRIESVILAEFRDNARSVDRRNFVHIEYLLRRGKKQLEQLKNPDITRLATLVVKNEDHLDVVNAILDTDDSCIRIVRKNGKTSLHTAARIGYHRIVKALIERDPGIVPIKDRKGQTALHMAVKGKNTDVVEELLMADVSILNVRDKKGNTALHIATRKWRPQGSGITGA

SEQ ID NO: 87 - protein, 65 aa, Zea mays
  VARIANT 9: note = Ancestral polymorphism is D, Derived polymorphism is N
  VARIANT 17: note = Ancestral polymorphism is V, Derived polymorphism is G
  VARIANT 28: note = Ancestral polymorphism is W, Derived polymorphism is L
  VARIANT 29: note = Ancestral polymorphism is N, Derived polymorphism is D
  VARIANT 39: note = Ancestral polymorphism is W, Derived polymorphism is L
  VARIANT 40: note = Ancestral polymorphism is V, Derived polymorphism is L
  VARIANT 41: note = Ancestral polymorphism is R, Derived polymorphism is S
  VARIANT 43: note = Ancestral polymorphism is I, Derived polymorphism is T
  VARIANT 50: note = Ancestral polymorphism is T, Derived polymorphism is A
  VARIANT 62: note = Ancestral polymorphism is C, Derived polymorphism is F
MKYLCDRANPPIPCELVRGHLDYTPHAWNIVPVKKRNGLVRMIVDACYPTNIKEETDPEYFCRRP

SEQ ID NO: 88 - protein, 193 aa, Zea mays
  VARIANT 107: note = Ancestral polymorphism is P, Derived polymorphism is S
  VARIANT 81: note = Ancestral polymorphism is P, Derived polymorphism is R
MADNVLIDRSASGFEFRRWAAGDEFQSLATMSVLQPDARGIYSSLPYVSPLPPFQYAAYLHSSLSLPPLNPRRHPPLLPLPPAAAAKGMKQAAQRRTGPRECKRKKPPRTPRLGEEPPSAQRRKPLERATPLPPAPAVHEALDDLERQVTMGFVEDLKHALALAPPPSSLPLPTFSLVRAAAAAAKAVPSCTV

SEQ ID NO: 89 - protein, 285 aa, Zea mays
  VARIANT 220: note = Ancestral polymorphism is G, Derived polymorphism is E
  VARIANT 205: note = Ancestral polymorphism is P, Derived polymorphism is A
  VARIANT 176: note = Ancestral polymorphism is D, Derived polymorphism is N
  VARIANT 61: note = Ancestral polymorphism is Y, Derived polymorphism is F
MSSVVRRWPQATMATIIPGIQIEFHLQVRNYREDWDLEVTEPVAGNYYPVNLGVYVADGKYELSVLVDRAVGASSIQDGQLEIMLHRRVIRDDDKGVDEPLGEVVCLDGSCKGLTVRGTYYVKVDKIGHGAHWRRTYGQQVYSPYLLAFTHEDETSWKSYNVAKQSTMDENYSLPDNVAIITLQNLDDDTTLLRLAHLFQDLEDAQYSVIAKVELRRVFGKRTIKELAETNLSANQKKSEMKKLNWRVLGNDKSDPIPLKGGPVDSQALVVELGPMEIRTFLLKF

SEQ ID NO: 90 - protein, 730 aa, Zea mays
  VARIANT 376..730: note = Derived polymorphism lacks residues 376 to 730
  VARIANT 270..730: note = Derived polymorphism lacks residues 270 to 730
  VARIANT 172..730: note = Derived polymorphism lacks residues 172 to 730
  VARIANT 117..730: note = Derived polymorphism lacks residues 117 to 730
MAPALLLLRLLALIATAREACAARAFAAASNATAHGATVVAGKLNVHLVPHSHDDVGWLKTVDQYYVGSNNSIQGACVMNTLDSVVDALARDPARKFVVVEQAFFQRWWAEKIPNIQAVVRKLVDSGQLEFINGGWCMHDEAAVHYIDMIDQTTLGHRMIKKQFNKTPRAGWQIDPFGHSAVQAYLLGAELGFDSLHFARIDYQDKEKRKAGKGLEVIWRGSRTFGSSSQIFTNVFPVDYSPPDGFGFEVLDENILPVQDDMLMFDYNVEERVNDFVVAAIEQANFTRTNHIMWTMGDDFSYQYAESWFRNMDKLIYHVNKDGRVHALYSTPSIYTDAKHFSNISWPVKYDDDFPYADSKNSYWTGYYTSRPTFKRYVRVLSGYYLAARQIEFLVGRSFLGMFTTSLEDPMAIAQHHDAVSGTAKQHTTDDYSKRLALGASKVEKGVNVALTCLLSSNGTCAPSVQKFSQCPLLNISYCPSTEETVSGAKNLVNDENLVVKSSDGTIIESQLVEVDNVTRNLRKVYVKAYLGITTNKPPMYWLLFQASVPPMGWNSYYISRSTGICKLSHVSNILLFWRGGSNSIRYVATMVSPRNDTVEVGPGSLKLSFSSASGQLERIFNSVSGVDLPIQQSFFWYSSNQGDIVDAQGSGAYVFRPNGTTPTIVSSSVLLSVIHGPLVHEVHQQFGPWINQSDIERISPIKHEHFVNLSSLNRLLDSTRTRSMQKLNT

SEQ ID NO: 91 - protein, 504 aa, Zea mays
  VARIANT 80..504: note = Derived polymorphism lacks residues 80 to 504
MEKISVGVRFRHPNLVAANISPDSSGGGIDHEWRIDDSHISLLHRAAGPVLGASFAFGMDHAPLTTPRLRRCGDQRADLWHGRPGTRWRHRRRIQRHRSPFFKTSCGKTFTMNDSDADPGIIRRAVRDVFDTVRQDGGGLAFPRYGVCGAKSDGKHSATCDFEESGLSACGYLGAEDIISFGGSCERLDLRDLNGGIFCDLAGEVGSLSCCHNDGGCARFIKKTKSDGWPAGLERPSSAANQIENFVDDSTIGESNHGSEVGFTYTVNGNLSHSVVTNDSDSDEVNGMVNGCNGMGKQIYEVSAAIGQDWTRKNMDKCTIAYTEKELRIGIERGVKPKIRWLSRGPLGEAAVSNGFLVTKIQMKKCKLTGEITVFEEFSITIPPKSTLLFPCQRAISIDALGCQVQHLIVLDGTWAKAQKMYHENPWLQLLPHVKLESDRVSLYSEVRHEPKAGCLSTIESIVVAMRKLGEDSKGLDDLLDVFESMIADQRRCKDENVKQKLKS

SEQ ID NO: 92 - protein, 1019 aa, Zea mays
  VARIANT 708..1019: note = Derived polymorphism lacks residues 708 to 1019
  VARIANT 593..1019: note = Derived polymorphism lacks residues 593 to 1019
  VARIANT 21: note = Ancestral polymorphism is T, Derived polymorphism is M
MAPTLLLVALVALAVAAATPMVMEASAFTEGCNNRSTPGGGGGTAVGNKLNVHLVPHSHDDVGWLMTIDQYYVGSNNSIQGACVMNTLDSVVDALAKDPARKFIVVEQAFFQRWWAQKSLTVQATVHKLVDSGQLEFINGGWCMHDEAVVHYIDMIDQTTLGHRVIKKQFKKIPRAGWQIDPFGHSAVQAYLLGAELGFDSVHFARIDYQDRATRKANKGLEVIWRGSRPVGSSSQIFTNVFPVHYSAPVGFSFEVLAENVIPVQDDMSLFDYNVQERVDDFVAAAIAQANVTRTNHIMWTMGDDFNYQYAESWFRNMDKLIQYVNKDGRVHALYSTPSIYTDAKHASNESWPVKYDDYFPYADSTNAYWTGYFTSRPTFKRYIRVYSGYYLAARQIEFLMGRSSLGLFTSSLEDAMGIAQHHDAISGTAKQHTTDDYSKRIAIGASKVEKGVNAALTCLTNSNKTCVSSVPKFSQCPLLNISYCPSTEEAISATKHLVVVVYNPLGWKRSDFIRVPVNDEDLVVKSSDGNTVVSQIVVVDNVTNNLRKLYVKAYLGVTANKAPKYWLTFQASVPPMGWNSYFILKSTGSDPGYNNTEHVPVVVPPSNNTIEAGQGHLKMSFSSASGQLERIFNSASGGDLPIQQSFLWYRSSKGDALDPQASGAYIFRPDGNTPTIASSSVTLKVIRGPLFDEVHQQFSSWIYQITRLYKNKEHAEVEYTIGPIPVDDDVGKEVITQLTANMSTNSTFYTDSNGRDFLKRVRNYREDWNLQVTQPVAGNYYPVNLGVYIVDEKYELSVLVDRAAGASSIQDGQLEIMLHRRLLKDDGRGVAEPLDEVVCVDQDCQGLTARGTYYINVEKLGHGAHWRRTYGQQVYSPFLLAFTHEDATSSKPYSVAKDSMMDGNYSLPDNVAIVTLQNLDDGTTLLRLAHLFQAGEDPRYSEVAEVDLKKVFGKRTIKELTETNLSANQKKSEMKQLNWRVIEDAESGPAPVKGGPVDCRALVVALGPMEIRTFLLKF

SEQ ID NO: 93 - protein, 1007 aa, Zea mays
  VARIANT 698..1007: note = Derived polymorphism lacks residues 698 to 1007
  VARIANT 607..1007: note = Derived polymorphism lacks residues 607 to 1007
  VARIANT 385..1007: note = Derived polymorphism lacks residues 385 to 1007
  VARIANT 371..1007: note = Derived polymorphism lacks residues 371 to 1007
MVMAPAILLAVLVLAAVAAATASAFAVASNNATVVAGKLNVHLVPHSHDDVGWLKTVDQYYVGSNNSIQGACVMNTLDSVVDALARDPARKFVVVEQAFFQRWWAEKSPTIQDIVHKLVDSGQLEFINGGWCMHDEAAVHYIDMIDQTTLGHRMIKKQFNKTPRAGWQIDPFGHSAVQAYLLGAELGFDSVHFARIDYQDRATRKADKGLEVIWRGSRTFGSSSQIFTNAFPVHYSPPDGFGFEVLDENIIPVQDDLSLFDYNVQERVDDFVAAALAQANVTRTDHIMWTMGDDFNYQYAESWFRNMDKLIQHVNKDGRVHALYSTPSIYTDAKHASNESWPVKYDDYFPYADSTNAYWTGYFTSRPTFKRYVRVHSGYYLAARQIEFLVGGRSSLGLFTSSLEDAMGIAQHHDAVSGTAKQHTTDDYAKRLALGAAKVEKGVNTALACLTSSNGTCGSSVVKFSQCSLLNISYCPSTEEAISSTKRLVVVVYNPLGWERSDFIRVPVNDQNLVVKGSDGNIVESQLVEVDNVTRNLRKFYVKAYLGITTHKAPKYWLLFQASVPPMGWNSYFISKSTGAGYNSTEHVSDVVSPSNSTIEVGPGHLKMSFSKASGQLNRIFNSISGVDLPVQQSFLWYRSSEGDASDSQASGAYIFRPDGNTPTTVSSSVPLKVIRGPLVDEVHQQFSSWIYQITRLYKNKEHAEVEYTIGPIPVDDDVGKEVITRLTANMVTNSTFYTDSNGRDFLKRVRNYREDWNLQVTQPVAGNYYPVNLGVYVADEKYELSVLVDRAVGASSIQDGQLEIMLHRRLLKDDGRGVGEPLDEVVCVDQDCQGLTARGNYYVNVEKLGHGAHWRRTYGQQVYSPFLLAFTHEDETSSKSYSVAKAGMMNANYSLPDNVAIVTLQNLDDGTTLLRLAHLFQAAEDPRYSKVAKVDLKKVFGKRTIKELTETSLSANQKKSDMKKLSWRVIGNTETGPAAVKGGPVDSRALVVELGPMEIRTFLLKF

SEQ ID NO: 94 - protein, 998 aa, Zea mays
  VARIANT 162..998: note = Derived polymorphism lacks residues 162 to 998
  VARIANT 202..998: note = Derived polymorphism lacks residues 202 to 998
MATGAGWAPGRPVERHGAPRGGNARSKSVVPGPRRPSPSPARSRPAADHSGSADLCRVRVAVRLRPKNSEDLAHGADFDSCVELQPESKRLKLKKNNWSCESYKFDEVFSESASQKRVYEAVAKPVVEASHAFQMPLINLSVLEGYNGTVMAYGQTGTGKTYTVGRLGKDDPSERGIMVRALEHILSSLSFETDCVAISYLQLYLESVHDLLAPEKTNIPIVEDAKTGEVSLPGAAIVEVKDLEHVFQLLQIGEANRHAANTKMNTESSRSHAILIIHLQRNTRTKEENGSSLYDVRHDTFPDDLPLVLKSKLLIVDLAGSERIDKSGSEGHMIEEAKFINLSLTSLGKCINALAENSSHVPTRDSKLTRILRDSFGGTARTSLVVTIGPSARHYSETSSTIMFGQRAMKVVNTIKLKEEVDYEILYKKMEREVDQLTSEMERQQKVIRSEKMQMDKRLKESERSFHDLRMTFNMQIELAARARFLQEAAAAATGTRAMGTTNKQGGKNITSDLLTQNLEKENRHLESSVKRLTQDLDKERGQNNLLSKQVTELEKLLDENKQQQLENLSKTKIITDEFKEYEKEMGELVRKLEEERCCSSSMKDRMSLLQQQLCDAQSSAQLQESMARELEKELTKATEEFTIEIQSLKGKISGLISEKESIYDELKSTQEKVQLEMSQRKGLEDQILRFKQSVSDSCAEESKTSCSMVRSGSGLGNTAFVSKSEKLREALSGQRGTISKIFEEVGLPNVLALLKSEDLDVQIHAVKVVANLAAEDVNQERIVEEGGLDALLSLLETSENTTIHRVTAGAVANLAMNGSNQGVIMNKGGARLLANVASETDDPQTLRMVAGAIANLCGNEKLHLMLKQDGGIKALLGMFRSGHADVIAQIARGIANFAKCESRMISQGHRKGRSLLIEDGVLSWMVAHSTMFSASTRRHIELAFCHLAQNEDNTCDIIASGGIKELLRISRESPREDTRNLAKKALDSNPAFLREIQ

SEQ ID NO: 95 - protein, 187 aa, Zea mays
  VARIANT 154: note = Ancestral polymorphism is P, Derived polymorphism is S
  VARIANT 137: note = Ancestral polymorphism is T, Derived polymorphism is A
  VARIANT 133..187: note = Derived polymorphism lacks residues 133 to 187
  VARIANT 124: note = Ancestral polymorphism is A, Derived polymorphism is T
  VARIANT 120: note = Ancestral polymorphism is C, Derived polymorphism is Y
  VARIANT 104: note = Ancestral polymorphism is A, Derived polymorphism is T
  VARIANT 93: note = Ancestral polymorphism is A, Derived polymorphism is T
  VARIANT 88: note = Ancestral polymorphism is R, Derived polymorphism is W
  VARIANT 82: note = Ancestral polymorphism is L, Derived polymorphism is V
  VARIANT 74: note = Ancestral polymorphism is P, Derived polymorphism is L
  VARIANT 72: note = Ancestral polymorphism is R, Derived polymorphism is C
  VARIANT 67: note = Ancestral polymorphism is G, Derived polymorphism is R
  VARIANT 58: note = Ancestral polymorphism is L, Derived polymorphism is P
  VARIANT 50: note = Ancestral polymorphism is R, Derived polymorphism is Q
  VARIANT 41: note = Ancestral polymorphism is G, Derived polymorphism is S
  VARIANT 38: note = Ancestral polymorphism is G, Derived polymorphism is D
  VARIANT 35: note = Ancestral polymorphism is A, Derived polymorphism is V
  VARIANT 31: note = Ancestral polymorphism is R, Derived polymorphism is C
  VARIANT 15: note = Ancestral polymorphism is G, Derived polymorphism is V
MKFWIGLSATVKWTGLPPAHPGLVLVEPKARVLVAGGGIGGLAFALAARRKGFEVLVLERDLSTVRGEGRYRSPIQLQSNALAALEARVRLPARCPRASGFCTAVGQGDTTDLPLRQVAYDAHASLGNPWPLQADHARGASNGPILFEVKFFWPAEFVFIDGAKRLEGKRPDIFVVNYFGSGFQVRQ

SEQ ID NO: 96 - protein, 189 aa, Zea mays
  VARIANT 113: note = Ancestral polymorphism is C, Derived polymorphism is G
  VARIANT 108..189: note = Derived polymorphism lacks residues 108 to 189
  VARIANT 102..189: note = Derived polymorphism lacks residues 102 to 189
  VARIANT 101..189: note = Derived polymorphism lacks residues 101 to 189
  VARIANT 33: note = Ancestral polymorphism is T, Derived polymorphism is M
  VARIANT 26: note = Ancestral polymorphism is T, Derived polymorphism is I
MPPPLGSSRMPTRPSGPLKLTVLMVTVPLAPPTALFPVRPGVLPCQPRSIPVKSTILEVGNIELFELNENPIAYCLAAMKSEGVNLIGENFMSGLKVVFDRERKVLGWKSFDCYNMGNSRSNLPVNPNPSGVPPRPSLGPNNYTPEATKGASSNGTQVNVLQPSASFSPKMHCNRNVLVAAALLFLLIL

SEQ ID NO: 97 - protein, 298 aa, Zea mays
  VARIANT 261: note = Ancestral polymorphism is H, Derived polymorphism is Y
  VARIANT 256: note = Ancestral polymorphism is S, Derived polymorphism is L
  VARIANT 240: note = Ancestral polymorphism is R, Derived polymorphism is H
  VARIANT 229: note = Ancestral polymorphism is A, Derived polymorphism is V
  VARIANT 194: note = Ancestral polymorphism is M, Derived polymorphism is I
  VARIANT 130: note = Ancestral polymorphism is E, Derived polymorphism is K
  VARIANT 96: note = Ancestral polymorphism is R, Derived polymorphism is C
MALGCQLRAPPCFSAPARPPSPHPLPDARPRLPLSSGGWCAQASGSGSPRASWRCVGRRRRWRCWLPLLVGVAFLGLLDMAKNVEVVESCTTSFYRCSSHGGEAVGRGAVPWSGDDGEGEETRRCEQRSEREDAMPYDRDVDMDAVLVGGAAKDWSKCYIDPSIEGILRSMESSQYYSKNSINVARGRGYKIVITISLSSDFPVGNSSWAEYDAVAPVPPKTEEALAAAFISNCCARNFRLQALEMLENLDVKIDSYGGCHRNRDGKVDTLKRYKFSLAFENSNEEDYVTEEFFPNHW

SEQ ID NO: 98 - protein, 513 aa, Zea mays
  VARIANT 101..513: note = Derived polymorphism lacks residues 101 to 513
  VARIANT 170: note = Ancestral polymorphism is P, Derived polymorphism is L
  VARIANT 307..513: note = Derived polymorphism lacks residues 307 to 513
MAVVPRSPSWQSRQVSPSQITSTPGKVFPKSRILSDGAHVQRDPRERTQAVAAHLVRLVLPRVYPTNTRNGSPDVSGSADIAGLSRVDLVGGTRKLGGAAQRRAREVGPRLKMVRSMREQGGGRWPDGDFLVSSPPLPSGRAGPGFRWKMRPAVVPTSARVRAFNPFSMPGIYLTCIVELDGIVGGAAHGAHPGGELASERLLRDTEELAVEVEREQRVQDLHGVLLELHHGGEGLHLDLHLLALHGELPLLGGEAEELVLGGVHADGGAGGFTRMAAAAGEEALSSATKQKVAAVKQYIENHYMSQMMSLQDGKERVHVMLPSRIKVVAVSRSIKCDKDLFSVSPAYIFGAILPAFMVAGLYFFDHNVDSQLAQQKEYNLKKPSAYHYNILVLGFVVLLCGLLGIPPSNGVLPQSPMHTKSLAVIKRQFLSKKMVDTAKESIGGSATSLEIYGKMEEVFIKMDSEENTDSVERELKNFKDVVLQEGNEEGRLAREFDPRKHIEAHLPVRVNE

SEQ ID NO: 99 - protein, 97 aa, Zea mays
  VARIANT 18: note = Ancestral polymorphism is R, Derived polymorphism is G
  VARIANT 73: note = Ancestral polymorphism is P, Derived polymorphism is S
MEPFLSGTTACRWYVNNGDIPEIEKIYNRYKLCFMGADGTSELEFVNFDQKYQLLIGKPLYGLEKKYDRFETPPEDISKGFIVDTTELDPMDIEKPK

SEQ ID NO: 100 - protein, 398 aa, Zea mays
  VARIANT 97: note = Ancestral polymorphism is A, Derived polymorphism is V
MRFVVTKVCSGGGKARAGALHIAGAGIGIETPALLLSTRKGLPAFLSCDLLASLPLPDSLLLHVCPTHFIEGPPVKTISAIRGLHGMLGLPDHILVAAASDSIESLPSCEATNKFGASFETPSGRRLVKPSDYMELISCMKPNIWASLADEVPAWVTEKRNKVSVDRTLRWLDACIALDVASGTNSFGVIVGGSSLEQRKLCATEVSKRNVSGFWIAGFGFGESIEERCTLLNATTDCLPREKPRLVSRLGLPEEVLEGVAAGIDLFDSTYIYQLTMGGFALIFPVDMVEREMQNGVLNTTDGDSTKINLRATTYRKDTSRLVDSCNCFTCQNHTRAYLNHLLNVHEMLAQILLEIHNTHHYLRFFHSIREAIKVGEFDLFRQEFVKKRRTHFAAVVV

SEQ ID NO: 101 - protein, 263 aa, Zea mays
  VARIANT 83: note = Ancestral polymorphism is G, Derived polymorphism is E
  VARIANT 235: note = Ancestral polymorphism is D, Derived polymorphism is Y
MEMHRPLRILLPIVVLVAAAWPSVPAGADDSAWSKGTATFYGGGDASGTMGGACGYGDLYWSGYGTETAALSSALFNDGAACGECYRVTCDDGASQWCLPGTGRRSVTVTATNLCPPNHELSGDDGGWCNPPRRHFDMAQPAWLRIAQYKGGIVPVLYQRTACVKQGGVRFTVSGSNYFVLVLISNVAGSGSVKAVWVKGSATDRMPMARNWGANWQSLAGLAGQALTFGVTSTDGRTVVVPDVVPAWWKFGQSFTSGVQFSN

SEQ ID NO: 102 - protein, 172 aa, Zea mays
  VARIANT 93..172: note = Derived polymorphism lacks residues 93 to 172
  VARIANT 10: note = Ancestral polymorphism is R, Derived polymorphism is I
MHAISHSMHRRYLQRKARRDALKESGQSFETSSVVPSIDDDKVLSENSGLEHGLTSTDGLSSVSEIISARSDDFEHQAENDTEIPGEHLHSDQRAYGDDADACTKELENLDIEGEDEGGGDAHFIVDESNEQSWTLRSLSESSIPRYSLCKERDVNLKYEKHKRFNATLCTY

SEQ ID NO: 103 - protein, 384 aa, Zea mays
  VARIANT 13: note = Ancestral polymorphism is V, Derived polymorphism is M
  VARIANT 4: note = Ancestral polymorphism is P, Derived polymorphism is S
MELPRSMAVLVLVFVVLCRVGEAATFTFVNRCTDTVWPGVLSNAGSPRLEPTGFELPPGAARAVPAPAGWSGRMWARTGCSQDGGTGRLVCATGDCGSGSAECSGAGAAPPATLAEFTLDGSGGLDFYDVSLVDGYNLPVLVETSGGGGSTGPASCAAAGCAADLNAMCPAELRAGGGGACRSACDAFARPEYCCSGAFASPAACRPTAYSQVFKTACPRSYSYAFDDPTSTFTCGGGPDYTVTFCPGATPSQKSTTMPSATPTMVPGGTTTTVPGATPTTVPGTMPMPGATPALPTGTMMPGTTFTDATPDSGMPMGGGGGLGIEGGEQGSVLLGASSGEGGVSWLANMATGDASAAGAPLVASARFVVATLLCGLHLRRLLL

SEQ ID NO: 104 - protein, 264 aa, Zea mays
  VARIANT 87: note = Ancestral polymorphism is S, Derived polymorphism is C
MASSADPHAAVAAAMAGTTPSDSLLGAKKAGAAAAVWKLPEAATVPVAVVVENPIMDADSWPALPGLSSPPPPAAGPVAKASPKAASPASTGAVMSPPSLANPGAPDANPGSEAPVRNPVVQRALVMPAANGLEKIAPAPEPSPVYVPNARSNGAPPPPPPFVSPATPQAPPYGTPMGFPADMAPQVYYYAAPTSEGIQGLPFMSHPASPQAVLIDPFRKGLLDQIEYYFSDANLCKDLYLRQRMDDQGWVPLPLIAGFPQVSL

SEQ ID NO: 105 - protein, 150 aa, Zea mays
  VARIANT 51: note = Ancestral polymorphism is Q, Derived polymorphism is E
  VARIANT 71: note = Ancestral polymorphism is R, Derived polymorphism is I
  VARIANT 96: note = Ancestral polymorphism is A, Derived polymorphism is T
  VARIANT 97: note = Ancestral polymorphism is G, Derived polymorphism is R
  VARIANT 120..150: note = Derived polymorphism lacks residues 120 to 150
MDGFDQTVIVKVVMATNRVDTLDPTSLRPGRLDRKVEFPLPDWRQKRLVFQVCTAKKNLSEEANLEDYFCRPDKICDADVELLRHIIDLKRHFKRAGKSKVVPKYFQVGTVVEPASEFYSSRLKNRERKATLVDELLSDQSLKSYRVQPA

SEQ ID NO: 106 - protein, 650 aa, Zea mays
  VARIANT 156: note = Ancestral polymorphism is A, Derived polymorphism is P
  VARIANT 413: note = Ancestral polymorphism is L, Derived polymorphism is F
  VARIANT 440: note = Ancestral polymorphism is L, Derived polymorphism is V
MGEGVKEMLAPPIQLADEVAKQCAAARSFRAECAELKARADKLAALLRQAARAQELYDRPAARILAGATQALSRASTLATRCARGHPRLRSLFTLSPAAGFPRAVAALDTALEDVAWLLRISSPGATGDGDDDSLLGLPNIAQNEPILFFIWDHVARLHTGSPAARADSAANLASLARGSQHFAKLIIEEDGVPPLLKLLKDGTDEGQEAAARALGLLGCDGESVDKLVQAGVCSSFTAALKELPMRVQVAVAEAIASLADQSSTCQDLFAQNNAVRYLVGHLASGTIQEHSRYSVSSSSYKSSAATAATTQQPMKFLHSVVLAKTLSMRHSSDRDTTSSGADELPRMSNGTPGERNPQMQSVVHSAMAAKTNTNGLLVPLFRPQLGTSGRGAREVEDPETKAHLKAMAAKALWKLAHNHLGVCKSITESRALLCFAVLLEKGDGDMGTNVQYFSAMAIMEIARVAEHSLVLRQSAFKPSSPAAKAVVDQLLRVVRRGEYDALLLPCITALGCLARTFTASETRIVPPLVQLLDEREPPVIKEAVVALTKFACTENHLHVNHCKAIVDDGGARHLVQLVYLGDEVQIEALILLCYIALYVPESEELAQAGVLAVLLWASKQAHMVQDMRVEALLPDAKGRLELFQSRASR

SEQ ID NO: 107 - protein, 156 aa, Zea mays
  VARIANT 72: note = Ancestral polymorphism is Y, Derived polymorphism is H
  VARIANT 31: note = Ancestral polymorphism is E, Derived polymorphism is D
MLRVDDLIAELCLLPARVLRKRKRKEFQTVELLVRMDCEGCERRVKKALEDMKGVSSVEVDQKQNKVSVSGHVEAPEVVERLRRRAGKEAKPWPYVPYEVVPHPYAPGAYDKKAPPGYVRNVLDDPDAAPLVRASSMEERYTTAFSDDNPSSCAVM

SEQ ID NO: 108 - protein, 417 aa, Zea mays
  VARIANT 15..417: note = Derived polymorphism lacks residues 15 to 417
  VARIANT 198..417: note = Derived polymorphism lacks residues 198 to 417
MASWDNLGELSNIAQLTGLDAVKLISLIVRAASTARLHKRNCRRFAQHLKLIGGLLEQLRVSELRKYPETREPLEQLEDALRRGYLLVNSCQDRSYLYLLAMGWNIVYQFRKAQSEIDNYLRLVPLITLVDNARIRDRLEYIERDQCEYSFDEEDKKVQDALLNPDPCSNPTIVLKKTLSCSYPNLPFNEALRKESEKLQVELQRSQSNMDLGSCEVIQHLLGVTKTVESTIPEKETNVKAPEKKGSNYSESKGETAKSFDDDDDYPKKQNDDYPKKQKETCSTQRCSSQVPYGHDLVSSRGSYSDEWHADLLGCCSEPALCLKTLFFPCGTFSRIASIAKDRPMSSGEACNDIMAYSLILSCCCYTCCVRRKLRQKLDIAGGCCDDFLSHLLCCCCALVQEWREVEIRGAYSEFPT

SEQ ID NO: 109 - protein, 833 aa, Zea mays
  VARIANT 41..833: note = Derived polymorphism lacks residues 41 to 833
METSSSSSGLGGSYHHHRSRFGDTTLTKVFVGGLVWETPSEGLRHHFEAYGDILEVVVITGRETGCSKGYAEIVNPPWLDGSALGACCLGDLCRNVDETTHRFAFPISDAYPERSYYGGPKHICPYCHAVFWFQERVKNDSFSTQRKIVYNLCCKGGKVNLKPFECPPPLLADLLKFDGGTRSRRFLRLIRSYNSLFAFTSFGAAIDKTINNGTTPYVFKINGVVHHRIGTLLPQRGTQPKFAQLYTYDTEHETQNRLGIFETDDGAGGQPDPEMVSSLLDMLNENNSLVKAFRCTRERLEREGDQKITLRLLGCNTRHDVQYSLPSNGEIATIIVGDYTTGEYTYDVLVHDRECGLKRVSCLHPAYMPLQYPLLFPYGEHGFHLGIRYFGDDDVGSSKRKYVTMLEFVRRHMHYRLDEPNPYTCYSRLSDQIDVDAYSTIEGNRLQFIASHQSDLRSEIVQGIADAIDKGFVNADSIGGRVVVPASFTGGRRYHVMNYQDVMAIYAIGIVTSISVVALHRSRGQHTTSSKRTISLCSVSNNSSVNVVLWGGQASLFPGEQIYNDGQSSPQILMFVGTLVKKYADGLCLSGGSPCKWYINPDVPEASALMTSLTHCMYKPVRRKRIVPLSGTRFYLRISLCLMYLRNRKLLISEICTHLRISRAIVGWIWEYSMTIYLHVRQDREFLVTVTVKKIGNRWWYNACKKCTRTAVAHGDSYKCSDQVCANIGTPNQSGVEDTPNKASNLVMPSTLLTPQSSATSVQDKTFGIGSSTVVPGATPAITKELTSTPRKRTRSSPAKTVTKRLFTDVDGGIAGSKDAADSAAAPSSTKDA

SEQ ID NO: 110 - protein, 220 aa, Zea mays
  VARIANT 5: note = Ancestral polymorphism is R, Derived polymorphism is T
MAPETMLLGVCAVLMVVGVTNAAEGQVASVVVGLARCADSTRKNMKAEAGFKGLQVAIKCKNSNGEYETKAVSEIQSSGAFSVPLAADLHGADCHAQLHSAANNAPCPGQEPSRIAPMSGGTFVAVPGKMHYPSAECASAFLCSPIKKHLLDHFHKAPLPVPEYHPVPDHSKPPVPEYHPVPEHSKPAPEYHPPTPEYHPPTPVYGQPKPTPIYHPPAEH

SEQ ID NO: 111 - protein, 185 aa, Zea mays
  VARIANT 122: note = Ancestral polymorphism is P, Derived polymorphism is S
  VARIANT 55: note = Ancestral polymorphism is T, Derived polymorphism is N
  VARIANT 14: note = Ancestral polymorphism is P, Derived polymorphism is L
MSTTSTSLGLLIRPPRSAGTPSFGSLKPVVVTLPCAPAEKKRPRSICYSVDAKATDHAFNISPVALVHPNMPPTSTPRWEIKEDGKEVRLTFFNLSEGATTGDFQVAVEDDVLIIKSTKPKPPAAEEQRQKEAPADSVSFHVRLLVPKGYDKENVRAQLQLRALVVTIPKVNPSFTKEVDIDDGK

SEQ ID NO: 112 - protein, 140 aa, Zea mays
  VARIANT 6: note = Ancestral polymorphism is S, Derived polymorphism is R
MLIFESMAKWSMVTWNVMIVGLGTHGYVMDAVTLFHRMEAESVAVDDLSVLGMLTACTHAGLVSEGLEIFHRMKKDFGIDPKVEHYGALVDLLGRARHLDQASHSCLELAELSVERLANLGADGSGVYVLVSNIYADEGM

SEQ ID NO: 113 - protein, 434 aa, Zea mays
  VARIANT 343: note = Ancestral polymorphism is A, Derived polymorphism is S
  VARIANT 303: note = Ancestral polymorphism is K, Derived polymorphism is M
  VARIANT 260: note = Ancestral polymorphism is I, Derived polymorphism is T
MIMASAFYKFGYQSCKLSGPGACKQPTATAAASGGNGVHALATITRRNWRCRNMATTASGTTTMAVAGRRREKKDDVVEGEDEWRSYLAPERLEMLRQMEPWVEEHVLPLLKPVEASWQPSDLLPDPANLGSDGFHAACLELRAAAAGVPDDLLVCLVANMITEEALPSYPSGLNRLEVVRDATGADATAWARWIRGWSAEENRHGDVLNRYMHLSGRFHMREVERTVQRLIRDGVIVHAPASPFHGFVYVAFQERATAIAHGNTARLVGARGAGDAALARICGTVAADEKRHEAAYTRVVGKFFEADPDAAVRAMAYMMRRRIDMPTVLINDGRHSSGDFYARFVAIAQQAGTYTVSDYRAILEHFIRQWGVEELAAGLTGEGRRARDYLCALPHKIKRMEEKAHDRAVKAQKKPTPIPINWIFDRTIPVILP

SEQ ID NO: 114 - protein, 305 aa, Zea mays
  VARIANT 1: note = Ancestral polymorphism is M, Derived polymorphism is V
  VARIANT 8: note = Ancestral polymorphism is T, Derived polymorphism is M
  VARIANT 29: note = Ancestral polymorphism is R, Derived polymorphism is I
  VARIANT 53: note = Ancestral polymorphism is S, Derived polymorphism is L
  VARIANT 69: note = Ancestral polymorphism is D, Derived polymorphism is H
  VARIANT 84: note = Ancestral polymorphism is D, Derived polymorphism is E
  VARIANT 111..305: note = Derived polymorphism lacks residues 111 to 305
  VARIANT 129..305: note = Derived polymorphism lacks residues 129 to 305
  VARIANT 175..305: note = Derived polymorphism lacks residues 175 to 305
  VARIANT 201: note = Ancestral polymorphism is A, Derived polymorphism is T
  VARIANT 216: note = Ancestral polymorphism is T, Derived polymorphism is I
MCDLVARTGRHLQRYENGRRLVAGCIPFRYMDINDGASDDEQKKLVEVLMISSQSGPGLLFPKGGWENDEAVEETAARVMILVDLSSSDSGWQVTSQKMDIQVYDPFFILRFSIHTLHMGYIEPAQFARLGLLAITLVSIASPDHELRMLGYECLGKFKKSLEYAQRSKETWQLQLLLTYLQNGISEQWQKIPSIIAVFAAEASLTLPDGSHAQFTVMRNFLMHSTPVSLQSIPLFPTLLQSSFVHFKAERLWMLRLLSAGSNLADDAKIYKRGRVLELALAFCSSPISDFESKVLVLKVLKKCV

SEQ ID NO: 115 - protein, 959 aa, Zea mays
  VARIANT 30..959: note = Derived polymorphism lacks residues 30 to 959
  VARIANT 79..959: note = Derived polymorphism lacks residues 79 to 959
  VARIANT 108..959: note = Derived polymorphism lacks residues 108 to 959
  VARIANT 129..959: note = Derived polymorphism lacks residues 129 to 959
  VARIANT 133..959: note = Derived polymorphism lacks residues 133 to 959
MDEPEKVRGREDAASGREAGGAEEAGDGFQLVIHGKKKKRAASGQDCGTAGSGSGAGAGPVRALTREKGAAPAPGAKAKVPFHDPSIPRPQDVYKIRVDNYKPFEHVWLERSEDGTRRVHPLENLPVEQFVDRNVPDREPVKPADLEDTPFTLVQDHKGLTELAKKLKSVTEFAVDLEHNQYRSFQGLTCLMQISTRTEDFIVDTLKLRIYIGLYLQEPFKDPTKRKVMHGADRDIMWLQRDFHIYVCNLFDTGQASRVLQMERNSLEHLLLHFCGVTAKKEYQNADWRSRPLPDEMIKYAREDTHYLLYIYDLMRQRLQRESTFENDLLLEVHKRSNEICLQFYEKELLTDTSYLHIYGLQEHELDARQLAVVAMPTDVGHLKRIVKSKYPYVESNLELIAYTVWNALEYSYAFEGIAEQLKKERLEQVALKSGQTSDEVTPLDADIDRSNFDSSDQSANVNVASGSRAGFMSEAALISSIHLEDKTQTMSSVKTSQTLLGQIRPVNKDVLSNNIHQQAIQDLSLTLKALKGNLASGGESNEQHAFTRGFSILFTLLDMFGFNLQDTPRLEELVNFPEVRMKISGVKIVVAPWNSQATAKARLHTAWIRAENVPEEIQNYQAICELGSTIGAVEEIDVEALETKDIVRFKVNVKSVSMIPSVIEIGIKPFLYDIFFKVESLDEERWNDDTVCLGKRATIESLQLDDNITENLMKKVKSEKGKGMADHMLTGILEDNSFKGGKSGNAQKVSKDGEKGIEGYSEEKVDFDGSGDDLLSSHELEDLVKEANIEMSASQEIAGVDNTDPGMSKELQAAKIKKGKGKMIELVEGTRKSSRLETNGDIKVTEKVISRADFAFMPRLLSAAVQFQAGINVENFRSSVFPSRQLSGEVKPFYPNPGMHSENVWIQTTQTNETMKLCNTTYYRQLPGHSTESINQRSTGSFQSSVRRQSFPPSSYKK

SEQ ID NO: 116 - protein, 93 aa, Zea mays
  VARIANT 5: note = Ancestral polymorphism is G, Derived polymorphism is E
MTRMGKTASQLSFLRNILVNWQWHQWLQLIIFVKMSRLMQESCKRILFGSELFEEYIGQLAMASMASLDNFGEDEQIDARKLQERMQLAYGME

SEQ ID NO: 117 - protein, 320 aa, Zea mays
  VARIANT 4: note = Ancestral polymorphism is L, Derived polymorphism is H
MELLPCIATLLILLISSSLAAATSPVGTIERVTKQQILASIPPGGGPPVLFLTSPSGKYAAYFVRTHTVPGAGGLGADFCYVEIIDTTTAAGAHGGTVEGEGEGEGEGESEAGAAGAAAGGTSVWESECRPISTVNTCALLLSWHGLEVFDGSEEVWHGETNTDGTNFLETLELVDDGDMRIRDKDGELAWRASDEPRHAQHCGAPGSPGLATALPPFAEPLGAHSSNLPFGQEPDGNGHSAELPQAADVGSGEAAFGAAAGVAGPELGQGEHDSASVFGAQPLVDNSPYDSRAWKEGRGAHIIAVWVALCVSAVLGGGL

SEQ ID NO: 118 - protein, 183 aa, Zea mays
  VARIANT 27: note = Ancestral polymorphism is V, Derived polymorphism is A
  VARIANT 3: note = Ancestral polymorphism is R, Derived polymorphism is P
MARPQNNQNPRVFLVLNIGGVTVGRVVIELFADKVPKTAENFRLLCTGERSVGKWSGKRLHYKGAAFHRVVPGFMCQGGDITAGNGTGGESAIGDARYFADEAFGAVRHDGAGVVSMANAGPNTNGSQFFITFADAPWLDGRHVAFGRVVDGMDALRAIEKAGSISGRTMRHVVIADCGELKH

SEQ ID NO: 119 - protein, 387 aa, Zea mays
  VARIANT 28..387: note = Derived polymorphism lacks residues 28 to 387
  VARIANT 126..387: note = Derived polymorphism lacks residues 126 to 387
MGNCWFKGNPYFNRVSSNATKAESPKIQSPSERTEKEDCQLPSNPKEVEALRKDTARNPLIAFTFEELKRMTKNFRQDSLLGGGGFGRVYKGFITKDLREGLEIEEPTRVAVKVHDGDNSFQGHREWLAEVIFLGQLSHPNLVKLIGYCCEDDHRVLVYEFMPLGSVESHLFSNQWSICFHNAGVMVPLTWSIRMKIALGAAKGLAFLHEAEKPVIYRDFKTSNILLDEEYNAKLSDFGLAKDGPVGDKSHVSTRIMGTYGYAAPEYIMTGHLTAMSDVYSYGVVLLELLTGRKSLDKSRPVREQMLADWALPLLAQKKKVLGIVDPRLAEDYPVKAVQKTAMLAYHCLSRNPKARPLMRDIVATLEPLQQLEETPGDSVAVTLEGT

SEQ ID NO: 120 - protein, 207 aa, Zea mays
  VARIANT 46..207: note = Derived polymorphism lacks residues 46 to 207
  VARIANT 49..207: note = Derived polymorphism lacks residues 49 to 207
  VARIANT 60: note = Ancestral polymorphism is T, Derived polymorphism is A
MVPDPCDDLMVMPKTAAKDEVSCSVPTPPKVTPDEVHAVARKFADQPIQETELDVWAILTAISKKARLWPQGSHHCLLKIVTCCSSAGPQGQEFKALVFEFMANGSLDDWIHPRSSNPTAENTLSLSERLGIAADIFDAFDYLHNHSHPSIVHSDLKPSNVLLADDMSAKIGDFGISRILPLGTVAKAMQNSESSIGMRGSIGYIAL

SEQ ID NO: 121 - protein, 84 aa, Zea mays
  VARIANT 27: note = Ancestral polymorphism is P, Derived polymorphism is L
  VARIANT 35: note = Ancestral polymorphism is C, Derived polymorphism is Y
  VARIANT 39: note = Ancestral polymorphism is A, Derived polymorphism is D
  VARIANT 46: note = Ancestral polymorphism is A, Derived polymorphism is D
  VARIANT 56: note = Ancestral polymorphism is S, Derived polymorphism is L
  VARIANT 62: note = Ancestral polymorphism is S, Derived polymorphism is F
  VARIANT 70: note = Ancestral polymorphism is T, Derived polymorphism is I
MNDISGQRQQVCDTIVKFYSAIKASYPDIKIISSCDRSATSSDNPADLYDVHVYTLSGDMFFKSSMFANTARTGPKVLALLLLP

SEQ ID NO: 122 - protein, 199 aa, Zea mays
  VARIANT 27: note = Ancestral polymorphism is L, Derived polymorphism is Q
  VARIANT 34: note = Ancestral polymorphism is A, Derived polymorphism is D
  VARIANT 44: note = Ancestral polymorphism is S, Derived polymorphism is I
  VARIANT 49: note = Ancestral polymorphism is M, Derived polymorphism is K
  VARIANT 85..199: note = Derived polymorphism lacks residues 85 to 199
  VARIANT 130..199: note = Derived polymorphism lacks residues 130 to 199
MSYIIRILQAIVSEYAVTGNDAGRGTLIAALAEAVFLIGLERNSDVVEMASCAPLFVNGNDQRWNPDAIVFNSWQHYGCPNYWMQVVNFGSKAISLNISVTGLETDIQTFGSINTVLTSGWLRDENSFQQPDKVVPTASPITNVGKQMSVILNSYSLTSFDLLLDSDQTMPSVSGSSLHPSVWIVVHEIQQMVSTTVVK

SEQ ID NO: 123 - protein, 207 aa, Zea mays
  VARIANT 166: note = Ancestral polymorphism is R, Derived polymorphism is T
MHAYNPPNADSLVDHLGLHKALCVLMGWNYTKVPENSKGYQSLPSDLVQASREDLIVWPPTVIIHNTSTGRKKDGRFEGLGNKEMDKKMTELGFSGGKSKSLYGKEGHMGLTLIKFANNPSGLKEAERLAEFLERQDRGRIGWSRVHASRSVDSDQNPLLVEMDIRTAEKKRILCGYLAIASDLDELDSDSRKRAFLKSRREFDPNE

SEQ ID NO: 124 - protein, 183 aa, Zea mays
  VARIANT 136: note = Ancestral polymorphism is R, Derived polymorphism is S
MPAASDDASTSTASAAGSTSPCSWSSSARCKDDEDHGGGAVGKDPSALSEPGLSSAIASRRFFLSSPGRSNSIVDSSAHGGGGGAAAAPALDVGVGAAGVAVPTYSPDPHADFLRSMEEMAAALRLDARRRGDRARLHELLLCYLALNDRRAHKYVVSAFTDLLLRLTAAAAAANLSDDDRHE

SEQ ID NO: 125 - protein, 418 aa, Zea mays
  VARIANT 217: note = Ancestral polymorphism is G, Derived polymorphism is C
MQRCCCLPAASLLLLQLVFLVGRLLGGARGSVRHAYLTCAARAAAVAWGPGVPLSLEEVEVAPPSPMEVRVKVLFTSICHTDLSAWKGECEAQRKYPRILGHEAAGVVESVGEGVEGLAPGDHVVPIFTGECEKCVYCKSDKTNLCGTYRVDPLKSSMVYDDGTRFSVVDQASGQRRPVYHFLNTSTFTEYTVLDAACAVKINPEAPLQRMCLLSCGISTGVGAAWNTANVSARSTVAVFGLGAVGLAVAEGARLRGATRIIGVDVNPSKFTKGKEMGITDFIDPNDICDKPVHEVIREMTDGGVDYSFECTGINDVLREAFLSTHDGWGLTVVLGIHSTPKMVPLHPMELYGRRITGCVFGDFKGKSQLPDLVDKCVNGEVNINFDGFITHKMPFSYINKAFRLLEEGKSLRCLLSL

SEQ ID NO: 126 - protein, 426 aa, Zea mays
  VARIANT 45: note = Ancestral polymorphism is G, Derived polymorphism is R
MAANGKSSLANGASTGGKPIKCKAAVAWGPGEPLVMEEVEVAPPGRLEVRVKLLFTSICHTDLSFLKGENELHRKFPRILGHEAAGVVESVGDGVEDLAAGDHVIPIFNGECGACAYCESDRTNLCGTYRVDASKSTMVSDGGTRFSVADRVSGRTVPVYHFLNTSTFTEYTVLDAACAAKVNPEAPLQKMCLLSCGISTGNLPVAKIEYAHGYIRFGFAGRIGHVNELGLYGTQPTFPRAPPLRFSALALSGSRSVAEGARLRGAARIIGVDINPEKFTKGREMGVTDFVDSRASDKPVHEVIREMTHGGVDYSFECTGINGVLREAFVSTHDGWGLTVVLGIHATPKMLPLHPMELFDGRRITACVFGDVKGKSQLPAIVDKCVNGDLDINLDGFITHRMPFSDINKAIQLLEEGKSLRCVLNL

SEQ ID NO: 127 - protein, 399 aa, Zea mays
  VARIANT 13: note = Ancestral polymorphism is G, Derived polymorphism is E
  VARIANT 91: note = Ancestral polymorphism is D, Derived polymorphism is G
  VARIANT 113: note = Ancestral polymorphism is L, Derived polymorphism is F
  VARIANT 163: note = Ancestral polymorphism is S, Derived polymorphism is C
  VARIANT 199: note = Ancestral polymorphism is P, Derived polymorphism is L
  VARIANT 261: note = Ancestral polymorphism is R, Derived polymorphism is L
  VARIANT 297: note = Ancestral polymorphism is I, Derived polymorphism is L
MAIAAVRRLLWREVGTAAAAAALGTDGNLFARLVSEPECRVKATMEEAASSGTHRDGAFWEPPVTALLRASSPTKAHLILEWKLEKLLKEDIQDCEPYSRIIRFCGQTRNATFAMRVFECVEAKGIQLNTNICNALVDAFLSAGDLLSAMTLYETMESMDACSPNSATYDAFICAFSLLGSGHAMMSWYVAAKNAGFTPSIQAFESLITGFVRLNMLDDAKTVFEEMIALEIKPNSTILEASLEILSRKEETSRVGDFLKRARDGNWELNKATVVRLTRICLDGGVIDEMEQLLALIQKGTHLNSETQLHHGIIRFYANADRLADMEDAIYRMLDNGVMFTCPEDVDVIICCYFRHREFDRLDLFLNRIRSLFKLNRSTYDILIKIHYHVMDAFDFEKP

SEQ ID NO: 128 - protein, 210 aa, Zea mays
  VARIANT 73..210: note = Derived polymorphism lacks residues 73 to 210
  VARIANT 47..210: note = Derived polymorphism lacks residues 47 to 210
  VARIANT 31..210: note = Derived polymorphism lacks residues 31 to 210
MDGKLPPPNPNLAYWEDCWSEGEKVALVDAWGSRYLDLNRGSLRQPQWREVADAVNSRPGASARRCLPRTDIQCKNRVDTLKKKYKVEWPRSRTGMSSPTSRGSQGMGGQCTASTTVDRLPLSASGDGAMDFIGFHATPTLVIQATRLAEDLFERASNGSGKCLTSRVTHAALPVFRRGRRPRGVWGRRGEGRGHKMDGPGSSHRTDGPD

SEQ ID NO: 129 - protein, 245 aa, Zea mays
  VARIANT 157: note = Ancestral polymorphism is T, Derived polymorphism is R
  VARIANT 172: note = Ancestral polymorphism is P, Derived polymorphism is R
  VARIANT 215..245: note = Derived polymorphism lacks residues 215 to 245
  VARIANT 224: note = Ancestral polymorphism is W, Derived polymorphism is C
MRGEERRAVGRDDRDATCGGAVQMHGCCVGERLPLDPPVSRGRFDRDTKSAREYRISSSLAQAHAPIIPVYTVAVKPSEPGAPNCTPNPYAFILTVNRRRRGCHDRAHGGVQIPLLLLPWLVTPDLAVSSDVKVLVNEITSVRPKRILHEVPMDIVRRLLDVLKSNVIDAKRLGFLCFGVQSYAMAIMTHHDNKQLDNRRMRGPRPPPSAHRLPRRRAWQLGEWVLRRCRRCLPHVIHLMMLLLH

SEQ ID NO: 130 - protein, 169 aa, Zea mays
  VARIANT 131..169: note = Derived polymorphism lacks residues 131 to 169
MRPPDHRPRAPTAEIQRSIAFPSAALLCSLVLLLSMAAYAGILVPPLPVRLSVSHLRSVTPASYSLNHRPPRPAVARAASRGNGNGGPPVEGEKERRRSSLPALSEIRLGELLSPDPANAVAVVLTGALVWAGASLLLQLTLISAAIFAAAVKYSFVAALLLIVLIALL

SEQ ID NO: 131 - protein, 158 aa, Zea mays
  VARIANT 27..158: note = Derived polymorphism lacks residues 27 to 158
  VARIANT 89: note = Ancestral polymorphism is L, Derived polymorphism is Q
MEGVLEFAPTYKYELGSRRYVGVGDHQGQSQRGGGRHALSTRIRHLLVGRCQWRSSYGPMAPVNPQSTSPSTARTRWSLIVSIIIQATLGSGSMVMMTQKSTHSKCGVHEGFELPVLYSPGQSTSQSCATDRRAKQLLSQEPYATRTRKMRAVGGQGS

SEQ ID NO: 132 - protein, 967 aa, Zea mays
  VARIANT 367..967: note = Derived polymorphism lacks residues 367 to 967
MGVHRRNYSDDEFSVAGERPEVEFMDFQNDDTFQDYSCEDTPVLVSAPFPFEDGKPKSALVGETSADTIQIENTSPESVNLWSVRIFSSNPEDSYVLSMMRPPSDDANEEEKHAFLALTSVEDRTLLPGQTLTVWLSCTPKDIGLHTSIVHVDIGDEKIERVAFLLADDNVSQALFSDKPYSRRRDQVKKFGPSPTVPGRRPTKQHVQGFKHRLPQYAIPAHIRELIESKQKPDVLYDELSMVNYAEYFSTLLVMEELNLEEEMRTYDMEGVLMRRRGMHFLSLEVPGLAEKRPSLVQGDFVVARYAGNHAQAYQGFIHRVEADEIFLQFDHQFHMNHHDRNRYHVSFTYNRVNMRRLYKSIDDAKYLGPGILFPRQSPCRVLKRWPFNPLNPHINTEQADAVAMVLACRGGSPYVIYGPPGTGKTMTIVEAVLQLYTGKKRANILICAASNTAADHVLEKLLQASYLIRPSDIFRLNAQSRQYEDVSTDFIKFCFFQDRVFMCPPLQALVRYRIVISTYSSSYQLQAEGIRQGHFTHIFLDEAGQASEPEAMVPLSGLCGRDTVVVLAGDPKQLGPVVYCKQAEKDGLGTSYLERLLTDFEPYGTRNPNYVTKLVRNYRCHPAILELPSELFYEGELIPCKEGESSAYDCIGLPDKSFPVLFIGIQGCDEREGANPSWFNRIEVSKVVSIIRNLTRGGDVDASDIGVITPYRQQVAKIKKALEAFEMPGLKVGSVEQFQGQEREVIIISTVRSTVKHNEFDRFFNLGFLSNHKRFNVSITRAKSLLVIVGNPYIITKDRHWDRLLRYCADNGSYQGCPLPPPESHAYSDGTRFFSEHDDGHQAGPSGQDDYYNQEATYCSYNNQEPSDFGFRLGSGAEPASENQELPSEELPEDEKQPLFSNPQADLEETPKQDVVEEGAAQGGVLADPTSSTTADDQLQGAYAEKYSFPPGWCDVSSIPAQGWGD

SEQ ID NO: 133 - protein, 271 aa, Zea mays
  VARIANT 21..271: note = Derived polymorphism lacks residues 21 to 271
  VARIANT 60: note = Ancestral polymorphism is T, Derived polymorphism is I
  VARIANT 65: note = Ancestral polymorphism is N, Derived polymorphism is D
  VARIANT 73: note = Ancestral polymorphism is R, Derived polymorphism is C
  VARIANT 86: note = Ancestral polymorphism is Q, Derived polymorphism is L
  VARIANT 89: note = Ancestral polymorphism is A, Derived polymorphism is D
  VARIANT 96: note = Ancestral polymorphism is P, Derived polymorphism is L
  VARIANT 116: note = Ancestral polymorphism is A, Derived polymorphism is V
  VARIANT 128..271: note = Derived polymorphism lacks residues 128 to 271
  VARIANT 245: note = Ancestral polymorphism is Y, Derived polymorphism is H
MSRLILSARCVSSSPDFADDQDPPQPPPTLQPQGAPSAPSDALLRMEQEILKFIHDPSRTEYEFDGLPTSYLRLAAHRLAQHYFLQSIDIPDNSLPDGTGSRIILRKTTFDCRLPVVRLADIPVNLPQEDISVARVAIKQRPQKNFHGMNSSSAHSSRDNLQKSVVERKEEYNKARAQIFNNSNRNPNATTSENKEEMDSRLVFVGNVDYACTPEEVQQHFNSCGIVNRVTILTDKFGQPKGFAYVEFVEVEAVQEAIKLNESELHGRQLK

SEQ ID NO: 134 - protein, 758 aa, Zea mays
  VARIANT 23: note = Ancestral polymorphism is D, Derived polymorphism is N
  VARIANT 16: note = Ancestral polymorphism is D, Derived polymorphism is V
MAAPESECGGSDGYRDLRGVRVDLDTGAARAGGGGGFAVSFWLYLSVSARPSSVILHQITAGDDTKLPFLALGEGNKLLLFPLMRLHREAPAPASSYPWTDTTNLSSTSVCPLEKWFHIGCEVTENVMRLHVDGFLTAEAPLCSLFDEPDSQDDSNQISLVGNDGKLEGYIYNIEVSYVLGAIKEQYTKNPPFKLSIDYSCSDGIEEGDDGIWSIVGGKASCRRNFILEVVLTNAFGEPVKDKEVVSSLVYADDGTVVAKSRDDSEPPLLITCEGLEYAAISRPLPIIRGRALFKLKISQVSSPYVNHPCYVYSFSLHWTEKRNYLSLSVSLMWSIIMMVVACFLSIITWCLFQLSSKCDNKLFRIKFSTLHMQRYSFLEAYSKPIRCISRSRTVRPLGPTKRASSATANEIDMLSNGQGFVSTDKVNSRGHSVCLHTPMFPKIEDGMVEVVEAHKIVSQNKNARKVVVSKEAQNVIGTDSSTSNYDSFDSGSSWSGSEGDDGIETFSDAVVFRYCLDSTYDRSKFLRGASLTVNKDDLVKLADRVSLYSGCSHHRNQILMSKRLLREGADTWNMISKNNERALWSSAIPEIITKFTNIAHSVRRGLSEQDLEVLRGIAGCGEDIGRDEFDRLWCWLYPVAVSLSRERIKKLWDCTAPRWIEGLITTEEAESALRSSRELLKEAGTFVLRFPITRSWPHPDAGSLVVTYIGSDSSIHHRLLSLDSSDASAEKLQDLLLQEPELSQLGRVDRVSITIRR

SEQ ID NO: 135 - protein, 166 aa, Zea mays
  VARIANT 4: note = Ancestral polymorphism is S, Derived polymorphism is T
MARSKLSVELLLALLVVLAAGPAMRLVEAASAHLHFYMHDVTGGPSPTAVQVVSGPRGNFGNTMVIDDKLTEGTSESSTTVGRAQGYYMVASVANLELLVNMNVVLTSGPYAGSSLTVVGRDDVSVPVRELSVVGGTGQFRMARGYVLWKTVTPAILDLEILVNPS

SEQ ID NO: 136 - protein, 423 aa, Zea mays
  VARIANT 104: note = Ancestral polymorphism is V, Derived polymorphism is G
  VARIANT 181..423: note = Derived polymorphism lacks residues 181 to 423
  VARIANT 277..423: note = Derived polymorphism lacks residues 277 to 423
  VARIANT 293..423: note = Derived polymorphism lacks residues 293 to 423
  VARIANT 350..423: note = Ancestral polymorphism lacks residues 350 to 423
MACRGRWVAGPIFATTGRGEEEATGLPSDVPRDHFAVYVGERRRRFVVPITLLDRPEFRYLLRRAKEEFTSVGGALILPCEEVAFHSLTSALACARRGDVLHRVIGILTRWTAIRGPQRRVRRSPSCKDSVSPFTPTHKISLLSCPLVDCACSLQWRPHRSPDDDLVELLWHNGSVVAQPQAHHRPAPPSDRDPLGTNDITAEETAAWFPDTLDDPLEKDLYTQLWYSTIADAAPQHEGTFPGPTSHPSPPLPPVGSSNVESSWAGDICSTFCGSNQVPRTPTGIRGKDAALQSEVPSGVGAHDGTSSSGGSGSNYGGSGLPSDSVHGHKRKGMCRDESDSRSEKIESKYRCLSGIELMRKLQDVECEESTEETKPWQRNGPKRRTRAAEVHNLSERRRRDRIKEKMRVLQELIPHCNKVQVP

SEQ ID NO: 137 - protein, 218 aa, Zea mays
  VARIANT 36: note = Ancestral polymorphism is Q, Derived polymorphism is K
  VARIANT 48: note = Ancestral polymorphism is S, Derived polymorphism is L
  VARIANT 49: note = Ancestral polymorphism is A, Derived polymorphism is V
  VARIANT 59: note = Ancestral polymorphism is L, Derived polymorphism is P
  VARIANT 66: note = Ancestral polymorphism is L, Derived polymorphism is P
  VARIANT 69: note = Ancestral polymorphism is T, Derived polymorphism is N
  VARIANT 70: note = Ancestral polymorphism is W, Derived polymorphism is C
  VARIANT 83: note = Ancestral polymorphism is M, Derived polymorphism is I
  VARIANT 103: note = Ancestral polymorphism is G, Derived polymorphism is D
  VARIANT 111: note = Ancestral polymorphism is N, Derived polymorphism is S
  VARIANT 119: note = Ancestral polymorphism is S, Derived polymorphism is I
  VARIANT 120: note = Ancestral polymorphism is G, Derived polymorphism is R
MGNFLFCLMGDMSYTQHHHDSCWKAPLHCSEMTDEQMIAFIVHRVRASAVFLTAFPSLPRKYVKALLHTWARGRGAMPLVSFMFLRDLCIQVGSNCLDTCLKGIYKAYLVNCKLSKSISGSKQQHIQFLGNCVRELYSLDPQSAYQHAFIFIHQLGVILRGALTERGPKLVKDKRQKESSKSSKKQVRNLTKKIMIGNTFCLELWTSVVCGCSSEEEF

SEQ ID NO: 138 - protein, 254 aa, Zea mays
  VARIANT 24: note = Ancestral polymorphism is A, Derived polymorphism is V
  VARIANT 30: note = Ancestral polymorphism is A, Derived polymorphism is V
MLRRARVPCAAAPAPAPAVVVAVALLALSAVAAADFFSPLAPIFSPVINSICSTVACGQGNCTVAPGTLGYRCDCRPGWTQLHVGDSLRFLPCVIPNCKQDTLLLHHRFTSSLLCSIDSSCFNGSPAPAPALALTPLPPPKNFSLDPCELAYCGAGGTCRKNGSGMSYHCECKEGYSNLLNMTAMPCFQNCSIGADCASIGIHPSSTSNSPPAPPGSESISNQGSTAAPGSISQRILLPLLLMVVVSLAVGYVM

SEQ ID NO: 139 - protein, 65 aa, Zea mays
  VARIANT 51: note = Ancestral polymorphism is M, Derived polymorphism is I
  VARIANT 49: note = Ancestral polymorphism is R, Derived polymorphism is C
  VARIANT 48: note = Ancestral polymorphism is S, Derived polymorphism is P
  VARIANT 45: note = Ancestral polymorphism is P, Derived polymorphism is S
  VARIANT 27: note = Ancestral polymorphism is R, Derived polymorphism is C
  VARIANT 26: note = Ancestral polymorphism is L, Derived polymorphism is H
  VARIANT 25: note = Ancestral polymorphism is S, Derived polymorphism is L
  VARIANT 23: note = Ancestral polymorphism is G, Derived polymorphism is R
  VARIANT 16..65: note = Derived polymorphism lacks residues 16 to 65
  VARIANT 14: note = Ancestral polymorphism is G, Derived polymorphism is R
  VARIANT 13..65: note = Derived polymorphism lacks residues 13 to 65
  VARIANT 10..65: note = Derived polymorphism lacks residues 10 to 65
  VARIANT 8: note = Ancestral polymorphism is D, Derived polymorphism is G
MFNQILLDVWLSQGIQSSLIILGGSLRSRRWWSTCHQESILTKHPLLSRFMVSCLCVHHLGHPDM

SEQ ID NO: 140 - protein, 108 aa, Zea mays
  VARIANT 70..108: note = Derived polymorphism lacks residues 70 to 108
  VARIANT 54: note = Ancestral polymorphism is E, Derived polymorphism is K
  VARIANT 17: note = Ancestral polymorphism is G, Derived polymorphism is R
  VARIANT 14: note = Ancestral polymorphism is V, Derived polymorphism is I
MGVVLMFGGQVLVVKVGRMAGQFAKPRSEPFEEKDGVKLPSYRGDNVNGDDFTEKSRVPDPQRMIRAYAQSVATLNLLRAFATGGYAAMQRVTQWNLDFMDHHEQGDR

SEQ ID NO: 141 - protein, 39 aa, Zea mays
  VARIANT 3: note = Ancestral polymorphism is G, Derived polymorphism is S
  VARIANT 10: note = Ancestral polymorphism is S, Derived polymorphism is F
  VARIANT 19: note = Ancestral polymorphism is S, Derived polymorphism is C
  VARIANT 32: note = Ancestral polymorphism is P, Derived polymorphism is L
  VARIANT 34: note = Ancestral polymorphism is V, Derived polymorphism is M
MAGLILVVFSDVCSSYRASVDLICNGLLGFRPGVICSSD

SEQ ID NO: 142 - protein, 495 aa, Zea mays
  VARIANT 63: note = Ancestral polymorphism is G, Derived polymorphism is D
MAMLVLWLAWLLVSLIAVYFLDLYVHARRGLPPGPRPLPLIGSLHLLGDQPHRSLARLAKFHGPLMSLRLGAVTTVVISSPDVAREFLQKQDAVFANRFVPHAIGDHVKNSVPWLPHSGRWRALRKIMATELFAPHRLEALQHLRRQKVEELVGHVRLLALQGRAVDVGSVAFTTSLNLLSRTIFSCDLTNLDDHTGSAKEFQEVVTEIMEVAASPNLSDLFPALACADLQGLRRRLAKLFARLHQVFDVEVDRRLCERDAGDRRKNDFLDLLLDTDGGTAALDRDSLLSLFTDLFAAGSDTSSSTVEWALTELLRNPVPMAKTCDELLAATGAARNIEESEIEQLPYLQAVVKETFRLHPPVPLLLPRRAGAATRAMGHTIPKGARVLVNVWAMGRDGDVLPDPEKFMPERFLGRPTDFRGGDLELIPFGAGRRICPGMPLASRMVHLVLASLLNQFRWRLPAEVERDGTDEMAESFGVTLKKASPLCAIATPV

SEQ ID NO: 143 - protein, 446 aa, Zea mays
  VARIANT 403..446: note = Derived polymorphism lacks residues 403 to 446
MAATIQSVKARQIFDSRGNPTVEVDVFCSDGTFARAAVPSGASTGVYEALELRDGGSDYLGKGVSKAVNNVNSVIGPALIGKDPTAQTEIDNFMVQQLDGTKNEWGWCKQKLGANAILAVSLAVCKAGASIKRIPLYQHIANLAGNKQLVLPVPAFNVINGGSHAGNKLAMQEFMILPTGAASFKEAMKMGVEVYHHLKSVIKKKYGQDATNVGDEGGFAPNIQENKEGLELLKTAIEKAGYTGKVVIGMDVAASEFYSDKDQTYDLNFKEENNDGSQKISGDSLKNVYKSFVSEYPIVSIEDPFDQDDWVHYAKMTEEIGEQVQIVGDDLLVTNPTRVAKAIKEKSCNALLLKVNQIGSVTESIEAVKMSKRAGWGVMTSHRSGETEDTFIADLAVGLSTGQIKTGAPCRSERLAKYNQLLRIEEELGAIAVYAGAKFRAPVEPY

SEQ ID NO: 144 - protein, 126 aa, Zea mays
  VARIANT 102..126: note = Derived polymorphism lacks residues 102 to 126
  VARIANT 101: note = Ancestral polymorphism is F, Derived polymorphism is V
  VARIANT 66..126: note = Derived polymorphism lacks residues 66 to 126
  VARIANT 65: note = Ancestral polymorphism is R, Derived polymorphism is Q
  VARIANT 57: note = Ancestral polymorphism is R, Derived polymorphism is Q
  VARIANT 23: note = Ancestral polymorphism is S, Derived polymorphism is F
  VARIANT 22: note = Ancestral polymorphism is E, Derived polymorphism is K
  VARIANT 18: note = Ancestral polymorphism is E, Derived polymorphism is K
  VARIANT 7..126: note = Derived polymorphism lacks residues 7 to 126
MRGEELQRLSVQQLQELEKTLESGLGSVLKTKRMQLIEENSRLKEQVSIPLSVCFDRRLGGFSQRRPEAAGYHSSAPSDRDLACPVAERCRSLALLHSRSFWIGGEQHCWIGKTQVTNASHQNKAF

SEQ ID NO: 145 - protein, 696 aa, Zea mays
  VARIANT 29..696: note = Derived polymorphism lacks residues 29 to 696
  VARIANT 515..696: note = Derived polymorphism lacks residues 515 to 696
  VARIANT 551..696: note = Derived polymorphism lacks residues 551 to 696
  VARIANT 600..696: note = Derived polymorphism lacks residues 600 to 696
MMLRPSARKIWNQQFKKKKEKLQHDRDVRDNVQLIDDEPTYVQSLVGSSDSVSKLGPMDSFARRIDPKANQAEAKRQQNINEPLWKERTHQVQQYVARWVYTHGIPFHACDNDEFKEMVEAIGRFGPGFQPPSQHHYREKLLEEEHARTKSLLQDREDEKNKYGCSVMTDAWTDMKRRSIMNICTHTTAGTSFIKSKEMSNVSHTSEVIFELVDKAIQDLGPDSVVQVVTDNASNNMGAKALLHDKRPNIFWSSCATHTINLMLQGIGNLPRFKKRIDQAKSFTIFVYGHHRTLACMRSFTLKRDIIRPGVTRFATAYLTLQSMMEKKDDLRKMVVDSKWYDLPDVKSKKGKEATAMVLSIPFWKGVSLCLKVFEPLVKLLRLVDGDVKPSMGFLYGELINAKKAIKEAFGNVEIKYKEVMSIVEKKMKNRLDSPLHVAAYMLNPYYSYTNSSIFCDSTIMEKFMLCVETFYHGEDEKAYRAVNDDLDRFQTKQGSFSKNMARSCQRFDFNPASWWRLYGGGAPDLQAIAIRILSLTTSSSGCERTWSVFEQTHTKRRNRLTTERLNNLVFIQFNNRMLSKKERISRNKNYEVLLSSDCSEAQGFFFEGGDEQALVQIRDEDEGEMQGTGIPWSVLGDAMGVEDELQPRRSARVAREVDEEDWESEKEDEDNVLEDIDYEEDNCEISNTSDYVHVE

SEQ ID NO: 146 - protein, 425 aa, Zea mays
  VARIANT 38: note = Ancestral polymorphism is L, Derived polymorphism is V
MPPAIPSLVHPSRVRILHPGGSHIHGPVVYWMLRDQRLADNWALLHAAELAAASTPAAPLAIAFTLFPRPFLLGAHLRQLGFLLRGLRRLAADAHARGLPFFLLEGGPAELPSLVRRLGASALVADFSPLRPVREALDAVVQELLRDAANMAVHQVDAHNVVPVWTASGKLEYSAKTFRSKVNKVINEYLVEYPEVPQWAPWCMEQPKSVDWDALINSIFSEAENVPEINWCEPGESSAMEVLLGSKDGFLTKRIKNYDTGRNDPTKPHALSCLSPYLHFGHISAQRCALEAKKRRHLSPKSVDTFLEELIIRRELADNFCYYQPQYDSLAGAWEWARKTLTDHTGDKREHIYTREQLENAKTSDPVCISIFLLWNASQLEMVHHGKMHGFMRMYWAKKILEWTSQPEEALSIAIYLNDKVNLEE

SEQ ID NO: 147 - protein, 328 aa, Zea mays
  VARIANT 53: note = Ancestral polymorphism is V, Derived polymorphism is I
  VARIANT 58: note = Ancestral polymorphism is P, Derived polymorphism is L
  VARIANT 67: note = Ancestral polymorphism is R, Derived polymorphism is C
  VARIANT 71: note = Ancestral polymorphism is L, Derived polymorphism is H
  VARIANT 73: note = Ancestral polymorphism is R, Derived polymorphism is G
  VARIANT 147..328: note = Ancestral polymorphism lacks residues 147 to 328
  VARIANT 172..328: note = Derived polymorphism lacks residues 172 to 328
  VARIANT 201..328: note = Derived polymorphism lacks residues 201 to 328
MGASGLAASSNGGNKWAKAANEEATMTVVAVESDEPRTESPLERGTIIYNLLVTLPFPSGLISRLRRAFLLCRFTTDLVSRSSLHMLQLLVQECLRSAIDLSSAQVAATTDNRPPAHCFTFGDESTTGQLPLPKFNNSNKDLKTYSWGMLFDNVNHQSYIPGFQVDQTEWIQSCSKLASCVNKQAPSATRFMGMQQSLGIQPTQLGKDAPAADDYAAEKLDIELSGSYLLPPRYSKGALIISSAASNSVLPAVGIGIIKAYGGTTYRLQRSIRSMFIAEAKCSDDFVFSIVFSVIGSVCTYIDMIYGMTSAIFVIFMTSFLIDVCRHE

SEQ ID NO: 148 - protein, 265 aa, Zea mays
  VARIANT 197: note = Ancestral polymorphism is P, Derived polymorphism is H
  VARIANT 196: note = Ancestral polymorphism is P, Derived polymorphism is S
  VARIANT 191: note = Ancestral polymorphism is E, Derived polymorphism is K
  VARIANT 187: note = Ancestral polymorphism is A, Derived polymorphism is V
  VARIANT 184: note = Ancestral polymorphism is G, Derived polymorphism is V
  VARIANT 183: note = Ancestral polymorphism is S, Derived polymorphism is Y
  VARIANT 181: note = Ancestral polymorphism is S, Derived polymorphism is Y
  VARIANT 148: note = Ancestral polymorphism is C, Derived polymorphism is Y
  VARIANT 139: note = Ancestral polymorphism is N, Derived polymorphism is S
  VARIANT 125: note = Ancestral polymorphism is Y, Derived polymorphism is C
  VARIANT 120: note = Ancestral polymorphism is R, Derived polymorphism is W
  VARIANT 118: note = Ancestral polymorphism is R, Derived polymorphism is K
  VARIANT 90..265: note = Derived polymorphism lacks residues 90 to 265
  VARIANT 48: note = Ancestral polymorphism is R, Derived polymorphism is H
  VARIANT 21: note = Ancestral polymorphism is T, Derived polymorphism is I
MQKNLPSELDDISGWTEDLFTARKSAINLLGVIALSKGPPVASAASKRKKGDKNKGKSEMSSIGELLVIPFLSKFPIPSHGEDASSVAVQNYFGVLMAYGGLQDFLSEKKDLTITLIRNRILPLYSLDPCSPYLISTANWVIGQLAICLPEDMSSSIYQSLMKSLTMEYVEDITCYPVCASASVAIAELIENSYVPPNWLILLQVVLKRISTGDENESALLFKLLGTIVEGGQEKVLSHIPEIVSNIASTVMELRLPVPDPWPQE

SEQ ID NO: 149 - protein, 285 aa, Zea mays
  VARIANT 220: note = Ancestral polymorphism is D, Derived polymorphism is V
  VARIANT 63: note = Ancestral polymorphism is R, Derived polymorphism is Q
  VARIANT 23: note = Ancestral polymorphism is L, Derived polymorphism is F
  VARIANT 14: note = Ancestral polymorphism is P, Derived polymorphism is S
  VARIANT 4: note = Ancestral polymorphism is G, Derived polymorphism is R
MGIGKDGVLPWKLPGDLKFFKEFTLITSDPVKKNAVIMGRKTWESIPVKSRPLPGRLNVILTRSGTFDFATVENVVICASMESALKLLASTPYCLSIEKVFVIGGGQVLREYLKGPACEAIHLTDIQSSIECDTFIPPVDFSVFQPWYSSFPVIESNIRHSFVSFVRVRKSVAETHESNGKESTEVDTKNDKFEKENFSFLPKMVYDRHEEYQYLNLVEDIIRSGAQKNDRTGTGTLSKFGCQMRFNLRKKFPLMTTKRVFWRGVVEELLWFISGSTNAKVCSDS

SEQ ID NO: 150 - protein, 350 aa, Zea mays
  VARIANT 329: note = Ancestral polymorphism is P, Derived polymorphism is S
  VARIANT 319..350: note = Derived polymorphism lacks residues 319 to 350
  VARIANT 140..350: note = Derived polymorphism lacks residues 140 to 350
  VARIANT 50: note = Ancestral polymorphism is R, Derived polymorphism is L
  VARIANT 46: note = Ancestral polymorphism is S, Derived polymorphism is F
MLVHRLLVDGDSSFHRELLHGTRRGTRLLNLSDFWDEAHSGSWDHSAFVRTYALYLDQRLEFFLHERKQGFLDRFLACRPTGGAKQSRLVLVALYQIVRESFQLYSDICEVLAVLLDRFFDMEYAECVKAFEAYASAAKQIDELSAFYAWCKDSGVARSSEYPEVQHVTDKLLETLEKFMRDRAKRPKSPPREPEPEPVKEEPEPDMNSIKALPAPEDYKEPEPMKVEEEVKPEPPPQPQGDLVDLREHTVSADEQGNRLALALFQGPPAASGNNGSWEAFPSNGGNEVTSAWQNPAAEPGKADWELALVETASNLSMQKPAMSGGMDPLLLKMHFIVVTLFNISYHRIK

SEQ ID NO: 151 - protein, 138 aa, Zea mays
  VARIANT 41: note = Ancestral polymorphism is F, Derived polymorphism is S
  VARIANT 116: note = Ancestral polymorphism is G, Derived polymorphism is A
MAGKGGKGLLAAKTTAAKSTDKDKDRKKAPVSRSSRAGLQFPVGRIHRQLKSRASAHGRVGATAAVYSAAILEYLTAEVLELAGNASKDLKVKRITPRHLQLAIRGDEELDTLIKGTIAGGGVIPHIHKSLINKTAKE

SEQ ID NO: 152 - protein, 100 aa, Zea mays
  VARIANT 2: note = Ancestral polymorphism is A, Derived polymorphism is V
  VARIANT 31: note = Ancestral polymorphism is Q, Derived polymorphism is P
  VARIANT 40: note = Ancestral polymorphism is A, Derived polymorphism is S
  VARIANT 56: note = Ancestral polymorphism is L, Derived polymorphism is F
  VARIANT 63..100: note = Derived polymorphism lacks residues 63 to 100
MAATCDRYLKLTFYIDDGSRTVADKNAEKKQKAQRVKPKSAPPPTTTSTIESKKHLATVRVIQRNLVYIIGLPVHLCNESVSSHPLLPKSCDMFKFYFSY

SEQ ID NO: 153 - protein, 218 aa, Zea mays
  VARIANT 22..218: note = Derived polymorphism lacks residues 22 to 218
  VARIANT 53: note = Ancestral polymorphism is E, Derived polymorphism is K
  VARIANT 122..218: note = Derived polymorphism lacks residues 122 to 218
  VARIANT 123..218: note = Derived polymorphism lacks residues 123 to 218
  VARIANT 144..218: note = Derived polymorphism lacks residues 144 to 218
  VARIANT 147: note = Ancestral polymorphism is S, Derived polymorphism is F
  VARIANT 163..218: note = Ancestral polymorphism lacks residues 163 to 218
MNELPEDKSITVYRCGPLVDLCRGPHIPNTSFVKAFACLKASSSYWRGKVDRESLKRVYGISFPDSRRLTEYKHFLEEAKKRDHQILGKAHELFFFHELGPGSCFFLPRGARIYNKLMDFMRQQYRDRGYQEVLSPNIYNMQLWETSGHVANYKENMFVFESQKQEFGLKPMNCPGHCLMFANRVRSYRGEFLPNFCILSVLSERAKGPLAELVRCSE

SEQ ID NO: 154 - protein, 582 aa, Zea mays
  VARIANT 488..582: note = Derived polymorphism lacks residues 488 to 582
MCLLQRAALYFLGGADDREALAYAARMPETGTMSLTVVRFKLRNWVGMGGRDEARDEELLQEFWSRHRDNERGGVRGEDGGGRGGHDVRGPHLSREKDNEEEESDRDGFFRRLLRDSKEEDMELTPSSNGLLKRLFRDKEDRQGEDDEKEGFFRRMFKDKNEERRDSNHARHGNEERLGKSVEDDDREGFFRKIFKDKNEERKDEGHQKPDEREKVGANIEDDKRDGFFKQLFKEKNDEKKEGSTPSKKEEDDKGHKNADDDNFFRRLFKDKNEEKKGIVHDRNEDDKCEEGDKENFFRKLFKDKHEERRTEGPDKNDDYGKGSSGIEEEDNPEFLSFRRLFRVHPEDPKSGHIESSQSNNLSEGSPGSESFFKRLFRDRDRSLEDSEIFGSKMAKEARIWSHVIFLLDTISRVHVIKHPGTTGINEKQSGKPPLPINAVAELRKGSYYASLELVQALCDTSYGLVDIFPIEDRKIALRESLTEINSQIASTEKNGGVCFPMGKGIYRVVHIPEDESVLLNSREKAPYLICVEVLKAEAPSHSKGSSDGHKLSKGGIPLANGVSLRCHLGQLAYVILYLITI

SEQ ID NO: 155 - protein, 300 aa, Zea mays
  VARIANT 202: note = Ancestral polymorphism is D, Derived polymorphism is A
  VARIANT 220: note = Ancestral polymorphism is A, Derived polymorphism is T
MRAAQIDPSPAAPPKSRLKRLFERQLLRVSPAERLPSAPPGGGDKDELPEPSSLCLDGMVRSFLEDGGGGGGAERAAAAARCCNCFHAGDTSDDEDGPAAADAAAADIAETIKGLVHCASLRERNLLADVSTLVERHRASGARKRDLLRLLAGSLRAAGHDAAVCLSRWDRSPSHPAGDHAYLDVLLPAASERAGRERVLVDVDFRSAFEVARPTKAYRAVLQRLPPVFVGRDDRLRLLVAAAADAARASLKKRGLHLPPWRKPEYMRARWLSPYDREAPQPEASTGELAGDGEGGGPTA

SEQ ID NO: 156 - protein, 108 aa, Zea mays
  VARIANT 73: note = Ancestral polymorphism is N, Derived polymorphism is K
  VARIANT 68..108: note = Derived polymorphism lacks residues 68 to 108
  VARIANT 64: note = Ancestral polymorphism is G, Derived polymorphism is C
  VARIANT 61: note = Ancestral polymorphism is R, Derived polymorphism is C
  VARIANT 49: note = Ancestral polymorphism is C, Derived polymorphism is Y
MLLRHRHRHHLLSRPLRSFPLAALGCVAMSTSSSPSSSASTSAAADYHCRTKHSPTAGYARGPCRLDWANQPNPFVRFSPAPPLLLPNPPPLAPVPYPALFHSPPPPP

SEQ ID NO: 157 - protein, 118 aa, Zea mays
  VARIANT 100: note = Ancestral polymorphism is T, Derived polymorphism is I
  VARIANT 20: note = Ancestral polymorphism is Y, Derived polymorphism is C
  VARIANT 6: note = Ancestral polymorphism is L, Derived polymorphism is F
MVRDELEQLLDDDDDMADLYLSRKLAGASSPVSGSVGPNWFPASPPIGSKISRASRASAATVHGNENDVEELEMLLEAYFMQIDGTLTKLTTLREYIDDTEDYINIQLDNHRNQLIQV

SEQ ID NO: 158 - protein, 119 aa, Zea mays
  VARIANT 23: note = Ancestral polymorphism is K, Derived polymorphism is T
  VARIANT 34: note = Ancestral polymorphism is A, Derived polymorphism is V
  VARIANT 51: note = Ancestral polymorphism is T, Derived polymorphism is I
  VARIANT 52: note = Ancestral polymorphism is G, Derived polymorphism is V
  VARIANT 53: note = Ancestral polymorphism is P, Derived polymorphism is L
  VARIANT 58: note = Ancestral polymorphism is E, Derived polymorphism is K
  VARIANT 75: note = Ancestral polymorphism is K, Derived polymorphism is I
  VARIANT 78..119: note = Derived polymorphism lacks residues 78 to 119
MGSYLGVAAASANPPHFIHLCYKPTDGNIKRKLAIVGKGLTFDSGGYNIKTGPGCSIELMKFDMGGSAAVFGAAKALGQIKPPGVEVHFIVAACENMISGTDMRTGDIVTASNGKTIEV

SEQ ID NO: 159 - protein, 229 aa, Zea mays
  VARIANT 33: note = Ancestral polymorphism is P, Derived polymorphism is S
  VARIANT 37: note = Ancestral polymorphism is P, Derived polymorphism is H
  VARIANT 80..229: note = Derived polymorphism lacks residues 80 to 229
MRKKKVERWDQFVDVIEQIKKVASEIRPADIVPFRIPVDQSDLSLRKLEELTKELQSLQKEKSDRLKQVMEHLNTLHSLCEVLGVDFKQTVNEVHPSLGEADGSKNLSNCTIESLASAASRLCELKVQRMQKVESEVLRLEQLKVSKMKDLVLKKKTELEEHRRRAHLISEEGYAAEFSDEVIEAGVVDPALVLEQIEAHIATVKEEAFSRKDILEKVERWLNACEEAQ

SEQ ID NO: 160 - protein, 905 aa, Zea mays
  VARIANT 500..905: note = Derived polymorphism lacks residues 500 to 905
  VARIANT 509..905: note = Derived polymorphism lacks residues 509 to 905
MRSQLNASFSPPPSLRRALPSATPRALRYGERTASIGSAFLLRRATEAGRLLNTALPGSRFHAFPWRFRAPQHHGRGAGARCATNLPAPGSHGVGVLASERRADDGDTTVKNADAPSTSTATQGNLNMAAIVSIAFCFLHRIVSGRMQSMMNLFPWMSNGIASLPFACISDPTRKPMPLKLDLTLPPLPDFGWNFSRLYYRFNSQLDRNIALSIITLLITCFSFVIVGGLLFHKFRKQQQSLEDCFWEAWACLCSSSTHLRQKTRVERVIGFFLAIWGILFYSRLLSAMTEQFRNQMHKVREGAQVQVIEDDHIIICGVNSHLMSILNQLNKYHESSIRLGLATARKQKILLLSDLPRKQIDKLADSLAKDLNHIDVFTKSCSLSMSTSFERAAAHKAKSIIILPAQHERYEVDTDAFVSLLALQPCKQIAPVPIIVEASNATTCELLKSITGLNVQPVEMVASKLFVQCSRQKDLLKIYKHLLNQHSNVLIFCHDIYEKTISILVHFRAKLCYPENVFNLFRRPELEGMKYMDVRLVCGIFRSGKIHFHPSEEELLKETDKLLLIAPVRGMKRPQYRALSVRKETQTLSRNSEPREGQGSFNMATTMDNETRLNNIVKRPLKSLSKSSDYMLGPKECVLIVGWRPKVTEMIREYDNYLGPGSTVEILSETPIKERSSIINPLLQSQLKNVKVTHRVGCPLNYDTLKETIINVRESAKSDKEVPLSIVVISDRDWFVGADAAQADKQLAYTLLLAENICQKHGVMVENLVSEIVDMGLGKQISKIRPSLSFIGAEEIMSRVTAQVAESSELNEVWKDILNAEGDEIYIKEIGLYMKEGEKISFLELSERAVLRREVAIGYIKDGKQHINPINKSEPLSLEMNDSLIVISEFEGEQPIMMGGETSG

SEQ ID NO: 161 - protein, 156 aa, Zea mays
  VARIANT 152..156: note = Derived polymorphism lacks residues 152 to 156
  VARIANT 135: note = Ancestral polymorphism is P, Derived polymorphism is Q
  VARIANT 108: note = Ancestral polymorphism is R, Derived polymorphism is C
  VARIANT 104: note = Ancestral polymorphism is H, Derived polymorphism is N
  VARIANT 102: note = Ancestral polymorphism is D, Derived polymorphism is E
  VARIANT 98: note = Ancestral polymorphism is R, Derived polymorphism is M
  VARIANT 97: note = Ancestral polymorphism is L, Derived polymorphism is P
  VARIANT 91: note = Ancestral polymorphism is C, Derived polymorphism is Y
  VARIANT 77: note = Ancestral polymorphism is K, Derived polymorphism is M
  VARIANT 70: note = Ancestral polymorphism is Y, Derived polymorphism is C
  VARIANT 30: note = Ancestral polymorphism is G, Derived polymorphism is R
  VARIANT 29: note = Ancestral polymorphism is S, Derived polymorphism is L
MCGDPNSVLRFAFIEFTDDEGARAALNLSGNMLGYYPVNVLPSKTAIAPVNETFLPRSDDEREMCARTIYCTNIDKMVAQADLKLFFESICGEVFRLRLLGDYHHSTRIAFVEFVMAESATAALNSSGVVLGSLPIRVNPSKTPVRPRDPRQLMSS

SEQ ID NO: 162 - protein, 314 aa, Zea mays
  VARIANT 278..314: note = Derived polymorphism lacks residues 278 to 314
  VARIANT 251: note = Ancestral polymorphism is Q, Derived polymorphism is R
  VARIANT 249: note = Ancestral polymorphism is A, Derived polymorphism is V
  VARIANT 208..314: note = Derived polymorphism lacks residues 208 to 314
  VARIANT 68: note = Ancestral polymorphism is G, Derived polymorphism is S
MSRYGQGPRLLGRFANGHIEEFINAKTKVKQRRNREAIYAVNDEHFYRVLYHTLSRVTDGFSEANLLGRGRYGSVYRCTLEEEDEGVGAGAAATVAVKVFNLQQSGSSKSFEAECETLRRASNGAPGVHQQQKRLLSVLVAPKVAGTSNVVSLKLMGGALIGRHYESSAAAIDSTDPPAEKHEYQAEVNRLMDLIIHSLYSNKEVFLRELVRCVVTDSVALLEEHENMLGTIRYDSGETACSLHMLHDAFQLLSANLCNLGYFHFYARSSGFEQLDGRVKVLQIEDSAPPGADLVVAGVAREDPEAETGPEHLH

SEQ ID NO: 163 - protein, 68 aa, Zea mays
  VARIANT 25: note = Ancestral polymorphism is A, Derived polymorphism is V
  VARIANT 2: note = Ancestral polymorphism is V, Derived polymorphism is M
MVAMSSWAVLVAVVLMQCCNVIVAARPLPMETPAVATADGGWLEMIMQVLQGPGSNNHNCQAPNGSCP

SEQ ID NO: 164 - protein, 287 aa, Zea mays
  VARIANT 180..287: note = Derived polymorphism lacks residues 180 to 287
  VARIANT 141: note = Ancestral polymorphism is E, Derived polymorphism is K
  VARIANT 110..287: note = Derived polymorphism lacks residues 110 to 287
  VARIANT 34..287: note = Derived polymorphism lacks residues 34 to 287
MQKQFLQKSDVSPGVAEGKACAAADLSSLIASKEARSQNDINNDRPKTSLCHADSMKIKVSDELPVKQWTYCDHMSDLHSSFTSANNDIAKEMNEVLFKSLSADTSALDLLASSDLLSQRKIDLIGKERLGVRKTRLRLKEQILTMKFKTYRHLWKEDVRLLSTKKQRLKSNKRIDQNNRTSQIGSQRQRFSNHSRLAMPGRQRSAALDVGEVQDTGESVLLDVRERGVPLHVSLGVGGVEVVLGLEGEVPVHDAGAAGHLGGGGRVSGGLDDDPNDGFTSRLCVLI

SEQ ID NO: 165 - protein, 293 aa, Zea mays
  VARIANT 270..293: note = Derived polymorphism lacks residues 270 to 293
  VARIANT 256: note = Ancestral polymorphism is G, Derived polymorphism is E
  VARIANT 253: note = Ancestral polymorphism is G, Derived polymorphism is R
  VARIANT 251..293: note = Derived polymorphism lacks residues 251 to 293
  VARIANT 236: note = Ancestral polymorphism is R, Derived polymorphism is C
  VARIANT 232..293: note = Derived polymorphism lacks residues 232 to 293
  VARIANT 226: note = Ancestral polymorphism is V, Derived polymorphism is M
  VARIANT 205: note = Ancestral polymorphism is V, Derived polymorphism is M
  VARIANT 204: note = Ancestral polymorphism is A, Derived polymorphism is V
  VARIANT 179: note = Ancestral polymorphism is S, Derived polymorphism is I
  VARIANT 172: note = Ancestral polymorphism is D, Derived polymorphism is Y
  VARIANT 169: note = Ancestral polymorphism is R, Derived polymorphism is H
  VARIANT 161: note = Ancestral polymorphism is A, Derived polymorphism is V
  VARIANT 136: note = Ancestral polymorphism is P, Derived polymorphism is L
  VARIANT 132..293: note = Derived polymorphism lacks residues 132 to 293
  VARIANT 120..293: note = Derived polymorphism lacks residues 120 to 293
MSLLFARLGVPRILRRTHRNTPQPSDAIHASFSGSPRMGARPRSRSALPRLSFLPRRRPRPRLICLLPDAAEVVAVAPPVHCTAPEPPSCISEFGSEAPRDSQSSSLDLAVEVVGPLDQRASRCRAADSPTRAKEPDMRPRLVLFGDSITELSFASGGWGAALTDRFARQADMVLRGLSGYNTWWALKVLPWAMEGAAGADPAAVTVFFGANDASLPDQVQVHQHVPLKEYQSNLRAICAYFKVKLWAYLGFGCLGLVAHLSVAWVLRSQERWPSTAVILITPPPIYEPARIR

SEQ ID NO: 166 - protein, 171 aa, Zea mays
  VARIANT 43..171: note = Derived polymorphism lacks residues 43 to 171
  VARIANT 80..171: note = Derived polymorphism lacks residues 80 to 171
  VARIANT 141: note = Ancestral polymorphism is V, Derived polymorphism is I
MGSNLREILDNVSYPEILLSFPNAKKKKRIESKEKAILEFYQQLVRKIIHQVDEKIHGRSTRPYSLVTQQPIRGRAKQGGQRIGEMEVWALEGFGVAHILQEILTYKSRHLIARQEILNATIWGKRVPNHEDLPESFRVLVRELRSLALEMNHFLVSKKNFEVNREDVRSE

SEQ ID NO: 167 - protein, 116 aa, Zea mays
  VARIANT 4: note = Ancestral polymorphism is S, Derived polymorphism is P
MLESIRVERAKYSLMCFQFPVGRIHRQLKQMIQANGRVGATTTVYSAAILEYLTAEVLELAGNASKDLKLKRITPRHLQLAICGDEELDTLIKGTIAGGGVIPHIHKSLINKSSKE

SEQ ID NO: 168 - protein, 195 aa, Zea mays
  VARIANT 136..195: note = Derived polymorphism lacks residues 136 to 195
  VARIANT 80..195: note = Derived polymorphism lacks residues 80 to 195
  VARIANT 74: note = Ancestral polymorphism is P, Derived polymorphism is L
  VARIANT 45: note = Ancestral polymorphism is G, Derived polymorphism is D
  VARIANT 40: note = Ancestral polymorphism is I, Derived polymorphism is M
  VARIANT 21: note = Ancestral polymorphism is R, Derived polymorphism is W
  VARIANT 14: note = Ancestral polymorphism is C, Derived polymorphism is Y
MMHLPNLPLALLGCSFQKTFRVLTILDQLSMMRSFFASNIVTCVGQIIGIVVADTHDNAKTAANKVHIEYCELPAILSIEEAVMIGSFHPNTKKCLVKGDVEQCFLSGACDRIVSGQVHVGGQDHFYMEPQCTLVWPVDSGNEIHMVSSTQVCSLSLFSTASNSQWKAQVLERAWLLSSPNLRLPHPLLLLFGWF

SEQ ID NO: 169 - protein, 68 aa, Zea mays
  VARIANT 23: note = Ancestral polymorphism is V, Derived polymorphism is A
  VARIANT 25: note = Ancestral polymorphism is A, Derived polymorphism is V
MVAMSSWAVLVTVVLMQCCNVIVAARPLPMESPAVATADGGWLEMIMQVLQGPGSNNHNCQASNGSCP

SEQ ID NO: 170 - protein, 328 aa, Zea mays
  VARIANT 41..328: note = Derived polymorphism lacks residues 41 to 328
  VARIANT 71..328: note = Derived polymorphism lacks residues 71 to 328
MRKNEVSKEYFLKTVRNIVGDKSCFTISNAVGGPTAPFRPQMADSNPRAHLIQGAATTVSGSVPTRSIVSGNAPVNQALGSSKVSAGMESQSQQLSAPKPLAATSLSQTQSLGIQEEPKIQGKKQLLFESLPATDLKYWSLERKLCQPLLITEKMFAYRETVLEEAHRGMELREHCRHIVDNDDRHYRFHSLCVHQGYCDRDGHLGARTISWAKEHGAAATISFVNNPNLCGPGTTKPCPDAPPFSPPPPYNPTTPMQSPGSSSSTTGAIVGGVAAGAALLFAVPAISFAYWRHRKPQEQAFFSMYLASKLVFDYYLSRNIRANNVYM

SEQ ID NO: 171 - protein, 94 aa, Zea mays
  VARIANT 53: note = Ancestral polymorphism is S, Derived polymorphism is P
MLVQSTGTDLYLLPALPRNKWPQGYVKGLKARGGVTVNISWKEGSLHEALLWSSGGQNTLSRLHYGDQIATVSLSSGQVYRFSMDLKCLKTWPL

SEQ ID NO: 172 - protein, 139 aa, Zea mays
  VARIANT 67: note = Ancestral polymorphism is L, Derived polymorphism is P
  VARIANT 94: note = Ancestral polymorphism is I, Derived polymorphism is R
MEGSPLSTRICHLLFGCRQWKNSRAAIPEAMEQQTISIAKAAITIVLILGTSVLAAVNPIAGCYDALKFPRGRNIVGCRSQGTPDILSVLCIVICQKLIGDYDRVSLPTKHPQNLIISSEKAKSIVQDITKVRLENSLV

SEQ ID NO: 173 - protein, 270 aa, Zea mays
  VARIANT 149: note = Ancestral polymorphism is Q, Derived polymorphism is H
  VARIANT 251: note = Ancestral polymorphism is D, Derived polymorphism is Y
MAKPSDSSHHGVVDNSSNGSQARREEAGKLGPSWYFSRREIEENSPSRRDGIDLKKESSIRKLYCKFLQELGMALKMPQVTIATAMVFCHRFYLRQSLAKNDRRIIATVCIFLAGKVEETPKPLKDVIVVSYGIINKNDPKASQRIKQQKEIYDKQKELILLGERVVLVTLGFDLNINHAYKPLVEAIRRFNIDKRSPLPQVAWNFVNDGLRTSLCLQFEPHHIAAGAIYLAAKFLKVNLPSDGDKIWWQDFDVTPRQLEDCSSKFLRLI

SEQ ID NO: 174 - protein, 309 aa, Zea mays
  VARIANT 216..309: note = Derived polymorphism lacks residues 216 to 309
  VARIANT 200..309: note = Derived polymorphism lacks residues 200 to 309
  VARIANT 189: note = Ancestral polymorphism is V, Derived polymorphism is G
  VARIANT 108: note = Ancestral polymorphism is P, Derived polymorphism is H
  VARIANT 103..309: note = Derived polymorphism lacks residues 103 to 309
  VARIANT 69..309: note = Derived polymorphism lacks residues 69 to 309
  VARIANT 65..309: note = Derived polymorphism lacks residues 65 to 309
  VARIANT 53..309: note = Derived polymorphism lacks residues 53 to 309
MVAMMHGLRRMFVAHNSKSWAHRDEQSTAFASTSTSVSPNIRAASTLHNSPIRENAVLKRGVAIQHERQKEFDVRTQEVDSLKEMVNCDTWFDADKHLKQAQQNNSMPVRVHTHMVLPRLRIHPRSHPALHPAGSPAALPQPAALLRSIPPSIHRQPRILASLTSSAGEGFDVTKSGDARVGLVGIPSVGKSTLLNKLTWTFSEVQIQLQLTIEAQGRYLQMIIEEQQKLGGSIKASEDQKLSDSPPSLDDYPEIMQPSPKKPRIDALSPDSERDTTQPEFESHLIGPWDHGIAFPLEEFKADPTMSKS

SEQ ID NO: 175 - protein, 85 aa, Zea mays
  VARIANT 4: note = Ancestral polymorphism is T, Derived polymorphism is K
  VARIANT 14: note = Ancestral polymorphism is V, Derived polymorphism is A
  VARIANT 24: note = Ancestral polymorphism is D, Derived polymorphism is Y
MASTMAATMVKAAVVAVLLMQCCDVILGARPLLHAAAGWQHGQGAGTATVMQVLDKGSSGGRGPGNGNCDWTRPGHPGCPPKPSS

SEQ ID NO: 176 - protein, 504 aa, Zea mays
  VARIANT 15: note = Ancestral polymorphism is H, Derived polymorphism is R
MPVPPAQQRTLPLPHFTLPPLTGQDHLFVAALRSHLSASPPPAVASLSRFLPGITPLRFSHLVVLLAGRVRPPHNLLTALLPSPPPSLPLAILLHSLPPRRCAELLTSVLPSVSPRAFPDLLHHVILTARLAAGTQRAAVVPAIDVLFSSCARDKKLSWATLTYRAMRAHGMFPTVESCNVFISGALRLRRPEIAISFFREMRRCRVSPNVYTVNMVMRAKCALGRVVDAAQLLDEMPCWGFSRTAASFNTLIAAYCHDSGGMETVLRLKERMEREGLVPNEVTYNTIVHGLCKEGRMHQARRIVNEMRVKGVTPNTITFNTLIHSYVTLGDNEVAMKMHEEMMKAGLSADLVTYNALILGLCNEGKTWKASQLVQELCAAKLEPNASTFSALIIGQCKKQNPERALDLLNAMKKAGFQPNYYTYSILISTFSKNKDFEGAIDVLKDMLMRCIAPDKALLHEFFEGLSKAKKLHLAADLRSVANGTRFISDIYYTDDYRNIDEE

SEQ ID NO: 177 - protein, 112 aa, Zea mays
  VARIANT 93: note = Ancestral polymorphism is S, Derived polymorphism is C
  VARIANT 81: note = Ancestral polymorphism is N, Derived polymorphism is S
  VARIANT 80: note = Ancestral polymorphism is A, Derived polymorphism is V
  VARIANT 78..112: note = Derived polymorphism lacks residues 78 to 112
  VARIANT 65: note = Ancestral polymorphism is Y, Derived polymorphism is H
  VARIANT 54: note = Ancestral polymorphism is D, Derived polymorphism is H
  VARIANT 52: note = Ancestral polymorphism is P, Derived polymorphism is T
  VARIANT 21: note = Ancestral polymorphism is N, Derived polymorphism is K
  VARIANT 14: note = Ancestral polymorphism is V, Derived polymorphism is I
  VARIANT 10..112: note = Derived polymorphism lacks residues 10 to 112
  VARIANT 3: note = Ancestral polymorphism is C, Derived polymorphism is R
MKCDDDTFVRVDVILRHIKLNNGDKPLYMGNLNLLHRPLRTGKCAVTNEEWTEDIYPPYANGPGYLISGDIAKFIVSQHANRSLRLFKMEDVSMGLWVEKFNATKPVQYSHS

SEQ ID NO: 178 - protein, 119 aa, Zea mays
  VARIANT 79: note = Ancestral polymorphism is P, Derived polymorphism is L
  VARIANT 65: note = Ancestral polymorphism is R, Derived polymorphism is Q
  VARIANT 64: note = Ancestral polymorphism is L, Derived polymorphism is M
  VARIANT 57: note = Ancestral polymorphism is P, Derived polymorphism is L
  VARIANT 56: note = Ancestral polymorphism is V, Derived polymorphism is A
  VARIANT 51: note = Ancestral polymorphism is Q, Derived polymorphism is K
  VARIANT 50: note = Ancestral polymorphism is Y, Derived polymorphism is N
  VARIANT 47: note = Ancestral polymorphism is V, Derived polymorphism is I
  VARIANT 46: note = Ancestral polymorphism is G, Derived polymorphism is C
  VARIANT 43: note = Ancestral polymorphism is D, Derived polymorphism is Y
  VARIANT 19: note = Ancestral polymorphism is P, Derived polymorphism is H
  VARIANT 13: note = Ancestral polymorphism is D, Derived polymorphism is N
  VARIANT 10: note = Ancestral polymorphism is T, Derived polymorphism is I
MTIVVMLLNTDVDVSPIVHAFNNCFDNALNATVSELNFKTIVDGLGVVLYQYPFNVPAYYALILRSLTVLEDLALYADPDFKVLAASYPYFAKRLLTDPNPYLRDALIELVFQGWKIQA

SEQ ID NO: 179 - protein, 75 aa, Zea mays
  VARIANT 50: note = Ancestral polymorphism is S, Derived polymorphism is L
MVKAAAVAVLLMQCCDVILGARPLLHAVAGWQHGQGAGTTTVMQVLDKGSSGGPGNGNCDCTKPGHPRCPPPPSS

SEQ ID NO: 180 - protein, 75 aa, Zea mays
  VARIANT 14: note = Ancestral polymorphism is C, Derived polymorphism is S
  VARIANT 18: note = Ancestral polymorphism is I, Derived polymorphism is S
  VARIANT 25: note = Ancestral polymorphism is L, Derived polymorphism is R
  VARIANT 27: note = Ancestral polymorphism is A, Derived polymorphism is T
  VARIANT 30: note = Ancestral polymorphism is G, Derived polymorphism is E
  VARIANT 46: note = Ancestral polymorphism is L, Derived polymorphism is P
  VARIANT 47: note = Ancestral polymorphism is D, Derived polymorphism is A
MVRAAMVAVLLMQCCDVILGARPLLHAAAGWQHGQGAGTTTVMQVLDKGSTGGPGNGNCEWTKPGHPGCPPQPSS

SEQ ID NO: 181 - protein, 500 aa, Zea mays
  VARIANT 211..500: note = Derived polymorphism lacks residues 211 to 500
MALQTLNPYRHAAAVSPVPSPVPHRGHPPPHAVLHLPPRRRLAGGAARPLAVAAAVSGAVNEARRRGVPQEGGEDGRKDTDLATLGNLCVDVVLSVPQLPPAQQEERKAYMERLAASPPDQKFWEAGGNCNLAFAAARLGLNCSTLGHVGEEIYGKFLLDVLQAEGISVVGMLENTNAAACRQAYETLLCWVLVDPFQKHGFCRLEKCFLEQIHIHCCFVCDASRADFSKEPAFSWIRKLPVDIRTAIHHSKILFCNGYAFDEFFPDVIASSIDCAICSGTAVFFDPGPRGKSLLHGNLDEQRALEHALRLSDVLLLTSDEAESLTNIRNPVQAGQELLKRGIRTKQVVIKMGSRGSIMITKNTISCAPAFKIDVVDTVGCGDSFTAAIAFGFLHDLPAVNTLTLANAVGAATATGCGAGRNVARLDKVLQLMREADLNEDITLWTELTEGNSLRIEVSILSGIARNGFSENIVAVPVTKVVSEVLPMFEAVPVRSAVQA

SEQ ID NO: 182 - protein, 649 aa, Zea mays
  VARIANT 111: note = Ancestral polymorphism is R, Derived polymorphism is H
MAIPRRLSCLPTVAAATKWSAGNLAIDIGTIGARPSTAALAAAATAAAAAGRASECQSLLLRMSRRRGASRREIVSSLLASSPTPQPQVFDLLIRTYTQSRKPREAFEAFRLLLDHRVPVPASASNALLAVLSRAGWPHLAQEAYRLVLSSDSEVNAYTLNIMVHSYCKTLEFDGADTVISEMEKRCVFPDVVTHNVLIDARFRAGDVDAAIALVDSMANRGLKPGIVTYNSVLKGLCKHRRFDKAKEVFRTMDQCSVAPDVRSFNILIGGFCRVGEVKEAVKFYKEMQHRYVTPDVVSFSCLIGLFSRRGEMDHAGAYLREMKGLGLVPDGVIYTMVIGGFCRAGSMSEALRVRDEMVGFGCLPDVVTYNTLLNGLCKQHRLLDAEKLLNEMEERGVTPDLCTFTTLIHGYCRQGNFENALQLFDTLLRQRLRPDVVTYNSLIDGMCRKGDLAKANELWDDMHAREILPNHITYSILIDSHCEKGQVEDAFGFLDEMVKKGNLPNIRTYNSIIKGYCRSGNVKKGQQFLQKMRQDNVFPDLITFNTLIHGYIKEENMHGAFNVFNIMEKEMVRPDAVTYNMIINGFSEQGNMQDAGRVFKGMGDSGIEPDRYTYMSLINGHVTAGNSKQAFQLHDEMIHRGFAPDDKF

SEQ ID NO: 183 - protein, 190 aa, Zea mays
  VARIANT 6: note = Ancestral polymorphism is G, Derived polymorphism is R
MAARRGREWDGDEQGAALPTPAPLGAPVVCLLSSAGDLAAGAFVGSLVGYGKGLITNQGTKACLSIAGSSAKTFAALAGVQSFIMCLLRRLRGKDDMINAGMAGCCTGIALSFPGAPQAMFHSCVTFAAFSCIMDGLSKQQAAMALTLDVKSPTVKYEEGRVIPPFTLPPLLDALDPLGSFCQTLIKPKH

SEQ ID NO: 184 - protein, 918 aa, Zea mays
  VARIANT 561..918: note = Derived polymorphism lacks residues 561 to 918
  VARIANT 123: note = Ancestral polymorphism is L, Derived polymorphism is P
  VARIANT 117: note = Ancestral polymorphism is W, Derived polymorphism is R
  VARIANT 101: note = Ancestral polymorphism is P, Derived polymorphism is L
  VARIANT 39: note = Ancestral polymorphism is D, Derived polymorphism is Y
MGRWWPAALLGCAVAVVAVLAAAVVECAVTYDKKAVLIDGQRRILFSGSIHYPRSTPDVISCILQNLSFFFSPLLPRGGGEFMAVVSCVLDAMLSKANCFPTLAVPLYSTSLLVLKRVLIVFLFHQMWEGLIQKAKDGGLDVIQTYVFWNGHEPTPGNYYFEERYDLVRFVKTVQKAGLFVHLRIGPYICGEWNFGGFPVWLKYVPGISFRTDNEPFKTAMQGFTEKIVGMMKSENLFASQGGPIILSQATNSQIENEYGPEGKEFGAAGQAYINWAAKMAVGLDTGVPWVMCKEEDAPDPVINACNGFYCDAFSPNKPYKPTMWTEAWSGWFTEFGGTIRQRPVEDLAFAVARFVQKGGSFINYYMYHGGTNFGRTAGGPFITTSYDYDAPIDEYGLIREPKHSHLKELHRAVKLCEQALVSVDPTITTLGTMQEAHVFRSPSGCAAFLANYNSNSHAKVVFNNEQYSLPPWSISILPDCKNVVFNSATVGVQTSQMQMWGDGATSMMWERYDEEVDSLAAAPLLTTTGLLEQLNVTRDSSDYLWYITSVDISPSENFLQGGGKPPSLSVQSAGHALHVFVNGQLQGSSYGTREDRRIKYNGNVNLRAGTNKIALLSVACGLPNVGVHYETWNTGVGGPVVLHGLNEGSRDLTWQTWSYQVGLKGEQMNLNSVEGSGSVEWMQGSLIAQKQQPLAWYKAYFETPSGDEPLALDMGSMGKGQVWINGQSIGRYWTAYADGDCKGCSYTGTFRAPKCQAGCGQPTQRWYHVPRSWLQPSRNLLVVLEELGGGDSSKIALAKRSVSSVCADVSEDHPNIKKWQIESYGEREHRRAKVHLRCAHGQSISAIRFASFGTPVGTCGNFQQGGCHSASSHAVLEKRCIGLQRCVVAISPDNFGGDPCPSVTKRVAVEAVCSPAA

SEQ ID NO: 185 - protein, 98 aa, Zea mays
  VARIANT 71: note = Ancestral polymorphism is R, Derived polymorphism is C
  VARIANT 68: note = Ancestral polymorphism is R, Derived polymorphism is C
  VARIANT 64: note = Ancestral polymorphism is A, Derived polymorphism is S
  VARIANT 51: note = Ancestral polymorphism is T, Derived polymorphism is M
  VARIANT 43: note = Ancestral polymorphism is Q, Derived polymorphism is R
  VARIANT 39: note = Ancestral polymorphism is T, Derived polymorphism is K
MLRFVVDDEVVLPEFQKHCMSAEAWKAHNCIPDEHYIQTLLAQSGLEEELTRRSVTYSAWDLSASKDRERRGWHPVTYKVSDATPRLIKSIKSLIASK

SEQ ID NO: 186 - protein, 220 aa, Zea mays
  VARIANT 68: note = Ancestral polymorphism is S, Derived polymorphism is G
MATSEPVQESLVVHYSQPSRPRVLLAASGSVAAIKFESLCRSFSEWADVRAVATTSSLHFVDRSSLPSGIVLYTDDDEWSTWKKIGDEVLHIELRKWADVMVIAPLSANTLAKIAGGLCDNLLTCIVRAWDYSKPLFVAPAMNTLMWNNPFTERHLHTINQLGIALIPPVTKRLACGDYGNGAMAETSQIHTSVRLACKTQPHDASSSLAGPVSNNRPSS

SEQ ID NO: 187 - protein, 140 aa, Zea mays
  VARIANT 16..140: note = Derived polymorphism lacks residues 16 to 140
MDEDVIVKAVDCSNQSEVHMLMHATKVHYQCPKRVKYPIYDQTVYLNDYHKKMLKDQYGIPYLNTYDGRTIRYPDPLIKANDTIKIDLETNKIMDFIKFDVGNMVTGGRNTRRVGVIKHREKHKGSFETIHVLLGAFCYV

SEQ ID NO: 188 - protein, 221 aa, Zea mays
  VARIANT 27: note = Ancestral polymorphism is G, Derived polymorphism is D
  VARIANT 31: note = Ancestral polymorphism is S, Derived polymorphism is F
  VARIANT 37: note = Ancestral polymorphism is L, Derived polymorphism is M
MGQQRTLVYSFVARGTIVLADHAEVSGNFASVAAQCLQKLPANNNRFNYNCDGHTFNYHIHDGFTYCVVATESAGRQLPVGFIERVKDDFSKKYSGGKAKTANANGLKREYGPKLKEHMKYCDQHPEEIDKLAKVKAQVTEVKGVMMQNIEKVLDRGEKIELLVDKTEDLRAQAQDFRQQGTKIRRKMWWENMKMKLIVFGIVVALILLIVLTVCKDFDCW

SEQ ID NO: 189 - protein, 292 aa, Zea mays
  VARIANT 214: note = Ancestral polymorphism is P, Derived polymorphism is H
  VARIANT 272: note = Ancestral polymorphism is G, Derived polymorphism is E
MIDEREAAGLTLEFVFASFCGDGVSCCCSGVISSSQSRGPMERSVVSMRRLGRGRFLLPPRRGGSVCDAEKTNDGAPRPTEGSVVFLAAAEDGEPSFAHAVPFGGKNSNPTPRVVDPVRAVFAEWRDAAAPLPVSIKDASQPLAVEHMGVKGCFGEGKNVSLPVLEPLEVGVSGPSGEAANTKPPLEVGPVGVLGRSGAAKNANMFPAQLASDPPAEVGWRGRSPGSNENAARGTIGEMGGGGGVGGVDGVFGVVSKGGSSRSILLRTEEAGRRQRRLRLASAAQGAEKATA

SEQ ID NO: 190 - protein, 407 aa, Zea mays
  VARIANT 107..407: note = Derived polymorphism lacks residues 107 to 407
  VARIANT 49: note = Ancestral polymorphism is P, Derived polymorphism is S
MAMAPEPFFTPPPAPRHLAELRIDPAHHAVAFSAPCAADARRKRRCLLPASSVRKRILLELPPFDTTPNTPSTPPTPPPPPISPMVPRAAFSFEPGLRPRQPTSAGGSEASCAGNMFAFLAAPERPNTPTGPTSRGGFVFAASPEGPLTPTSRGSNTGRLTFLPSPKQPLTPMCSTASGCEASLMLTGSGAAASLHSAKTARTGSTTRGVGFEFFPPKGTACAKLGSPSSAAAKKTTLPSVGLGAPSFVFSASQTLPPRRGGSRKRPRPNLRIETTDRSMGPRLWEEDMTPLQQQLTPSPQKLAKTNSNVNPAASRSSIMSEPCCAFFASPGKAAKQEAKKAPSEASRSPAGSRCTSSKARTSSPENPRKPEQEVEVSSAICSGAELLLRVTCKCGVHKEFSFDHGV

SEQ ID NO: 191 - protein, 1093 aa, Zea mays
  VARIANT 604..1093: note = Derived polymorphism lacks residues 604 to 1093
MATTEARRLAVVPQLDIEQILKEAQHRWLRPAEICEILKNYRNFRIAPEPPNRPPSGSLFLFDRKVLRYFRKDGHNWRKKNDQKTVKEAHERLKSGSIDVLHCYYAHGEENINFQRRTYWMLEEDYMHIVLVHYLETKVLFQHCLLSYMFSSWFMSCFLFQMLKKKDFSRFCWNRNFASPILLLQEVAYNPFPPFDDVNHFQGGKSSRARGNNIIQEAAVGSPSQIMEVESSLSGQASEYEEAESGRKISKAKFGAADIYSGGAGYDSFTWMQQHENGTGPVIDSSLFSSYTPASSIGNYQGQHATQNKSFYPVNQHNGPLILNGSSDMLGTNGRANQTDLPSWNSVIELDEPGQMPHLQFPVPSDQGATTEGLGVDYLTFDEVYSDGLSLNDIGAAGTHGKSYLQFSSATGDLSATENSLPQQNDGSLEEAAIGYPFLKTQSSNLSDILKDSFKKTDSFTRWMSKELPEVEDSQIHSSSGGFWSTGEANDIIEASSHEPLDQFTVSPMLSQEQLFSIVDFAPNWTYVGSKTKILVAGNILNDSQITERCKWSCMFGEVEVPAKILADGTLICYSPQHKLGRVPFYITCSNRLACSEVREFEFRPTVSQYMDAPSPHGETNKVYFQIRLDKLLSLEPDEYQATVSNPSLEMIDLSKKISSLMASNDEWSNLLKLAVDNEPSTADHHDQFVEKLIKEKLHVWLLNKVGMGGKGPSVLDDEGQGVLHLAAALGYDWAIRPTLAAGVNINFRDVHGWTALHWAAICGRERTVVALIALGAAPGALTDPTPDFPGSTPADIASANGQKGISGFLAESSLTSHLQALNLKEANMAQISGLPGIGDVTERDSLHPPSGDSLGPVRNAAQAAARIYQVFRVQSFQRKQAAQSEDDKGGMSDERALSLLSVKPPKSGQLDPLHSAATRIQNKFRGWKGRKEFLLIRQRIVKIQAHVRGQQVRKHYRKIVWSVGIVEKVILRWRRRGAGLRGFRSTEGSVESSNGGTSSSSIQDKPSGDDYDFLQEGRKQTEERLQKALARVKSMAQYPEARDQYHRILTVVSKMQESQAMEEKMLEESAGMDFMSEFKELWDDDTPIPGYI

SEQ ID NO: 192 - protein, 358 aa, Zea mays
  VARIANT 86..358: note = Derived polymorphism lacks residues 86 to 358
MPPLSPPASLTPAAGGRRRWKCRLSPTIARDRCYTRSFRSAGLRPAAIPLPDGAVVHLWLPPPAADPAKPLYPVLLLHGFGAQATWQWAPFLGPLLAAGLAPYVPDLVFFGASSSPAADRSPVYQAACVAAAMAALPGAPQRYAVVGVSYGGFVAYHLAHAFPAAVERLVLVAAGVCLEEADLAAGLFAVEDIAEAASLLLPQRPEDLRRLVGLTFCRPQRFMPSCFIRDYIRVMCTENVKEKRELLYALINGRKLSDLPKINQQTLIIWGEQDRVFPLELGLRLKRHLGDTSELIIVKNAGHAINREKPAELCRLIKHYIVDPSVKCRDDRKGSWKNAIKRFVGSSLRKVDSSRPLL

SEQ ID NO: 193 - protein, 621 aa, Zea mays
  VARIANT 88: note = Ancestral polymorphism is P, Derived polymorphism is A
  VARIANT 119: note = Ancestral polymorphism is P, Derived polymorphism is L
  VARIANT 279..621: note = Derived polymorphism lacks residues 279 to 621
  VARIANT 298..621: note = Derived polymorphism lacks residues 298 to 621
MTLSLRRKQLDVIVRMLHLNQQQLPNGGEGQGEDDAYKILVMDPPCISILSPVLKLGDLRHQGVTLTLAIDRPRQAVPDAPAVYFVRPTPGNVDRVAADAAAGLYGSFHVNFSTSVPRPLLERLATACAAAPPACAGRVARVADQYIDFVCIEDDLFSLAQPRAYVALNDPAAADADITALVDAVALGLFCVVATLGVVPVISCARGGPAEMVAGALDARLRDHLLAKPNLFTEAASAAVTSFQRPVLCLFDRNFELSVGVQHDWSYRPLVHDVLGLKQNKLKLPAEKYELDDSDKFWVANSWSPFPKVAEEIEAQLAKYKQDVDEVNQHTGGGKVGVEFDGTDLIGNTKHLMNAVNSLPELTERKNMIDKHTNIATSLLGHIKERSLDGYCSCENDMLVSGTVDRNTLLSLIRGKGTKEDKLRLAVTYLLSFATPPSSELEQVEAALRESEVDMSAFQYVKRIKALLNTQFAAASGTATKSNIVDWAEKLYGQSIGAVKNLLSDSRQLALTRTVEALMEGKPNPEVDDYLLFDPRAPRSGTSGQFKGPFREAVVFMIGGGNYIEYKSLIELKQRSQPSKHVIYGATEILSGAEFIHQLAELGQKAGLGGGSSNIPPGSAQ

SEQ ID NO: 194 - protein, 207 aa, Zea mays
  VARIANT 73: note = Ancestral polymorphism is A, Derived polymorphism is P
  VARIANT 163: note = Ancestral polymorphism is N, Derived polymorphism is K
MSSLVRSFGSLYSQKLRSTTRLGSATAAPPRFQALVRSGFSGSSHGGDVRRPPARPSQHQSQDKERTPFFILARLAVGSILAAAAPMLHSRWASFLLIQSRAKSPVPRAAKLCTDAKFNSAPMPSGEVDMVKDTAEVVAEAVEDAATVAEKVSSEVAEQLPENGRLRTAVVLLEHASKEVAEEAHLAQNIIHKVHTSLQCHMFACGA

SEQ ID NO: 195 - protein, 127 aa, Zea mays
  VARIANT 112: note = Ancestral polymorphism is S, Derived polymorphism is I
MARVAAVLVALLALFAVAATAQAPAASPKRAPAPAPPKMAPLPPPPTRAPMASPPSPPTMSPASAPSADAPATSPAGAGFGDAMAPAGASALTPAAAPVTEKSTAASASAISFVAIAGAVAAAAVVF

SEQ ID NO: 196 - protein, 184 aa, Zea mays
  VARIANT 100: note = Ancestral polymorphism is R, Derived polymorphism is C
MRVLGVVPTALLIAAVAALADVGAGIMSILAASIVDASIMSIPAAMRVLGVVPAALLIAAVAALADVSVEFMLRYTGWAAGGGKEAATSYAGTMGNAFGRADAALLNVFVVLTTTGTLVVYLIIIGDVMSRSVSGGDEQPGCCRSCLVRGGGRGGSLCCSSPPSSFCCRSCSAAMSVSCSHLVY

SEQ ID NO: 197 - protein, 738 aa, Zea mays
  VARIANT 216: note = Ancestral polymorphism is G, Derived polymorphism is R
  VARIANT 207: note = Ancestral polymorphism is P, Derived polymorphism is L
  VARIANT 203: note = Ancestral polymorphism is T, Derived polymorphism is P
  VARIANT 195: note = Ancestral polymorphism is P, Derived polymorphism is S
  VARIANT 179: note = Ancestral polymorphism is T, Derived polymorphism is I
  VARIANT 170: note = Ancestral polymorphism is S, Derived polymorphism is F
  VARIANT 158: note = Ancestral polymorphism is H, Derived polymorphism is N
  VARIANT 146: note = Ancestral polymorphism is C, Derived polymorphism is R
  VARIANT 129..738: note = Derived polymorphism lacks residues 129 to 738
MVVIQGGIGPAGLSAEDLHVLDLKQQRPRWHRVVVQGPGPWKTTPGRCMALDTTAKPYEWRKLEPEGEGPPPCMEMETEVSARDVMAMKDHIDLEASQSQQPRKLPPKDLKEIAGSFWLVASMFSKKWQNWRGKQYNFGECKLCFCLSASVAISDLNHTLLQGSTNVGKSAFISAMLRTMAYKDPVAATAQKYKPIQSVVPGTTLGPIQIESFLGGGWHLACEPVEPVRRGSAAAVPDQRMLAAVASRTRNKSATTVLSLAMPFLLSAASASTTTNPHPLSPFPRSQNNSRVHRLQLPARRLPSFPAVAPGASFAPLPQRLGMASLAASAAAAAEVTHLTQRDAAEIDEQLMGPLGFSVDQLMELAGLSVAAALAEVYKLNEHARVLVICGPGNNGGDGLVAARHLYHFGYRPSICYPKRTPKPLYSGLVTQLESLSIPFIPVEDLPNELPREFDVIVDAMFGFSFHGTPRPPFDHLIQMLVSLSDIQNPDKRPAIVSIDIPSGWHVEEGDVDGGIKPDMLVSLTAPKLCAKKFTGPHHFLGGRFVPPPILNKYGLQLPPYPGTSMCVRIGKAPSVEISSLRENYISPELLESQVMSDPFDQFLKWFDEAVTAGLREPNAMALTTANKEGKPSSRMVLLKGVDKQGFVWYTNYGSRKAHDLCENPNAALLFYWNEMNRQVRVEGSVEKVPEAESDKYFHSRPRGSQLGAIVSKQSTVIAGREVLQQDYKKLEQKYSDG

SEQ ID NO: 198 - protein, 198 aa, Zea mays
  VARIANT 151: note = Ancestral polymorphism is G, Derived polymorphism is R
  VARIANT 142: note = Ancestral polymorphism is P, Derived polymorphism is L
  VARIANT 138: note = Ancestral polymorphism is T, Derived polymorphism is P
  VARIANT 130: note = Ancestral polymorphism is P, Derived polymorphism is S
  VARIANT 114: note = Ancestral polymorphism is T, Derived polymorphism is I
  VARIANT 105: note = Ancestral polymorphism is S, Derived polymorphism is F
  VARIANT 93: note = Ancestral polymorphism is H, Derived polymorphism is N
  VARIANT 81: note = Ancestral polymorphism is C, Derived polymorphism is R
  VARIANT 58: note = Ancestral polymorphism is E, Derived polymorphism is K
  VARIANT 56..198: note = Derived polymorphism lacks residues 56 to 198
  VARIANT 39..198: note = Derived polymorphism lacks residues 39 to 198
  VARIANT 31..198: note = Derived polymorphism lacks residues 31 to 198
  VARIANT 22..198: note = Derived polymorphism lacks residues 22 to 198
  VARIANT 19: note = Ancestral polymorphism is R, Derived polymorphism is C
  VARIANT 15: note = Ancestral polymorphism is R, Derived polymorphism is H
  VARIANT 11: note = Ancestral polymorphism is S, Derived polymorphism is L
  VARIANT 10: note = Ancestral polymorphism is P, Derived polymorphism is S
MPPPEKPSKPSFLRRSRFRLGEASSEFAGGQRSCDTDPQFSLDADRMSVSDMGFSWDEPRASAEMYIYWQYNFGECKLCFCLSASVAISDLNHTLLQGSTNVGKSAFISAMLRTMAYKDPVAATAQKYKPIQSVVPGTTLGPIQIESFLGGGNMCLIEFYTSSWKRKPHQVIIFRNDVSESQFNLVLNIELQQIIDGD

SEQ ID NO: 199 - protein, 110 aa, Zea mays
  VARIANT 14: note = Ancestral polymorphism is C, Derived polymorphism is Y
  VARIANT 22..110: note = Derived polymorphism lacks residues 22 to 110
  VARIANT 22: note = Ancestral polymorphism is W, Derived polymorphism is C
  VARIANT 31: note = Ancestral polymorphism is S, Derived polymorphism is Y
  VARIANT 34: note = Ancestral polymorphism is R, Derived polymorphism is Q
  VARIANT 38: note = Ancestral polymorphism is R, Derived polymorphism is C
  VARIANT 42: note = Ancestral polymorphism is D, Derived polymorphism is N
  VARIANT 43: note = Ancestral polymorphism is G, Derived polymorphism is D
  VARIANT 73: note = Ancestral polymorphism is C, Derived polymorphism is Y
MSLTDMRSASKENCGSVSHERWPPANSELASPRRKRLRRRNDGLDGFSGGGIVAALLPTASYFLSFYLPLQFCHFLLNIEATSQKLPAISLRSLGGSFLGCCDCEASRSM

SEQ ID NO: 200 - protein, 160 aa, Zea mays
  VARIANT 155..160: note = Derived polymorphism lacks residues 155 to 160
MVVIQGGIGPAGLSAEDLHVLDLKQQRPRWHRVVVQGPGPWYGHVMALVCQRFLLIIGGNDGRKLLMKTTPGRCMALDTTAKPYEWRKLEPEGEGPPPCMEMETEVSARDVMAMKDHIDLEASQSQQPRKLPPKDLKEIAGSFWLVASMFSKKWQNWRGK

SEQ ID NO: 201 - protein, 506 aa, Zea mays
  VARIANT 196: note = Ancestral polymorphism is A, Derived polymorphism is D
  VARIANT 51: note = Ancestral polymorphism is Y, Derived polymorphism is H
MHAMAWWGGEEGEPLFPSVDKCDASRLGRDSTLVADLDGALLRSPDAFPYYALVAFETGGAARLALLLLLAPLAAALRRAVSESAGERVLVFAATAGARVANVESAARAVLPRFYAADVRRDAWRVFSACGGRRLVLTAAPRVMAEPFLRRYLGADAVAGTELAAWRGRATGWVDARRGGVLVGESKAQALRQMLDAGEVPDVGLGHRRSDYAFMSFCKEAYLVPRTPVEAVRADELPKRVVFHDGRLVQRPTPLVALLTVLWFPVGLLLSLVRVAAGVLLPMRWLRVAFHALGVRVVVRGTPAAAAAAATRTGVLFACSHRTLLDAVFLSVALGRPVAAVTYSLSRLSEFLSPIRTVRLTRDRAADAATIGRVLAEGDLAICPEGTTCREPFLLRFSALFAELTDAVVPVAVECRMGMFHGTTARGWKGMDPFYFFMNPSPVYTITFLDRLPPELTCGGGNKSGHWVANYVQRLIASTLSYECTGLTRKDKYRELADNDGLVLNF

SEQ ID NO: 202 - protein, 320 aa, Zea mays
  VARIANT 233: note = Ancestral polymorphism is V, Derived polymorphism is A
  VARIANT 194: note = Ancestral polymorphism is P, Derived polymorphism is A
  VARIANT 64: note = Ancestral polymorphism is A, Derived polymorphism is V
MESLGVLLLHPLDTYLEQELDRRCRLLRLWEVPHDRRGEFLRAHASSIRAVVIGGGSGFGGNPALIDDLPRLEIIACYAVGYDCVDLTRCRERGVRVTNTPDVLTDDVADLAVGLAIAALRRIPHADSYVRAGLWKANDGHYGLTTRFSGKRVGIIGLGRIGLSIAKRVEGFGCPVCYYQRTRQDAYPNYIYLPTVLQLAANSDVLVVACSLNEQSRGIVSREVIEALGPTGVLVNVGRGAHVDEPELVAALADGRLGGAGLDVFQAEPDVPQALMALDNVVLAPHMGSGTHETRKAMADLVLANLEAHALNMPLLTPVV

SEQ ID NO: 203 - protein, 262 aa, Zea mays
  VARIANT 159: note = Ancestral polymorphism is S, Derived polymorphism is F
MSRGRRKQTVESNEDYLSEDHVGQKNSQKTLAHESDSEMEKESFVVGGHQSGDVSEMEPNSKNPTDMDADIEVEVEEENVEVKRQGIIGKFFGMVARNGNLCSLSYKDWRLLIDDTEGNFTIVFIICMQRRFLYPARMEKWVLKTIGERWRQHKSNLKSIYYDAHKGLEANYNKVPHRVIADQWIALVNHWVTTKSKDISMANTNNCGKKDYPYSRHKEFSLGLERIWYFYSNYTCEEHAFYDHTSLTNLYYLTCTIEGKRS

SEQ ID NO: 204 - protein, 353 aa, Zea mays
  VARIANT 119..353: note = Derived polymorphism lacks residues 119 to 353
  VARIANT 137..353: note = Derived polymorphism lacks residues 137 to 353
  VARIANT 159: note = Ancestral polymorphism is H, Derived polymorphism is Y
  VARIANT 329: note = Ancestral polymorphism is K, Derived polymorphism is M
MADESWRVPTPVQELAAGVVEPPTQFVLQEQDRPGSGTLLFATDMPEPIPVVDLSRLAAADEASKLRSALETWGLFLVTKHGIEASLMDDVMAASRDFFYQPLEAKQEYSNLIGGKRFQMEGYGNDMVKSKDQILDWQDRLQLRVEPQDERNLAYWPKHPDSFRDLLEKYASKTKIVRNKVLRAMGKTLELGEDYFISQIGDRASAIARFNYYPPCPRPDLVFGIKPHSDGGAVTILLVDKDVGGLQVQKDGVWYTVPSMPHTLLVNLGDSMEIMNNGIFKSPVHRVVTNAEKERLSLAMFYGVEGQRVLEPALGLLGEERPARYRKIMASDYIIGLRQGIAEGQRFIETLKI

SEQ ID NO: 205 - protein, 68 aa, Zea mays
  VARIANT 40: note = Ancestral polymorphism is L, Derived polymorphism is F
MDDMDTQVKLAVVVKVMGRTGSRGQVTQVRVKFLDDQNRLIMRNVKGPVREGDILTLLESEREARRLR

SEQ ID NO: 206 - protein, 332 aa, Zea mays
  VARIANT 266: note = Ancestral polymorphism is Q, Derived polymorphism is H
  VARIANT 259: note = Ancestral polymorphism is T, Derived polymorphism is K
  VARIANT 252: note = Ancestral polymorphism is I, Derived polymorphism is T
MLRLEQYLRLLPATSHATAPALISGYSFLSSPLPRLSALRLARSRPPPLRGKTSSPVRASAEPDSTVKRAPEMAQREVARVVADQAVARLGARLLPSAVPADVVEFRNAAGNAVGSLDVQRGSPGSSIDFMLQSSLHCEVPNGAIDITSILIFLNASTDAPHFLLELIQGSSTSMVVILDLLPRKDLAFHPDYLQKYYEETGMDEQRRKIEELPQARPYRSPSLFVRSACSPTAIMVSIDCGQGGEKALEEIIHGQLAKVIQEALQTWLDNCVDSTIEMDEAERDCLLKRDRIVRSKSIEVDLTANLPRMFGPDVSSRVITEIRKAFGVQEP

SEQ ID NO: 207 - protein, 720 aa, Zea mays
  VARIANT 9..720: note = Derived polymorphism lacks residues 9 to 720
MATAAWAAWLLILTCFGAWTPRQILVAAATDANDVTALNTLFTSMNSPGQLQGWKVSGGDPCGESWQGITCSGSSVTAIKLPNLGLSGNLAYNMNTMDSLVELDMSHNNLGGGQQIPYNLPNKKLERLNLAENQFSGSVPYSISTMPNIKYLNLNHNQLSGDITDIFSNLPSLTTVDLSSNSLTGNLPQSFTSLSSLKTLYLQNNQLTGSINVLANLPLDDLNVANNRFTGWIPEELKKINSLQTDGNSWSTGSAPPPPPFTAPPRSRNRRKSPGQHSNGSNNSSSGGSSSIGAGAIAGIIISVLVVGALVAFFLIKRNKRKSAMPEHYEQRQPFNSFPSNEVKNMKPIEEATTVEVESLPSPAAVNLKPPPKIERNQSFDDDDFANKPVAMKSNAAAAPVKATVYSVADLQMATDSFNMDNLIGEGTLGRVYKAQFSDGKVLAVKKLNSTTLPRQSSDDFYELVSNISKLHHPNLSELVGYCMEHGQHLLVYDFHRNGSLHDMLHLSDDYNKPLSWNSRVKIALGSARALEHLHEICSPSIIHKNFKSSNILLDTELNPHISDAGHSSFVPDAEFQASDQGSGYSAPEVEMSGQYTLKSDVYSFGVVMLELLTGRKPFDSSRPRSEQSLVRWATPQLHDIDALDQMVDPALKGLYPAKSLSRFADVIALCVQPEPEFRPPMSEVVQALVRLVQRANMTRRMLDGEEASRRPDDQEQEFV

SEQ ID NO: 208 - protein, 361 aa, Zea mays
  VARIANT 169: note = Ancestral polymorphism is P, Derived polymorphism is H
  VARIANT 270: note = Ancestral polymorphism is A, Derived polymorphism is S
  VARIANT 295: note = Ancestral polymorphism is A, Derived polymorphism is V
  VARIANT 298: note = Ancestral polymorphism is G, Derived polymorphism is R
MKSRVALEPLAEEPGCGEEDAARRRSGLHAALHRWARLLSGGVAGDDARPAADLRVLLSVLACPLSPVPLLPRLPRHVASSAQYIIEQFRATTGCGKLEDGAVKSMYASGRVRLSMLQEPGGGGGGGRGHEGSFVLWQLAPSMWLVEMSVAGQSVAAGSDGRVAWRRTPWLGAHAARGGSRPLRRALQGLDPVTIASIFSTAEHAGEKEVDGEDCFVLRLDVGPSVLSSWSDGTAEVIRHGLTGFFSQRSGLLARLEDSQLTRIQSPGAAAMYWETTIASAVSDYRAVDGGVAVAHAGTSTAHLARFGVGVRAARVVTRMEESWTIDDVAFNVPGLGPDAFIPPEEVRRSRSYGAAIAGGK

SEQ ID NO: 209 - protein, 742 aa, Zea mays
  VARIANT 434..742: note = Derived polymorphism lacks residues 434 to 742
  VARIANT 432..742: note = Derived polymorphism lacks residues 432 to 742
  VARIANT 134: note = Ancestral polymorphism is R, Derived polymorphism is W
  VARIANT 109: note = Ancestral polymorphism is A, Derived polymorphism is V
  VARIANT 93..742: note = Derived polymorphism lacks residues 93 to 742
  VARIANT 85..742: note = Derived polymorphism lacks residues 85 to 742
  VARIANT 51: note = Ancestral polymorphism is P, Derived polymorphism is L
MSLLRNRRAAATVAAAAAAAGGGGYPEPPAYNIIPIHDVVMQGEHPSLRFPEVRAAVEALAHAADLPPPPLARAWDAFRADLFDWLGATFDFQLDNVRNQREHLVLLLANAQLRAGGTLPTDHPADVLHHSIARDIRRKLLKNYKTWCSYLGKRPHVHVPSGGRRVAQGVGPDTRRDLLYTALYLLIWGEAANLRFMPECLCYIFHYMALDLNHVIDQSIDIETGRPSVPAVHGVDAFLDKVVKPTYDVLEAEVKFSRNGTKPHSAWRNYDDVNEYFWSRRVFRRLQWPLSPARSFFIKPGNPGRIGKTGFVEQRSFWNVYRSFDRAVLDAGTQYSLVRTDTIFLAVRMVLKVLVAVGWTITFIVLYVRMWNQRWHDRRWSFSANSRVLNYLEAAAVFLIPQVLALVLFIVPWIWNFLEKTNWRILYVLTWWFQTRTFVGRGVREGLIDNIKYTTFWVCLLTAKFSFSYFLQIRPMVKPTKTILSLHDIRRNWFEFMPHTERIVVIFLWAPVVLIYLMDIQIWYAIFSSLTGALIGLFSHLGEIRSVEQLRLRFQFFASAMQFNLMPEEHLDAVHGGLRSKLYDAINRLKLRYGFGRPYRKIEANEQGRASKIRGPVRKTYLHPLSHGPANEVEAKRFALIWNEIIQTFREEDIISDNEVELLELPPVVWKIRVVRWPCFLLNNELLLALSQAKELWSCGGVDAKILRRNFVIDLLSYEENSCRYAIPPNIQQRLISIAKKD

SEQ ID NO: 210 - protein, 409 aa, Zea mays
  VARIANT 308..409: note = Derived polymorphism lacks residues 308 to 409
  VARIANT 293: note = Ancestral polymorphism is G, Derived polymorphism is R
  VARIANT 289: note = Ancestral polymorphism is G, Derived polymorphism is A
  VARIANT 270: note = Ancestral polymorphism is A, Derived polymorphism is T
  VARIANT 174: note = Ancestral polymorphism is P, Derived polymorphism is A
  VARIANT 167: note = Ancestral polymorphism is R, Derived polymorphism is C
  VARIANT 151: note = Ancestral polymorphism is P, Derived polymorphism is L
  VARIANT 112..409: note = Derived polymorphism lacks residues 112 to 409
  VARIANT 103: note = Ancestral polymorphism is G, Derived polymorphism is R
MAMEGPVFCRPAMQAKLPAAALINNSLTKSGQLGTALFGAISKYRNISRFISPISQTSTKNIGPCCSFSSSSDGNGYMAGNSSESDEDYVNSTVLEAVEVRSGSEGYVIKMRDGKNLRCVHSNFQGRNIPENTPQPAIVLRIEDGSGTLLPIIVLEMPSVLLMAAIRNVHIARPTIYQVVKEMIDKMGYEVKLVRVNKRIQEAYCAELYLTKVNDPTDNITFDLRPSDAINIAVRCKVSMSISLVRTLVTISLYMSLMSPTIQESMVREALKRMKGRQLFLMVSHLRYGDALGIAIVCLTKLLNHMFWPNKVLDEGRRNILVPVQVHRSLAYSDGIRPVEPARMAVTAGLSDGLLFTELDRPDGQPCVEAQEFGLVRNMLIAAIEERYKDAASWKDKLIRLRSKRENWA

SEQ ID NO: 211 - protein, 246 aa, Zea mays
  VARIANT 1: note = Ancestral polymorphism is M, Derived polymorphism is I
  VARIANT 11: note = Ancestral polymorphism is L, Derived polymorphism is P
  VARIANT 14: note = Ancestral polymorphism is L, Derived polymorphism is V
  VARIANT 19: note = Ancestral polymorphism is P, Derived polymorphism is L
  VARIANT 22: note = Ancestral polymorphism is V, Derived polymorphism is F
  VARIANT 24: note = Ancestral polymorphism is L, Derived polymorphism is F
  VARIANT 29: note = Ancestral polymorphism is T, Derived polymorphism is I
  VARIANT 44: note = Ancestral polymorphism is G, Derived polymorphism is E
  VARIANT 55: note = Ancestral polymorphism is V, Derived polymorphism is A
  VARIANT 59: note = Ancestral polymorphism is N, Derived polymorphism is D
  VARIANT 66: note = Ancestral polymorphism is N, Derived polymorphism is D
  VARIANT 69: note = Ancestral polymorphism is R, Derived polymorphism is H
  VARIANT 84..246: note = Derived polymorphism lacks residues 84 to 246
  VARIANT 92: note = Ancestral polymorphism is A, Derived polymorphism is T
  VARIANT 105: note = Ancestral polymorphism is M, Derived polymorphism is V
  VARIANT 128: note = Ancestral polymorphism is C, Derived polymorphism is S
  VARIANT 130: note = Ancestral polymorphism is K, Derived polymorphism is N
  VARIANT 141: note = Ancestral polymorphism is G, Derived polymorphism is D
  VARIANT 142: note = Ancestral polymorphism is G, Derived polymorphism is D
  VARIANT 181: note = Ancestral polymorphism is R, Derived polymorphism is S
  VARIANT 190: note = Ancestral polymorphism is T, Derived polymorphism is I
  VARIANT 205..246: note = Derived polymorphism lacks residues 205 to 246
  VARIANT 235: note = Ancestral polymorphism is V, Derived polymorphism is E
MRSNPSSESCPAWLDKQLPCSVVLVSYGIVSDYDEAQLEELGNGLYNSGKPFIWVVSSNEEHKLSNELRDKCKERGLIVSWCPQLEVLAHKATDQPTIPKYMESVWGLGVRVRKDEKGLVTRDEVERCIKDVMDGDSKDNGGLYAVCAGDASGGVGGLYEVVYNNVFSLCVKAIGWRPEWRFKWKPLDDIDGEKRSAHFPMVLVQMPMYNELEVHKLLAAACELQWSKDRIIVQVVDDSTYPFIKT

SEQ ID NO: 212 - protein, 127 aa, Zea mays
  VARIANT 52: note = Ancestral polymorphism is G, Derived polymorphism is R
  VARIANT 56: note = Ancestral polymorphism is S, Derived polymorphism is N
MGSYLGVAAASTNPPHFIHLCYKPTDGNIKRKLAIVGKGLTFDSGGYNIKTGPGCNIELMKFDMGGSAAIFGAAKDLGQIKPPRVEVHFIVAACENMISGTGMRPGDIVTASNGKTIEVCFFPTCYK

SEQ ID NO: 213 - protein, 203 aa, Zea mays
  VARIANT 15: note = Ancestral polymorphism is K, Derived polymorphism is M
  VARIANT 60: note = Ancestral polymorphism is R, Derived polymorphism is H
  VARIANT 73: note = Ancestral polymorphism is R, Derived polymorphism is C
  VARIANT 74..203: note = Derived polymorphism lacks residues 74 to 203
  VARIANT 87..203: note = Derived polymorphism lacks residues 87 to 203
  VARIANT 96: note = Ancestral polymorphism is G, Derived polymorphism is D
  VARIANT 139: note = Ancestral polymorphism is R, Derived polymorphism is W
  VARIANT 150: note = Ancestral polymorphism is A, Derived polymorphism is D
  VARIANT 174..203: note = Derived polymorphism lacks residues 174 to 203
MQASIAVAEALDAGKLTPQPVADAADFAVAGLAVAIGTLAVTASFMLVSFDARAGQGQLRRILDLGPSLCGPRLLLVFFVGLLAAAEMLRLPFFHGAMLPPRHHVMPCLAYPLVAHGIAEPGLLACVLLLLRVSVGGARLPASALVVPLACLPFLTVHVLVLATPATVAAYPGQLAHAADGIGHCAYPTYAATLLLALIAVYL

SEQ ID NO: 214 - protein, 161 aa, Zea mays
  VARIANT 114: note = Ancestral polymorphism is P, Derived polymorphism is L
  VARIANT 76: note = Ancestral polymorphism is L, Derived polymorphism is F
  VARIANT 54: note = Ancestral polymorphism is I, Derived polymorphism is M
  VARIANT 30: note = Ancestral polymorphism is D, Derived polymorphism is N
  VARIANT 18: note = Ancestral polymorphism is A, Derived polymorphism is V
  VARIANT 16: note = Ancestral polymorphism is N, Derived polymorphism is I
  VARIANT 14: note = Ancestral polymorphism is A, Derived polymorphism is T
  VARIANT 11: note = Ancestral polymorphism is R, Derived polymorphism is Q
  VARIANT 5: note = Ancestral polymorphism is C, Derived polymorphism is Y
MDNDCFNMTIRIIACNDVMFLLEDKYHYMDLQFCQSMAQFGRDHHLRVKIDINIFAKLFECWPSMEHNVLDCSQILLSYSFLAMFSLYVFNMDTRSIYIMDSMPIPSWFKGNHPSMHYIHKIHNIANNMNAAMELVNPTWNDDIYMWRQIVPTWVLKILGC

SEQ ID NO: 215 - protein, 131 aa, Zea mays
  VARIANT 5: note = Ancestral polymorphism is M, Derived polymorphism is I
  VARIANT 35: note = Ancestral polymorphism is P, Derived polymorphism is L
MASRMGMVAIVSLFVCALAASTSVNANVWQTDDIPVVNSNMVRHSNMERQQQQGGFIGHRPRLASFNRASNQDGDRKRTVPSGPDHMHHSIPSHTPQHPPVYVQALYEDDRSRTSSGPSKSIGPPPLSDRY

SEQ ID NO: 216 - protein, 91 aa, Zea mays
  VARIANT 31: note = Ancestral polymorphism is R, Derived polymorphism is C
MQKLFSFHLRRPWVREEDLAKALKLHSKQLRRILRFFEEEKLVTRDHRKESAKNAKAHNAAAANDGQPIAKEGEEKVKLHTHSYCCLDYAQ

SEQ ID NO: 217 - protein, 113 aa, Zea mays
  VARIANT 60: note = Ancestral polymorphism is S, Derived polymorphism is N
  VARIANT 59: note = Ancestral polymorphism is R, Derived polymorphism is I
  VARIANT 54: note = Ancestral polymorphism is G, Derived polymorphism is W
  VARIANT 13: note = Ancestral polymorphism is V, Derived polymorphism is M
MDKHLKTLAPIYVGTKFVKLDVENAPFFVAKLAIKILPCVILFKKGIVVDRLVGIQDLRSKDDFLTRALEHILILKTKGIIDEKKKDDDDADEESEANNRRVKSSTAKDSDSD

SEQ ID NO: 218 - protein, 125 aa, Zea mays
  VARIANT 5: note = Ancestral polymorphism is M, Derived polymorphism is I
MASRMGMVAIMSLFVYAIVVPTSVNANAWQTDDKPGVNRNMEMQQQQGGFIGHRPRLASFNRASNQEGDRKRTVPSGPNHKHNNIPSHTPHHPPSYVQALYEDDRTITSPGPSKSIGPPPLPDRY

SEQ ID NO: 219 - protein, 158 aa, Zea mays
  VARIANT 115: note = Ancestral polymorphism is A, Derived polymorphism is V
MTLSGGASSGSSHGTRSLGSEGDMVHRMELMRKRRMESNRESAKRSRQRKQQHLDDLNSQVDKLRTTKQQLMVALNMTSQNYAAAAAQNSVLRTQMMELQSRLCALREIICHMYATTTNVHPATVMGGAATYHTFGETAWNSGSCSMQMVDHLLHQCF

SEQ ID NO: 220 - protein, 90 aa, Zea mays
  VARIANT 84: note = Ancestral polymorphism is S, Derived polymorphism is L
  VARIANT 52: note = Ancestral polymorphism is Q, Derived polymorphism is P
  VARIANT 51: note = Ancestral polymorphism is A, Derived polymorphism is E
  VARIANT 42: note = Ancestral polymorphism is G, Derived polymorphism is R
  VARIANT 37: note = Ancestral polymorphism is R, Derived polymorphism is C
  VARIANT 21: note = Ancestral polymorphism is F, Derived polymorphism is Y
MSASRTPSGLLPCLRFGLFDFFLLSVGSARVVGPSVRVDSMGFGPYCWYRAQERLHFLYESRLAVGKSSEGFQALQQSTPGPASRLLLHR

SEQ ID NO: 221 - protein, 112 aa, Zea mays
  VARIANT 64: note = Ancestral polymorphism is P, Derived polymorphism is H
  VARIANT 59: note = Ancestral polymorphism is E, Derived polymorphism is K
  VARIANT 46: note = Ancestral polymorphism is E, Derived polymorphism is K
  VARIANT 39: note = Ancestral polymorphism is Q, Derived polymorphism is R
  VARIANT 16: note = Ancestral polymorphism is T, Derived polymorphism is M
  VARIANT 8: note = Ancestral polymorphism is A, Derived polymorphism is T
MTVAPPSAMARVWDRTKHFKEVAMLSHGYTESVFFPKKQINHVAPKPLSEIAEEHDGLERVLVPMQGIMDNVKSTSELLTGSVSLRSAEVARSPVGRIVKCEEFLKAAGPAM

SEQ ID NO: 222 - protein, 313 aa, Zea mays
  VARIANT 192..313: note = Derived polymorphism lacks residues 192 to 313
MDPMNVDNGGCGGLDAQIEQLMQCRPLAEQEVKALCEKAKEILMEESNVQPVKSPVTICGDIHGQFHDLVELFRIGGKCPDTNYLFMGDYVDRGYYSVETVTLLVALKVRYPHRITILRGNHESRQITQVYGFYDECLRKYGNANVWKTFTDLFDYFPLTALVESEIFCLHGGLSPSIENLDSVRSLDRVQEVPHEGPMCDLLWSDPDDRCGWGISPRGAGYTFGQDISEQFNHTNNLKLVARAHQLVMEGYNWAHEQKVVTIFSAPNYCYRCGNMASILEVDDCNSHTFIQFDPAPRRGEPDVTRRTPDYFL

SEQ ID NO: 223 - protein, 439 aa, Zea mays
  VARIANT 312..439: note = Derived polymorphism lacks residues 312 to 439
MRAAAGDAPPRRAGGIRVRVPLVESVSCHCRVDGGLKTVVSARKFVPGAKLCMQPDIIPNKRKSRSSRKERSKTQSPLLPGLPDELAISCLMRAARIEHPNMRLVCKRWNRLLSGNYYYSLRKKFGMAEEWIYVFKRDRDQKLSWYAFDPVNQLWKSLPPVPPEYSEAVGFGSAVLNGCYLYLFGGKDPVHGSMRRVVFYNARINKWLRAPDMLQKRHFFGSCVINNCLYVAGGECVGIQRILRSAEVYDPNRNRWSSIAEMSTGMVPSIGVVHDGKWYLKGLNSHRQVVSEVYLPASKMWSATGNEMVTGWRNPSISLNGHLYSADCRDGCKLRVYNREMGSWTRFIDTRHHMGSSRSLEAAAFVSLNGKLCIIRNNMSITIVDILDPTTATEVDSARMWEAFARKGQHRSSFMANLWLIITGRNLKTDIMHCQVLQV

SEQ ID NO: 224 - protein, 465 aa, Zea mays
  VARIANT 182..465: note = Derived polymorphism lacks residues 182 to 465
  VARIANT 224: note = Ancestral polymorphism is S, Derived polymorphism is I
MASPPPGAGLTEYERRREENIRRNETILAALRRKAAELSASFIPTASSPKRPKKQHPLARTTSPVVLRRSLRTRGIPAGESSACDGANTSLNTPPSPTKPRSTRFSSSLASALRDATAAEPSPSVKSWIGAPDGFDPCRELVLRPVDVRKVVPGRILSLRILPLSDRTVVVAGNVHGHIGFWDVDRLVEDEDGDGVDGVFEYFPHRGSVGGIVMHPAMLHKIYSSSYHGEICLMDVEKENFNTVYLCDYPIFSLCQAPNSPSSLYFAEGNELKLFDERMGKVPTTWSLHDHRINSIDFRPENPYIFATSSTDRTVCIWDIRRMKKKGSESLKVLEYNKSIQSAYFSPSGNMLATTSLDDTVRIFDIDNFDDSCTLKHDNRTGRWLSTFKAIWSWNDSNLFVGSMKRAIDVISVDRRQKSISASYMAFLESEHMTAIPCRFTLHPCKVGHLAGASSSGKVFLWTRA

SEQ ID NO: 225 - protein, 87 aa, Zea mays
  VARIANT 53: note = Ancestral polymorphism is G, Derived polymorphism is E
MVIGAANALVMVKRGRLASTPRCTSKSYRFRVLWLYITWAGLTTVGLESRLVGEDLNGCAFVYCSLSFLDKIFCGIALFALESYEGK

SEQ ID NO: 226 - protein, 352 aa, Zea mays
  VARIANT 8: note = Ancestral polymorphism is R, Derived polymorphism is M
MAFLSRSRSHAVPSALLVLLLLSVASAAAVGVAAKTDVHDVAEESNKDEESWTGWAKDKISEGLGLKHHADVDEEETARKAGHTVKSARESAQHTASGKNSTVPHHSFIRSSRSCYDRADAGQVHATEIGKKAGYAKETAGDAAAGASNKAGQAKDQAKDTVKDAAGEASNKAEYGKQKTKEAAEAASESGAEAHERSKKGKAMVEEKAREKAGQGYESAKDAAGKAQETLSQTADAAAEKAGTAKDAAWEKADKAGKKAQESKEAAKGKATEKAASAKDAAWETVEAAKEKAGEGYERVKEKARETADTAKERLEEVKERVAGPDVAAVDGKGKHRRADVDKYRSESEDEL

SEQ ID NO: 227 - protein, 157 aa, Zea mays
  VARIANT 27: note = Ancestral polymorphism is P, Derived polymorphism is L
MVVGAVFLDQRKRRKINDEEWSVQLLPIQFLFLSASPVIVMRFVSKSGGKESPCTPPASSSWKCNAMPSHLAFTVRGLMYPQRQREGRKSLKGHVEMTVGFDLPPVLALVPESIIRGVAETVLRQVAEQMKQDLDAGLAADFRKYRKEKLTERRTSP

SEQ ID NO: 228 - protein, 232 aa, Zea mays
  VARIANT 45: note = Ancestral polymorphism is A, Derived polymorphism is T
  VARIANT 69: note = Ancestral polymorphism is S, Derived polymorphism is P
  VARIANT 80: note = Ancestral polymorphism is N, Derived polymorphism is S
  VARIANT 95: note = Ancestral polymorphism is M, Derived polymorphism is I
  VARIANT 110: note = Ancestral polymorphism is A, Derived polymorphism is T
  VARIANT 137: note = Ancestral polymorphism is R, Derived polymorphism is C
  VARIANT 158: note = Ancestral polymorphism is G, Derived polymorphism is R
  VARIANT 175..232: note = Derived polymorphism lacks residues 175 to 232
MNVTFSTRTSCRSNLILPFLLWWDQSDTKWPRTADDDDDMATIAALRLTFWLSNTVVLREIIVQTFGISHQFTPSMMNLSMNGGAKKLDGKSMTMLWRNSYNGMQAKFAARQMPDDWQETSTLLATLEKIESWIFSRIVETIWWQVNVCLRMCPLSAGGHECGCLPILAKLVMEQCVARLNVAMFNAILRESSSEIPTDSISDPIVDPKVLPIPVGDLSFGSGAQLKNSVRA

SEQ ID NO: 229 - protein, 915 aa, Zea mays
  VARIANT 317: note = Ancestral polymorphism is R, Derived polymorphism is G
MNFLEDWRCIPELRLCNRILASLCTNLGTCQAWLVFQSLEALGFAPDATTFGIFIFHSCREMKLKSALVYLSECFARHVKPGVCAYNAILGGVFREGLYRHAKYIFEDMIEREVTPNLSTYKIILAGYCRYRRFDDIEQVLRHMKTNGVNVLLSGNCVLSKALSFLGLDHLGVKIKRDNVTGFPKAEFFDSVGNGLYLDTDSKMFEVSLSQVLDSALLPDINSELIRASQQGDVASALLVKDKAFQWGYDISPDSCSELFKALCVSPAYVIDVIDLMEEMPDILYKLDAQNLDLVAQTLSRNGMSAHAKLVLEKMLREDLSISHNTYTYLMIGLCEERNIAGFWECWNLATKCRWSPDSKDMMGLISYLCKWGVIEEALKLMNSLFDCYHDLFFSAYCALLKELCRTGHTSIGCAMLEALKEKGVAVDRSLFFYVMEGFLKEQRTAESIGMHDMWLSKSKELDVFTYRSVLPSLPWLDTDRAKNLVESMLTVKLTEFSYRGCIVNELMQTRNIKWAIPVLQESAPGKLSATLLNSLLQAYGWLKNWRKLDAVLCKMLKMHATLSISSYRFLVCRMCEQSRFSSASSLRALFQHTDKSRELIACNILIFYLFQRRNSSQIHDLLKDIEGNGISLDKTTYDFLVYGFHKSGDINDSVNALDACIAQGIKPSNRSLRIVLSHYCRLGNHEKSLALFHLIERNGWKHGLIIKTTLASCLLSFGRQLEAKSCLNNLSKGEFIGCSSNFDDLIKEFCILGDLKMTLYLLNTMLKKGTLPNEASYSSVIYKLCTLKEFDQALDFLAEMQLASLKSSEISCDALVHGLCAMGRPSDARKVLEMLTTLGSAPSYGMFRVVFDNYCRSSNLQKAAALLHDMQQAGQVPNFEMHWSVISNLSSTNEKTEGHGECILPNLFLSANSP

SEQ ID NO: 230 - protein, 285 aa, Zea mays
  VARIANT 4: note = Ancestral polymorphism is F, Derived polymorphism is L
MNLLVSLLSDSKLLITTIFLRYLNVSGKRAFIAGVADDNGYGWAIAKALAAAGAEMLVGTWVPALNIFETSLRRGKFDESRKLPDGSLMDIVKVYPLDVVYDSPDDVPEDVKSNKRYAGSSHWTVKEVVESVKNDFGSIDILVHSLANGPEVQYRTRLCICVCSGCGAAFACDTVHCLTILKTTCHFEGGASISLTYIASERAVPGYGGGMSSAKAALESDTRVLAFEAGRKGEIRVNTISADEVGNTAAFLVSSLASAITGSTVYVDNGLNTMGLAIDSPPVAS

SEQ ID NO: 231 - protein, 544 aa, Zea mays
  VARIANT 365: note = Ancestral polymorphism is P, Derived polymorphism is L
MARIQDGGLDNDTLQHLRSRATQLLLKEDWREYVAVCSHIIDAAASVDDRRVLCSALAHRADARARLGDASAGLADCDAAIAVEPAHPGALLSKGALLRGLGRYAAAADCFRAAALASGGGGAAVAEARQLAEQCRRLEAQARSGAVDLSEWVLAGFSGKFPDLAEYVGCVEVRRSPHGGRGVFAVKNVEAGTTLIIAKAVAIGRGVIPDASGSDEKMFVWKDFVGKVLEAAEKCPKTAALIYTLSTGQERQDELAVPDMAMFRKETEDDSLSDGTTAGKTTRTQEAVQMDRILKVLDVTCLTEDAPAADVLGNNGVVNCGVGLWVLPSFINHSCHPNARRTHIGDHAIVHASRDIKAGEEITFPYFDVLVPVSKRREASRAWGFECKCDRCRFEAEDSILGHEILKLENYLLSGGDIGAVVMQLEEKMRKSMVKERQKAFLRASFWSAYSALYDSDKLMKKWGRRIPSEALVAESVADAVGGNECVLRATLRGSRDGNGCGNRLEVEDKVVRIGRATYGKLVKRHAMRDLFRLTLDAANKFNL

SEQ ID NO: 232 - protein, 733 aa, Zea mays
  VARIANT 302..733: note = Derived polymorphism lacks residues 302 to 733
  VARIANT 242..733: note = Derived polymorphism lacks residues 242 to 733
  VARIANT 196..733: note = Derived polymorphism lacks residues 196 to 733
MPGGKRRRARNPTAGGPQRSAGAGRRRPVPELPSFVSPASVAAAFSPASGGRSRGRCARRCGAYSDGESSHAVPFSYPSLRSCSAYPERDQAQALEVTIDTAPCADPAASVPMYSYGPAVLGETGLVLSADEEEACDRGLHLGLGFRDGGHDEMELKLKELTEEDVSFKTPKRKQEQRAKANPGFLLIGGVRIYTEDISSSESDRMSSSDVDLEPNSGDGERFENDDGDSDEEDRQGEERDSISDSESLGSESDEDLSTGDSSSVDNEVVADYMEGIGGSDELLSSKWITSMNLGDADTIEQMYTNDNDGFVKKGKEKLEGYALMTASEQYGMKRRNSLEQRKGKGMVCDRDLSSMQVMDQEDMFMVNNVWMPNRSRKGMKTGSSSSQLSQSWPKDDRKSKNYQSRPGEKKQHRKELIAKKRQQRALSRGVDLGQINSKLRKMVVDQVDMLCFHPMHSRDCSQVQRLASIYQLKSGCQGSGKKRFVTVTLTGHSSLPSADGQVRLEKLLGTESENSVSSSKGPARLKGHSAPGKCVKHWESSGNKSTKKQVSFAERPVSFVKCGTIVDSLTEAIAGPSGGDTSCVKPVESNSTHLGSFEVHTKGFGSKMMAKMGFIEGTGLGKDGQGIVQPIQAVHRPKSLGLGVEFDSVAEAIKARAEPIKLISELRRNVWAPETSGVGSFEKHTKGFGSKMMVNMGFVPGSGLGKDGQGIATPLTGVRRPKSRGLGAEDKY

SEQ ID NO: 233 - protein, 526 aa, Zea mays
  VARIANT 20..526: note = Derived polymorphism lacks residues 20 to 526
  VARIANT 33..526: note = Derived polymorphism lacks residues 33 to 526
  VARIANT 81: note = Ancestral polymorphism is E, Derived polymorphism is K
  VARIANT 168: note = Ancestral polymorphism is P, Derived polymorphism is S
  VARIANT 179..526: note = Derived polymorphism lacks residues 179 to 526
  VARIANT 214: note = Ancestral polymorphism is Q, Derived polymorphism is L
  VARIANT 219: note = Ancestral polymorphism is P, Derived polymorphism is S
  VARIANT 238: note = Ancestral polymorphism is H, Derived polymorphism is Y
  VARIANT 470..526: note = Derived polymorphism lacks residues 470 to 526
MAMEVRRRVLPPHGSAPRRQQATGGEGQRVRVQAGDALPLPIWHTNLIFSALFAAPLVYLMRRWREKIRASTPLHVVSLTEIFAICGLVASLIYLLSFFGIAFMQSIVSNSDDEEDFIIDSRHGQARAPPPPAPAAPCALLGSPPAVPEKMPEEDEEIVAVVVAGKIPSYVLETRLGDCRRAAGIRREVLRKITGREMDGLPLDGFEYASILGLCCELPVGFVQLPVGVAGPLLLDGHRLYVPMATTEGCLVASTNRGCKAIAESGGASSVVLKDGMTRARAVRFPSVRRVAELKAFLEDPANFDTLAMVFNRSAGRFLLAIRYSDSMQYSQSNLFGMQYSRKRYFVLEDAALRCFKSAPSTKGELFFVLQVCAVLQGRGGFFHGVRSLSFGVDLQEIRLMGVLQIIAIAYLLTVLCLIWIRGDEDVEYGYDLLKRYRYQLNAASTRHKMGPFLLMRPLGARPLLTPILQRGGRGGRAGGGGGSRSRAAMASSAGGVLSSLGKNESYLCANKVDLESLDIQLDNRR

SEQ ID NO: 234 - protein, 661 aa, Zea mays
  VARIANT 201: note = Ancestral polymorphism is K, Derived polymorphism is R
MNAVEPSAAAIAEDPITPAASAAPYPGRLREALTALSEACESGNFNASETASFTISDILDTAAGVSGELDDGSDDSQDASRSGASEVLLREVLEFLSRPSSISNQMALDALSLVLPKPVAKLGARMGRCRDVAAAILKFFVTNCNPRDMLSILCEALDAPMELPNGLSSFVLLLDALAKVFTLIQRRHIEQVKVALPVVLKVMHATVSECVEEHGSAAVDLFNAAHGVGKAIQEMCISMFNKNKDLCAILGLYSLQNIALVSRSRQQDILSACGSVVFQSFRFLKTSGFTYRGLLTGSDVTAATVELSKEEDADFMEHFSFAMDGAALSGGDSFYCTNFFSVSFICSLVTCVTCSTVVWTLMHDDKDMSKYAGEELELAVKEVQGNHMEKWEAINMLKYVLSSIHYPWIIKSHSLNLMLILSGEDHVEEINNHVDFTCFAHRIFETLKAIESVMIAAPMALVRKKAFAALKKASTLNSFFLCVISMVPSSQRFDILHGLVNNSTSPALTAILLDLVRQEVSRESRQADNDCIEDEGFRGNGLPRWASHALELVELILRPPEGGPPCLPDHSEQVISALNLLRFILIIDSRGQRSAKLFRKETLHKVHSEWLTPLRPIAEQIQLENEKDADEITKQIVCMLNLVQLVLYRCIELVEEKMKGC

SEQ ID NO: 235 - protein, 111 aa, Zea mays
  VARIANT 89: note = Ancestral polymorphism is G, Derived polymorphism is S
MAAAGWLRRAAAVSLPRLPSGLPLIPPPPSGPLTEAQSLVVPGLGAAAGPAMELMAVPKKKVSKYKKGLRNGPKALKPVPVIVRCRCCGRVKLPHFYCCSGERGNPSESNS

SEQ ID NO: 236 - protein, 209 aa, Zea mays
  VARIANT 107: note = Ancestral polymorphism is R, Derived polymorphism is M
  VARIANT 101..209: note = Derived polymorphism lacks residues 101 to 209
  VARIANT 97: note = Ancestral polymorphism is S, Derived polymorphism is L
  VARIANT 73..209: note = Derived polymorphism lacks residues 73 to 209
  VARIANT 64..209: note = Derived polymorphism lacks residues 64 to 209
  VARIANT 62..209: note = Derived polymorphism lacks residues 62 to 209
MLCASACSVLLIFVRFHQVLCARALRFGVLHYSAQADFIHSPMQTIRHCSIFVRFHQHTPSQVQCDDADTGFQPTSLPKGSTNDALMASNVVDSSLSVVLQTIMQHRSSAKEKDKGKNRLLHRVRLQLLHISLRTTKNLENTQAAIEYIHSLSRAQPARSLNGTGLCPASRSLSTHAATTSSTPQLKAHHVKHPGRHYVKQNRRREELM

SEQ ID NO: 237 - protein, 297 aa, Zea mays
  VARIANT 32: note = Ancestral polymorphism is P, Derived polymorphism is L
  VARIANT 151..297: note = Derived polymorphism lacks residues 151 to 297
MRWKLEKRRKLLLLLLAILAASLTYQAGLNPPGGFWQENITGHVIGNPVLNDNYRRRYMAFFYCNATAFVSSLAIIMLLVNRKLSARGIQSHALGVCVVLDLVGLMGAFAAGSSRMVSTSIYVLVLVVAVLLCIMLQVVLVVSESVQRLLQRLLSVFDVTEGDAGFVLPHVAAAASNGEPRDPWYEKKPKYLLLLAALAAAVTYQAAMNPPGGLWDDGQTGHVAGDPVLRSSHPSRYRAFFYCNATSFMASLVIMQYYTLRYIFRSKIILHLKAPSCQINLNLTEFMENGTIVLDPK

SEQ ID NO: 238 - protein, 300 aa, Zea mays
  VARIANT 267..300: note = Derived polymorphism lacks residues 267 to 300
  VARIANT 250..300: note = Derived polymorphism lacks residues 250 to 300
  VARIANT 164..300: note = Derived polymorphism lacks residues 164 to 300
  VARIANT 42: note = Ancestral polymorphism is G, Derived polymorphism is R
MVRMRMRMRMRMEMTEQECERQNREWQKGRTGNEFLIMKRSGDIRSLFEKATKKAASAPLNHATPPVETTVGQQNQEEDRVEVEEIADPSSSPSPSLVSLPMPASNPPVYDINLIPYDPGERLPIENYHVNDQDAIRRAYITKGPCKPYIHDFPYRNIGDAPRRFSLTWLYNHEWLEYSIKKDSAFCFICYLFKKGSGSNAFVVDGWNNWNIGNKALIKHSGSKAHNAAQERYIGFINPKVAIDYHINKWSDEDLRLYKKRLTYSLRCIKFLLHQGLAFCGHDESEDSSNISRGMIGLNR

SEQ ID NO: 239 - protein, 545 aa, Zea mays
  VARIANT 427: note = Ancestral polymorphism is T, Derived polymorphism is I
  VARIANT 236: note = Ancestral polymorphism is A, Derived polymorphism is P
  VARIANT 200: note = Ancestral polymorphism is R, Derived polymorphism is C
MSSAASAAPPSRRTRSRPPSASSRKSDDSSAAAANGNGNRKVATKPASPHQLTGERTVKKLRLSKALTIPEGTTVLDACRRMAARRVDAVLLTDNQGLLSGIVTDKDIATRVVAEGLRVEQTIMSKIMTRNPVYVMSDTLAIEALQKMVQGKFRHLPVVENGEVIAMLDIAKCLYEAIARLEKAAEQGSAIAAAVEGVERQLGGNFSAPSALIETLRERMFKPSLSTIVTENTKVAIVSPTDPVCVAAQKMREFCVNSVVVSTGNTLQGIFTSKDILMRVVSQNISPELTLVEKVMTVNPDCATLETTILDTLHIMHDGKFLHIPVIDKDGQIAACLDVLQLTHATIQLVEGGNGTVNNVANSVMQRFWDSALALEPPDEEFDSHSEVSLLLQSEAGDGKSSVYPPVVGNSFSFKLQDRKGRVHRFTCGSESLDELVSSVRQRLSIADEKEAVQLLYEDDEGDRVLLTTDADLAGALLHAKSSGLKVLKLHIEDPSLNTEVTKPSQELAPPPLKSGISMVHVGLTAGVVALSGAAVMVYLKRSQL

SEQ ID NO: 240 - protein, 313 aa, Zea mays
  VARIANT 84..313: note = Derived polymorphism lacks residues 84 to 313
MSPFYLARGASKLVRRITSETSVELKILSEKWRLLLAGVIFQYIHGLAAHGVHYLHRPGPTLQDLGFMILPELGKERGYISETLFTFIFLAFVLWTFHPFILQTKRFYTVLIWRRVLAFLCVSQFLRIITFYATQLPGPNYHCREGSHLARLPPPQNAAEVFLINFPRGVIYGCGDLIFSSHMIFTLVFVITYQKYGSMRFCKMLAWCVAIVQSLLIVSSRKHYSVDVVVAWYTVNLVVFFVDKKLTELPDRSVGSTSILPLSAKDKDTKLKEENTRLLNGNSMDSADRRPRTQMNGKQIDNESQVDSETVKA

SEQ ID NO: 241 - protein, 63 aa, Zea mays
  VARIANT 12: note = Ancestral polymorphism is K, Derived polymorphism is N
  VARIANT 9: note = Ancestral polymorphism is A, Derived polymorphism is V
MAGGRVAHATLKGPSVVKEIFIGLTLGLIAGGMWKMHHWNEQRKTRSFYDMLDKGQISVVVEE

SEQ ID NO: 242 - protein, 280 aa, Zea mays
  VARIANT 103..280: note = Derived polymorphism lacks residues 103 to 280
MPKAAASRLATTPEKGKPTKPPQEQQAQLATIREELMNAKEQLVENEKEKCKVLAELERAKKVADEANTKLQDVLDVQRRAIEVQEADKLPARESEQASIHGQQEADDAVLRSTVEQLEKARASVVKAQEVEHLTAEVTHLKGQLDSKVDGNRKKTAERIQNLEEENFALKLELEKNKAAEEKTVRLERMIDELKSDVDDARNLGSKSKQLADEWQKKAMEGLASALQEMSAESREVQEKYLLKQDEIGHAQAQVEELNLSLKNIKENYELLLDEANYEK

SEQ ID NO: 243 - protein, 189 aa, Zea mays
  VARIANT 71: note = Ancestral polymorphism is I, Derived polymorphism is V
  VARIANT 147: note = Ancestral polymorphism is S, Derived polymorphism is T
  VARIANT 161..189: note = Derived polymorphism lacks residues 161 to 189
MAAAASASTPQGVAERRGIPAAAFVEDVEAYLRQAGLDVNSALAFLQERLQQYKIVEMKLLAQQRDLQAKIPDIEKCLDIVSTLQAKNDLGEALIADFELSEGIYSCAKIEDTDSVCLWLGANVMLEYSCDEANALLKKNLENAKASLEVLVADLQFLRDQQTITQVTIARVFNWDVHHRRSKQAVKEP

SEQ ID NO: 244 - protein, 230 aa, Zea mays
  VARIANT 101..230: note = Derived polymorphism lacks residues 101 to 230
  VARIANT 105..230: note = Derived polymorphism lacks residues 105 to 230
  VARIANT 133: note = Ancestral polymorphism is K, Derived polymorphism is N
MVVYLVDASPKMFTPATTQIREPNKRTRLWLGSFATAEEAALAYDEAARRLYGPDAFLNLPHLRASAVSSTATHQRLRWLAASARGAAAVPAYDLLNLNAQHNVYNLLAHVPLMDFQKESTFDLWSTVGLSSKGENDSFKVLALIHQNVIPSMSNPSILCDFLTRSYDIGGVISVMALSGLFILMTQNGLEYRKFYEKLYALLTPAVFMAKHRSVFLQKQDDIYERTFKS

SEQ ID NO: 245 - protein, 513 aa, Zea mays
  VARIANT 49: note = Ancestral polymorphism is D, Derived polymorphism is H
MARSQLQLPSVSPSPADLVACSGQCSTKRDLRLLHAVLLRRRHILPKVHALAVLAKLLRFAAVSPAGDIRHASVLLSLHLPFISAATSHLAFFYNTLIRGLAVSSSPSAGIELFTAMRRAGATPDAFTFTFVLKSCSRCHSPGRLPSDLHAQAFKHGCLGAGSEHGHVHNALLHAYASRSAVDDASRVFDEMPVRDVVSFSGLLTAHLKNNHLDSVRMVFDQMPHRDVVSWTAMISAYARAWRPQEALALFDAMTVQPDEVTMVSVVSACTALGDLETGERLRQYVDSNGFGWMVSLRNALMDMYAKCGCLTEARVLFDGMAIRSLASWNTLISAYASHGDVENTLALFHMMLADDNYVKPDGVTLLAVLTVYAHKGCVEEGRTVFDAIERGDYGKVEVTIEHYGCMVDLLSRAGQLDEAYKMIEQMSIPNNDVVWGVLLGACRMHGNIDMAEKAVQKLRILNPHEGGYYILLIDMYTAAGRTAEAMEIRRTMNETGANKTTGWSCSTTACLP

SEQ ID NO: 246 - protein, 178 aa, Zea mays
  VARIANT 94: note = Ancestral polymorphism is R, Derived polymorphism is G
  VARIANT 88: note = Ancestral polymorphism is S, Derived polymorphism is L
MALLRAALAQPLSPRPALPVRHPPTSLTGSRFILDFSLPPHPGPGAPRREYPRIEATARRGARTESAKVRNRRLQKKFNGTATKPRLSVFCSNRQLYAVLADDHNKKILFYGSTLQKSICGDPPCGTVEAARKVGEELVRVCNELGISEVSYDRNGFARGDKMMAFEVPVSQHGFLPR

SEQ ID NO: 247 - protein, 760 aa, Zea mays
  VARIANT 214: note = Ancestral polymorphism is A, Derived polymorphism is V
MAVPSPAPRSPRRPDAIVAPDPSSADVPPSLDFGDPASLAALRVLTDAGAATRLLHECVAYQRGLDARLDALLARRADLDRAAASLLRSAPPLLSLAASDAAALKESSSTTAALADALSSRVRHLDAAHSRADAALARAEAALDRSRALEAARRALAADDLAAAATAVHEFLAIDARFPTDDDLRRDLLDMKRRLEGLARRRLAAVVDAQDHPAVLRLVRLFPLLGLADEGLQVYVAYLKKVVALRARADFEHLAELTSATQPTSERPDFVGCLTRLFKDIVLAVEENDAVLRELRGDDGVAYAIIELQEECDSRGTQILRRYADYRKLARLASDINSYTKNLLSVMGSMASAAGGSEGPDPREIELYLEEILALTQLGEDYTEFMVNKIRGLRDVKPELGPRAMKAFRNGNFYKTEQDLTGFYVIFEEFFMVENVRKAIRIDEPISDGLTTSMVDDVFFVLQSCCRRAASTASINSVLAVLGGAMSLLSNEYQEALQWRMREPNLGAKLFLGGVGVQKTGEEIATALNNIDISSEYVLKLRHEIEELCVEVFHTPADREKIKSCLSELGEVSASFKKILHSALEHLVASVVPRIRPVLDTVATVSYELDDTEYGENEVNDPWVQKLILTVNTNVAWLQPVMTLNNYDSFVHLIIDFIVKRLEVIMMQKRFSQLGGLQLDKEVRSLINHFSEMSQRPVRDKFSRLSQMSTILNFERVSEILDFWGDNAGHLTWLLTPAEVRRVLGLRIDFRPEAIAALRL

SEQ ID NO: 248 - protein, 499 aa, Zea mays
  VARIANT 430..499: note = Derived polymorphism lacks residues 430 to 499
MAMAARLLRATEVASRFLSASHGFVQRAAYTAGGIVDVGQPTPQSHPELLADGEITPGITNEEYISRRKKLLEVLPEKSLAIIASADQQMMTDVVPYPFRQNGDYLYITGCTQPGGVAVLSEETGFCMFMPDTNKEDLVWQGETAGVEAAVDFFKADKAFPLSQMQKILPELIEQSKGVYHNVNTTSSYKNLDAFRRASLNNKVKDLTNYTDELRWVKSKSEIKLMRESASIVSQSLLQTMLMSRTHREESQLAAKIEYECKMRGAQRMAFHPVVGGGANGSIIHYSRNDRKIRTGDLLLMDVGCEYHGYLSDLTRTWPPCGRFSPAQEELYSLILETNKECIKLCKPGTSINEIHNHSVKLLIKGFQELRILEKGKSIQYNYLNPTAIGHSLGMDIHDSMTLPKDKPLEPGVAPIKSVVGGLEPGNNDRARGVHPGGPGPERARAEQVPRYGDPDRGRGPHHRRRPRGADGVGAQGGLAPDHPDEHGQGRLGCGRPWP

SEQ ID NO: 249 - protein, 119 aa, Zea mays
  VARIANT 1: note = Ancestral polymorphism is M, Derived polymorphism is I
  VARIANT 42..119: note = Derived polymorphism lacks residues 42 to 119
  VARIANT 43: note = Ancestral polymorphism is P, Derived polymorphism is S
  VARIANT 47: note = Ancestral polymorphism is D, Derived polymorphism is E
  VARIANT 57: note = Ancestral polymorphism is V, Derived polymorphism is A
  VARIANT 61: note = Ancestral polymorphism is A, Derived polymorphism is V
  VARIANT 69: note = Ancestral polymorphism is K, Derived polymorphism is N
  VARIANT 80: note = Ancestral polymorphism is A, Derived polymorphism is G
MRRGRGRCGSSRRRASPSGLLPLRDIIECGYVEETGFVWLRQPRKVDHYFSKAGRHVMYGAEVSAVGDKGRLRKITGVKAKEMLLWMTLHEICVEELHCKAIEGLSSSFPVEAFDRRGG

SEQ ID NO: 250 - protein, 293 aa, Zea mays
  VARIANT 30: note = Ancestral polymorphism is A, Derived polymorphism is V
  VARIANT 27: note = Ancestral polymorphism is V, Derived polymorphism is I
  VARIANT 7: note = Ancestral polymorphism is H, Derived polymorphism is R
  VARIANT 5: note = Ancestral polymorphism is N, Derived polymorphism is K
MGHQNCRRPPHVVVALVAIVLLQPCFVSVASSSSSVAIDGGGTNVKVPAVDGGAGSFVEFVTENVELYSNVSNEHMYGSAGKVWDPQLLVAQGMVVRYVVSPDGKGKFRTINEAVRAVPEGNKRRVILDIRTATYREKVLVPYTKPFITFLGNPKNPPVIMWDDRAATHGKDGKPVGTVGSATVAVESDYFMASGIVFRIYLGRAWGDSSRVVYSYTTMGKEVVPVGWDGWRIERPEKSGIYYGEYMCSGPGALPHKRIGWSLVLNDAQAKPFTGIHFIFGDSWILPPPSLVG

SEQ ID NO: 251 - protein, 273 aa, Zea mays
  VARIANT 213..273: note = Derived polymorphism lacks residues 213 to 273
  VARIANT 184..273: note = Derived polymorphism lacks residues 184 to 273
  VARIANT 134: note = Ancestral polymorphism is W, Derived polymorphism is R
MVGRKPMRRRRSDRQPPPQSFGATARPSSPRSFDSTTAAAAAVATDLDELLLTAPPPSASEPRSFSYAVKQQCWEKAERLPGRDPERWRRDALGNIVFRKLVGCPGCLCHDYDHIVPYSKGGKSTLENCQVLQRKIIKSTAKDGKKAWVLACPAQGSPPCRCSSFCGHGIEVRVGADAMVLEHWEPMQEGLLVSVHPKGAHTSAVYRFMALARDLCLQATVNRSKGNKTEISKSELIQKSAYCRVSGRDMDLVELSAYGNVRRGPDSGGCKIQ

SEQ ID NO: 252 - protein, 715 aa, Zea mays
  VARIANT 199..715: note = Derived polymorphism lacks residues 199 to 715
  VARIANT 132..715: note = Derived polymorphism lacks residues 132 to 715
  VARIANT 90: note = Ancestral polymorphism is A, Derived polymorphism is D
MAAAEWDSRSVASPTGDWPPAAAASPIKGKAALPESDGGASASGSSEAKVDDGNIQEAESSLREGLSLNYEEARALLGRLEYQRGNVEAALRVFDGIDLQAAIQRFQPSLSDKPLSKRSNKLRADSSNSGSQHAASLVLEAIYLKSMSLQKLGKAMEAAKQCKSVLDAVESIFQCGIPGVMVEQKLQETVSKSVELLPELWKQAGAYQEALASYRRALLSQWNLDDECCTRIQKRFAVFLLYGGVEAAPPSLASQTEGSFVPRNNLEEAILLLMILLKKWFLGKTHWDPSVMEHLTFALSLCGQTSIIAKHLEEVLPGIYPRTERWYSLALCYFAVSHNEAALNLLRKSLNKNESPNDIMALLLAAKICSSNNLLSSEGVEYAKRAVRDAESSDGHLKSVALHVLGSCLSRKSKVASSDHQRSVLQAEALKSLNEAISLDRHNPELLFELGIEYAEQRNMHAALKCAKEFIDVTGGSVSKGWRLLLLVLSAQQRYSEAEVVTDAALDETAKWEQGPLLRIRAKLKVAQALPMEAVEAYRTLLALVQAQRKAYGSVKNGTEDNEDKVREVEVWHGLANLYSSLSYWRDAEICLQKAKALKTYSATTLHVEGGNKHELHEKIQDAVAAYFNAISMEVEHVPSKVSIGALLSKQGPKFLPVARCFLSDALRLEPTNRMAWFYLGEVHKQDGRLADAADCFQAASMLEDSDPVESFRSL

SEQ ID NO: 253 - protein, 179 aa, Zea mays
  VARIANT 111: note = Ancestral polymorphism is P, Derived polymorphism is S
  VARIANT 76..179: note = Derived polymorphism lacks residues 76 to 179
MDPARSPNLGTLSWWRRPLARILMNTVQAREASARLPHRDRCFAAAANRIRPLARAFCDASALRADAGANGTPSPQDHAEKDPHPPDVLDIAIVGGGMMGLAVAYAMSNMPLTKHLRVAIIDSNPALKSRSYLGKNSIPDSRVSTVTPATISFFKGCSSPQLTFFYALLAGDIQVFAMS

SEQ ID NO: 254 - protein, 444 aa, Zea mays
  VARIANT 231..444: note = Derived polymorphism lacks residues 231 to 444
MWRGGATTAFVARALRSRLLLDPIHHPVTSLAPISSARTSSSSTSSTAAANTIVEEAAVAAAVSILYSSVASNLDLGIDIISNIDPTFVFSALVVATSGAGYVLGSGNIVDIAGLCCTCAGTMMVAASANTLNQLPPQNNSVFSLINNNAYFQVFEIKNDAKMKRTMRRPLPSGRISPAHAAMWATSVGVAGTALLAWKANGLAAGLAASNLVLYAFVYTPLKQIHPVNTWVGAIVGAIPPLLGWAAASTELSLNAMILPAALYYWQIPHFMALAYLCRNDYLAGGYRMFSFADPTGKRTAWVSLRNCLYMLPLGLFAYNWGLTSEWFSFEASLLTLGLTIGSLSFVLKPSPKTARRMFYGSLLYLPAFMAGLLLHRLPNEQKAHNLAEKSELDGVLYGADLQDKERATQKRQDRNPSSMQSRPPVAYASVAPFPFLPVPIYDS

SEQ ID NO: 255 - protein, 339 aa, Zea mays
  VARIANT 190: note = Ancestral polymorphism is T, Derived polymorphism is I
  VARIANT 168: note = Ancestral polymorphism is S, Derived polymorphism is F
  VARIANT 167: note = Ancestral polymorphism is A, Derived polymorphism is D
  VARIANT 165: note = Ancestral polymorphism is V, Derived polymorphism is A
  VARIANT 160: note = Ancestral polymorphism is R, Derived polymorphism is C
  VARIANT 159: note = Ancestral polymorphism is T, Derived polymorphism is P
  VARIANT 146: note = Ancestral polymorphism is A, Derived polymorphism is V
  VARIANT 9..339: note = Derived polymorphism lacks residues 9 to 339
MPPPSPSRQSRSSARPIPAAVTSAYIEAEHRQRVRGARVPQEEEEGRQRQGSREEDGEGAAQRQEPPQKKQFWAPAPLTTKSWADVEDDNDYFATTASPRLVWGTAGEPAKEEDDIDDVVRAALQEVATLGNKVEKEMEDMAFFFAELALMQYGYGLVTRLPSLVAASAVYAVRLTVKRAPSGPTPSSTTLLCTRCSEERPAKGSGSWSSPVGSVPAGGQPRADNGSTTIEIALKIAFRKFSLDHGIMASSENSTRNERNIKLKVLVLNGSYHGDTLGVMEAQAPSSYTSFSSVAMVHVQRRICAAQLLQRIGGPSGHVPSRRRVASPPTISSRHYASL

SEQ ID NO: 256 - protein, 86 aa, Zea mays
  VARIANT 53: note = Ancestral polymorphism is T, Derived polymorphism is I
  VARIANT 31: note = Ancestral polymorphism is S, Derived polymorphism is F
  VARIANT 30: note = Ancestral polymorphism is A, Derived polymorphism is D
  VARIANT 28: note = Ancestral polymorphism is V, Derived polymorphism is A
  VARIANT 23: note = Ancestral polymorphism is R, Derived polymorphism is C
  VARIANT 22: note = Ancestral polymorphism is T, Derived polymorphism is P
  VARIANT 9: note = Ancestral polymorphism is A, Derived polymorphism is V
MEDMAFFFAELALMQYGYGLVTRLPSLVAASAVYAVRLTVKRAPSGPTPSSTTLLCTRCSEERPAKGSGSWSSPVGSVPAGGQPRA

SEQ ID NO: 257 - protein, 353 aa, Zea mays
  VARIANT 134..353: note = Derived polymorphism lacks residues 134 to 353
MAMGATVRAAAADAMVTFLWVLCASALDVSIAAVTSYQGLQEGADHYALLVTTSLFSVLLFTFDLLYGVLGGASFNPTDFAASYSAGLDSPSLFSVALHFLARTAVVVKRTTLRVAQKDAYMTELDLFAKGLHERLVPFLGHCLDKEEEKVHVYRFVQNGDLSSALHKKSREEDEGLQSLDWIKRLKIATGVAEALCYLHHECSPPMVHRDVQASIILLDDKFDVRLGSLSELPAIESVLNAMKSNTNQRVSPIFALVLCPTRELAIQLTAEANVLLKYHEGIGVQSLIGGTRFKLDQRRLESDPCQPDHLLDETNRAGSKIRVERAERSSYTFQSQLDGGAQISDINPLQAI

SEQ ID NO: 258 - protein, 394 aa, Zea mays
  VARIANT 353: note = Ancestral polymorphism is H, Derived polymorphism is L
  VARIANT 189: note = Ancestral polymorphism is G, Derived polymorphism is R
  VARIANT 65: note = Ancestral polymorphism is P, Derived polymorphism is L
MDMCAPRRLLLFSLPTPKLSPEHPLFRQRRRGRTWPGIARCATEVGTGWGGIVEDDLSELLQILPRDLRDNLQNEPRKDQLLEVILDLGRRPEARFLGDSGGQYLRDSEISQKELEDAQKAVGEFGGDNRAGIEGTLHRISAIRSRKGMVVGLTCRVGRAVTGHVDMVRDLLNYKESILFLGSSSIRPGVGKTTVMREIARVLADEFQKRVVIVDTSNEIGGDGDVPHAAIGGARRMQVPEPSMQHRVMIEAVENHMPEVVIVDEIGTEAEAQACRSIAERGVMLIGTAHGERLANIIKNPTLSDLIGGVETVTLGDDEARARRSQKSILERKAPPTFPFLIEMRERHYWVTHRTERSVDMLLHGKKPLVEVRKRDSEFQVVIERWATYDGDGL

SEQ ID NO: 259 - protein, 171 aa, Zea mays
  VARIANT 86: note = Ancestral polymorphism is E, Derived polymorphism is K
  VARIANT 68: note = Ancestral polymorphism is D, Derived polymorphism is G
  VARIANT 41: note = Ancestral polymorphism is N, Derived polymorphism is Y
  VARIANT 39: note = Ancestral polymorphism is P, Derived polymorphism is L
  VARIANT 25: note = Ancestral polymorphism is A, Derived polymorphism is V
  VARIANT 21: note = Ancestral polymorphism is E, Derived polymorphism is K
  VARIANT 20: note = Ancestral polymorphism is A, Derived polymorphism is V
MVKDSAYYDVLGVSVDASSAEIKKVYYIKAKLVHPDKNPGNPDAALKFQELGEAYQVLSDPGKKEAYDKYGKEGIPQYVLCTRYTEVGISVGLGLNEEAALEEILYQFEEKLQAEREEAARKQEELQAQLQALQAALEENQSLLRQAQEEVKGMHTKFEETNALLRAVLKL

SEQ ID NO: 260 - protein, 1701 aa, Zea mays
  VARIANT 492..1701: note = Derived polymorphism lacks residues 492 to 1701
  VARIANT 497..1701: note = Derived polymorphism lacks residues 497 to 1701
  VARIANT 574..1701: note = Derived polymorphism lacks residues 574 to 1701
  VARIANT 580..1701: note = Derived polymorphism lacks residues 580 to 1701
MTGSKPAPAASQNPSAVPHRRPPPPPPPPPPPPVTAVARVREEGELSSGADDDETLQTQLGAASILGKFVEAGSQVPSASLLGKGSNTLIVSNALNHKASAPSYKKIMRVNQGQFKPGTNRNLSWQKPVSSDNLLITFSDDDSGADSGKTGRDKVRKASSQGTQRTGNSMQTRIMREEVSQQKNLGSKVGPAHLPAFPFTHRNVGAGRASGNTFFRKELPVRQVNPLKSKQKVQNGVGVHSEDHRLEILRHKIAAKENELKGQKRPLSAVATKNADFSSNQPRLPSEKIRLEASSIGEYSRFNSLSEHSGGPNKRLKLNQQYNQFCSDLTPLAPIGSISGKTNVQSSEVTNRSENGITMNLNVNETDTTDTTELADQIQQGGATKSLRHHKDSGGAENHVMLESHDGLAAQPPFTDTQTIPEDTSALAPVTSAQARQQVLAVGTSPVLDGTPQLQPGKENDECLNSSGQIGVETQNTILFSLLEMEELQDKELEDAQEHRQKCEAEEREALRAYRKAQRALLEANERCAILRRKREICSSQVHGLIAENSSLVQSLSIRNPEDGLAMPSLLNSQIHAVSQIPENQGGRHRLCPEEPSQQQIDKHEDEARPHYCDKLAASTADPSSVSAVNADSILSDYMEDDLLFPTRQARSECALDVENQMEETIHVYAEENRQVSGDGGEDYELLEASLRSRLVERFGKKSCLNGTIDEGTEGLAVGKVAAEHGKQSAYVGHQLQEAEQNIMTTTLEGTMELENDGAEKTVGLSNSCSGPSMGNCDPEDNISSLKELCMPLVMDSLIFPSSAPLNAARQIKRAFPGICKELSDYKNDHLTSDAVSEVTGSVQDMIHDLVGENMKMLPTTQNDNNMVHSVIDPFWPFCMFELRGKCNDEECQWQHFEHHDWRKLELTKHSMISVSGQIPYGLSQYILPVPVYRVGSNLIKADLNLTQSVLASSLWQYWQRGFCASFPLPLSVQRVLPSDAPFFQAGDGRIADFDRNRQLLKFRMLDSRKNKIVQGSVDIEFFLEAALDLYCGKVNKPDRIKALSFLARSIEADPSTVILWVFYLHIYYQKDEGLGKDDMFSDAVNYLLVALLPFSSSLKHFMLVQHNVYSYELWLMYINSRLRVDDRLDAYNDALSMLCQMTAETDKDLQERSAFILDIFLQMIYFLCMSGNIDKAVSRIIGILPTAMPDNSGDKLLADVISCLTMSDRCIFWISCLYVLIYRNLPEEIIDQLEFQKALPRALIWPSIDPSVDNRDKITDLLNFAACKMAEDISECVKNGDPSYLMLSQFLAVNHISCLAAIGGLKSSVDMLVTYMKEYPMCPQILLISARLDRKHGTCPGLKSFDELILNWPKEAQGIQYMWNQYVEHALATDAELAEKVLTCWFEEHGKDCDIQSNAAICIELSSEEPGTSSLVSPQAVGSGPSISEDLVFRLLNLSLYKILENNLQEAQMAASKALKLAHGEWYEHCIREHAAIHALELEKSSSSTDAQTRATFSLIIGYLADHCNLPTRELLSRRFCQNIKKHRLRQLIDDTIGSVPADSSLINSVLEVCFGPSLLPKSISDVKYLVDFVETVMEALPANYRLGLAVGGFVAKHFTGYGAASTGTRFWASSVLINAIFRAVPVAPESVWLEGAGLLEKLHATEILKRFYQQAASVYPFSFKLWHAHLNYCKASGSNTESILESARQRGIELNLTPT

SEQ ID NO: 261 - protein, 217 aa, Zea mays
  VARIANT 178: note = Ancestral polymorphism is L, Derived polymorphism is V
  VARIANT 161: note = Ancestral polymorphism is R, Derived polymorphism is I
  VARIANT 134..217: note = Derived polymorphism lacks residues 134 to 217
  VARIANT 118: note = Ancestral polymorphism is F, Derived polymorphism is I
MAGCWAVLLPSALLVWIVCCNWVLIMSVDAGSPYGANMTDLMRHVQFFDEDRDGLLTIPESTKGFIAIGLTPAFALSLATATHAAFGPLTTPPGKLPSINIYVSHIHGAVHPSDSGAIDKKGNFVPKKFERIFQKFSHSEEDALSWLEIEAMLVANRDFLRPLSWPEAETEWQLIHMLGKDRHGYLHKDTLRGVYDGTVFPKMRDHTIDPHARHSDA

SEQ ID NO: 262 - protein, 222 aa, Zea mays
  VARIANT 166..222: note = Derived polymorphism lacks residues 166 to 222
  VARIANT 121: note = Ancestral polymorphism is D, Derived polymorphism is V
  VARIANT 119: note = Ancestral polymorphism is T, Derived polymorphism is N
  VARIANT 115: note = Ancestral polymorphism is A, Derived polymorphism is V
  VARIANT 111: note = Ancestral polymorphism is S, Derived polymorphism is Y
  VARIANT 101..222: note = Derived polymorphism lacks residues 101 to 222
  VARIANT 16..222: note = Derived polymorphism lacks residues 16 to 222
MVNLNITNILEKMTGKDKDYRYMATSDLLSELNKESFKADQDLEPKLTIIVQQLEDASGDVSGLAVKCWVGVSILQALFVKEHNAVCDAIKDEHPNLSDEELYRYARLVTSVVIAKVHTVDWTVELLKTKTMRAGMRANCIDIGELVGLKGEERLSKIGFEKKILSMGYQACGALELWNYPSFFRDLIPQNLDRTNRSDRIDLAALEGMKFGPNLYHISRGS

SEQ ID NO: 263 - protein, 352 aa, Zea mays
  VARIANT 222: note = Ancestral polymorphism is V, Derived polymorphism is A
MSSAAATAFAGVSVATPNLTTPFRGRVRLPLRGVSAAPRRAVASMAVSAPRSGAAASFLERRESERALHFVKYQGLGNDFIMVDNRDSSVPKVTPEEAAKLCDRNFGIGADGVIFVMPGVNDADYTMRIFNSDGSEPEMCGNGVRCFARFIGELENLQGTHSFTIHTGAGKIIPEIQSDGQVKVDMGEPILSGADIPTKLVATKNKAVIQAELAVEGLTWHVTCVSMGNPHCVTFGANELKTLQIDDLKLSEIGPKFEHHEMFPARTNTEFVQVLSRSHLKMRVWERGAGATLACGTGACAVVVAAVLEGRAERKCVVDLPGGPLEIEWREDDNHVYMTGPAEAVFYGSVVH

SEQ ID NO: 264 - protein, 167 aa, Zea mays
  VARIANT 30..167: note = Derived polymorphism lacks residues 30 to 167
  VARIANT 31: note = Ancestral polymorphism is E, Derived polymorphism is Q
  VARIANT 40: note = Ancestral polymorphism is N, Derived polymorphism is H
  VARIANT 50: note = Ancestral polymorphism is H, Derived polymorphism is Y
  VARIANT 89: note = Ancestral polymorphism is P, Derived polymorphism is L
  VARIANT 145: note = Ancestral polymorphism is R, Derived polymorphism is Q
MGSPKPCCQVTPRCQPELGMKLLIAHGSHQELGKGDSMTHLMINMCDVVHMLMQATEVHYQCPKRVRVQSDVSERIANGTSVHVNTHTPVQNLNLDIEEQSHKHSISHIEEPNTNNSEGSLAGAVWDVFRRQDLPKLNEYLAVHREECAARCQQVSSVMTHFFPMTN

SEQ ID NO: 265 - protein, 168 aa, Zea mays
  VARIANT 146: note = Ancestral polymorphism is R, Derived polymorphism is W
  VARIANT 143: note = Ancestral polymorphism is A, Derived polymorphism is V
  VARIANT 75: note = Ancestral polymorphism is E, Derived polymorphism is K
  VARIANT 70..168: note = Derived polymorphism lacks residues 70 to 168
  VARIANT 58: note = Ancestral polymorphism is E, Derived polymorphism is G
  VARIANT 57: note = Ancestral polymorphism is T, Derived polymorphism is I
MGSPKPCSQVTPDALQPELGMKLLIAHGSHQELGKGDSMTNLMINMCDVVHMLMHATGVHYQCPKRVRVQSDVSERIANGTSVHVNTHTPVQNLNLDIEEQSHKHSISHIEEPNTNNLEGSLAGAVWDVFRRQDLPKLNEYLAIHREECATRCQAVSSVMAHFFPMSN

SEQ ID NO: 266 - protein, 223 aa, Zea mays
  VARIANT 187: note = Ancestral polymorphism is I, Derived polymorphism is N
MDLESSEILVVKQVVLFDQRYIGMTWEENTLNILLEFVPGGSIQSLLGRLGSFPEAITIIRHNQPEVCAFCLGNGYAGLKDALGSNDSGLQRYDMIIAHDNVECPVTRLVGTPRWKFFTSKIMKSICDLDKTPGPGRQVKYGNLEFRNAAETAYAGEPSAALSEAISCLDHEPSKVAAMTALKSFLILSIQIQVKYSHSQETGSPTKCKIKIKDMLLRNRKKQ

SEQ ID NO: 267 - protein, 436 aa, Zea mays
  VARIANT 103: note = Ancestral polymorphism is R, Derived polymorphism is C
MAAPPELVDDTIAEICLRLPPDEPAHLVRAALVSRRWRRILSGGAFLRRYRAFHGAPPLLGFVDNTIGLHGATAPRFSPTTSSGSPFPRRTFDCICWEALDCRHGRVLLGLFAERVNLVVWDPVTGDHCGLPDPGVLPGYYSAAVLCAARGCDHLHCRGGGPFRVVLAGMDYFSRDAGVRARLYCSEAAAWVASAQLASDSHVMRKPSALVGDNVYFQLMEGDVFLRYDMGRNRLSTFDPPAAHVDEGGVVLMPMGGDGSLGLAGVRGSRLCLWSTSVGAEGIGGWVRRGDIELMTRIPFMPYSEAHVIASAEGLGFGTIFLVSTEVGLFAVDLKSGQERKLSEPGNYNDFAVFPFMSFYTPGTTVQAARYRHPGGHTNHCNTEAKNGIAWLIYRSIKLSLQVLSSFCCRNDVSQETQAMKPTYWSLMLLCSLADS

SEQ ID NO: 268 - protein, 119 aa, Zea mays
  VARIANT 9..119: note = Derived polymorphism lacks residues 9 to 119
  VARIANT 15..119: note = Derived polymorphism lacks residues 15 to 119
  VARIANT 22: note = Ancestral polymorphism is K, Derived polymorphism is N
  VARIANT 33..119: note = Derived polymorphism lacks residues 33 to 119
  VARIANT 35: note = Ancestral polymorphism is K, Derived polymorphism is M
  VARIANT 39: note = Ancestral polymorphism is D, Derived polymorphism is N
  VARIANT 40: note = Ancestral polymorphism is C, Derived polymorphism is Y
  VARIANT 58..119: note = Derived polymorphism lacks residues 58 to 119
  VARIANT 63: note = Ancestral polymorphism is T, Derived polymorphism is I
  VARIANT 68: note = Ancestral polymorphism is V, Derived polymorphism is I
  VARIANT 99: note = Ancestral polymorphism is G, Derived polymorphism is C
MRLSVGVAREFLALQDRLGFDKASKTLNWLLAQSKSPIDCLVDAADQALVGEAANDLQEYFRTMYKKVTEADIEEFEAKYRGSDYEKTDLKDLYTKYKCNMNRNNYLLYHIVKSETVLL

SEQ ID NO: 269 - protein, 295 aa, Zea mays
  VARIANT 12: note = Ancestral polymorphism is K, Derived polymorphism is E
  VARIANT 41..295: note = Derived polymorphism lacks residues 41 to 295
  VARIANT 93..295: note = Derived polymorphism lacks residues 93 to 295
  VARIANT 115..295: note = Derived polymorphism lacks residues 115 to 295
  VARIANT 127: note = Ancestral polymorphism is E, Derived polymorphism is K
  VARIANT 130: note = Ancestral polymorphism is D, Derived polymorphism is G
  VARIANT 136: note = Ancestral polymorphism is Q, Derived polymorphism is K
  VARIANT 143: note = Ancestral polymorphism is R, Derived polymorphism is H
  VARIANT 159: note = Ancestral polymorphism is G, Derived polymorphism is S
  VARIANT 161: note = Ancestral polymorphism is R, Derived polymorphism is C
  VARIANT 163: note = Ancestral polymorphism is L, Derived polymorphism is V
  VARIANT 171..295: note = Derived polymorphism lacks residues 171 to 295
  VARIANT 196: note = Ancestral polymorphism is N, Derived polymorphism is S
  VARIANT 205: note = Ancestral polymorphism is G, Derived polymorphism is D
  VARIANT 214: note = Ancestral polymorphism is G, Derived polymorphism is S
  VARIANT 243..295: note = Derived polymorphism lacks residues 243 to 295
MAPRKHPSGSKKRKRRKEVEEFIESQRGAMDKFVRTNTRTSSNEDQPNLAIVVVAEQPNSNEEDHDPTLEENVDINTNEKCKSSLGHDGFGDWRHTSERLKEHEASMEHITSMNSWNELRVRLRKTETIDKEFQHQIAKEKERIRQVLLRIIVVVKFLGKRTLAFRGSSERIYNDQNDVSHQEQMSLLVRCVNMSSGKVEEYFLGFMKVDDTSGEGIFNSLLDSIKSFGLNIEDVRGQGYDNGSNMKGKHKGVQRRLLDINPRALFMPCACHSLNLTLCDMAKSCAKVVSFFGIV

SEQ ID NO: 270 - protein, 326 aa, Zea mays
  VARIANT 175: note = Ancestral polymorphism is A, Derived polymorphism is V
MGCTTSRQARHDLRYCPSPLPRSQSFPARCPSDVGVHVVRLTSSTLGSLELDKALPRAPEPAPTRLAPRTPTMTPPNEPEDIDAWALMAGLEDRSPLLGAPFGRHSFSFPVATAPAQDLAASAKVTPLPMPMPRPDAAPTSGGEGKALPPRRAVLYFTSLRGVRATHEDCCLARAILKGYGVRLDERDVSMHRGFRDELRGLLGLGLGQAGGTPAALPSLFVDGELVGNAEELKRLHEAGELAPRLAGCESAASTAGPHGGDAGACEACGDMRFVLCDVCSGSCKVYVGDEDEAEEEEEGDECGGGFRRCTECNENGIVRCPVCCC

SEQ ID NO: 271 - protein, 201 aa, Zea mays
  VARIANT 105: note = Ancestral polymorphism is A, Derived polymorphism is G
MARCLALVSLLLLGLASAASAADAPFVVAHKKVSLSRPKPGVERVAVSLDLYNQGSAICMDLCKAYCRTAYDVSLNDDSWPTQAFELVTGEKSKTLERLDPGATATHTYVLETKTQGRFQGSPAIITYRVPTKTALQEAYSTPIFPLDILAERLPEKKFEWAKRLVAKYGSLVSVVSFVGLFIYLVASPSKSSSKGSKKRR

SEQ ID NO: 272 - protein, 261 aa, Zea mays
  VARIANT 62: note = Ancestral polymorphism is T, Derived polymorphism is I
  VARIANT 95: note = Ancestral polymorphism is T, Derived polymorphism is S
  VARIANT 97: note = Ancestral polymorphism is S, Derived polymorphism is T
MGRVIRAQRKGAGSVFKSHTHHRKGPARFRSLDFGERNGYLKGVVTDVIHDPGRGAPLAKVTFRHPFRYKHQKELFVAAEGMYTGQFVYCGRRATLSIGNVLPLRGIPEGAVVCNVEHHVGDRGVFARASGDYAIVISHNPDNGTSRIKLPSGAKKIVPSSCRAMIGQVAGGGRTEKPMLKAGNAYHKYRVKRNSWPKVRGVAMNPVEHPHGGGNHQHIGHASTVRRDAPPGQKVGLIAARRTGRLRGQAAATASKADKAT

SEQ ID NO: 273 - protein, 295 aa, Zea mays
  VARIANT 66: note = Ancestral polymorphism is R, Derived polymorphism is C
  VARIANT 106: note = Ancestral polymorphism is G, Derived polymorphism is D
  VARIANT 116: note = Ancestral polymorphism is G, Derived polymorphism is C
  VARIANT 124..295: note = Derived polymorphism lacks residues 124 to 295
  VARIANT 172..295: note = Derived polymorphism lacks residues 172 to 295
  VARIANT 239: note = Ancestral polymorphism is L, Derived polymorphism is R
MGSSGSGKSIVVLGTAPPDSVAQGPGSSGDLPLPPSTIATIYQVRATEIPPLLHAGLCTPDPTSPCSSCASTRPLDGGANFFVGANTGALVTCVNNFPETRDVGLDILKGFVGLSGAVYAQLYQALYGGEDDESLILLVAWLPAAVSVAFVHAICYMSYPRRRRRRAGDELRPFFCFLYLSIALACFLLVMIVVQGQVPFSRAAYGVAAAPLLILLYDRLFYNPFWDNMVDLAVVFEMLFGSDYFEDYVGQLALASIASVEVEENSNRQEARAKVQEKIKELQNEREQKLTQHRR

SEQ ID NO: 274 - protein, 1074 aa, Zea mays
  VARIANT 125: note = Ancestral polymorphism is P, Derived polymorphism is L
MSLDVTQVLLSAQSADGAVRKHAEESLKQFQEQNLPGFLLSLSSELANEEKPEESRRLAGLILKNALDAKEQHRKNELFQRWLALDAGAKAQIKGLLLQTLTSPVASARSTASQVIAKVAGIEIPQKQWPELIGSLLANIHQVQPNVKQATLETLGYLCEEVSPDAVDQDQVNKILTAVVQGMNASEANSDVRLAATRALYNALGFAQVNFSNDMERDYIMRVVCEATQSPDVKIRQAAFECLVAISSTYYDKLATYMRDIFNITAKAVRGDEESVALQAIEFWSSICDEEIDILDEYSSEFTADSDVPCYYFIKQALPALVPMLLETLLKQEEDQDLDEGAWNLAMAGGTCLGLVARTVGDDIVPLVMPFVEENITKSEWRQREAATYAFGSILEGPSADKLAPLVNVALGFMLSALMKDPSNHVKDTTAWTLGRIFEFLHGSALETPPIITAENCQQILTVLLHSMKDVPNVAEKACGALYFLAQGYVDSGSASPLSPFFQDIVQNLLMVTHREDAGESRLRTAAYETLNEVVRCSTEETAAIVMQLVPVIMVELHQTLEAEKLSTDEREKRSELQGLLCGCLQVIIQKLGGMESTKYSFLQYADQMMELFLRVFACRNATVHEEAMLAIGALAYAAGPNFAKYMAQFYQYLEMGLQNFEEYQVCAITVGVVGDLCRALEDKILPFCDGIMTQLLKDLSSNQLHRSVKPPIFSCFGDIALAIGENFEKYLIYAMPMLQSAADLSAHTTATDDEMLDYTNQLRSGILEAYSGILQGFKSSPKTQLLMSYAPHIIQFLDALYNGKDMDDAVMKTAIGVLGDLADTLGVHAGPLINQSTSTQAFLEECLASDDPLAMAGALVFVAVLLAASVGATTATTLTIHNLCPHPVWPLVTPSSGFPSISTNTARLGPNALLSLSFPPTFWAGRVAARTGCDAAASGCWTGTTPPATVVQVTVHDGGNLDQATYSVSLVDGFNVPMVVSPQAVGGGQCPALGCPINLNCDCPPQNRTAEGAACRGPPEYFKNRCPLTRTTPTDVEPVPQSCRAPGELKVIFCQATIVTCGGEAERTVLADS

SEQ ID NO: 275 - protein, 56 aa, Zea mays
  VARIANT 42: note = Ancestral polymorphism is Q, Derived polymorphism is P
  VARIANT 39: note = Ancestral polymorphism is S, Derived polymorphism is F
  VARIANT 30: note = Ancestral polymorphism is V, Derived polymorphism is G
  VARIANT 28: note = Ancestral polymorphism is S, Derived polymorphism is N
  VARIANT 20: note = Ancestral polymorphism is A, Derived polymorphism is S
  VARIANT 11: note = Ancestral polymorphism is A, Derived polymorphism is V
  VARIANT 4: note = Ancestral polymorphism is R, Derived polymorphism is M
  VARIANT 3..56: note = Derived polymorphism lacks residues 3 to 56
MHYRALLLDFAGSLMSGVAAKSINVLFSYVKPAIKDNDFLIQKRAYKVLSMLLKVS

SEQ ID NO: 276 - protein, 429 aa, Zea mays
  VARIANT 105..429: note = Derived polymorphism lacks residues 105 to 429
  VARIANT 185: note = Ancestral polymorphism is S, Derived polymorphism is L
MMLEGKSYLVSRSVPSSCEPEAEWEYLAHAVLSGKRPAPEDDVEVEDPDETGSGGKRSKPPSPQPHTPDICEGHGSNRHATGSGEQRITGSNPMTSIGRDLTLNCLLRLSRSDYGSVASLSRDFRSMVRSGEIYRLRRQNGVAEHWVYFSCNVLEWDAYDPYRERWIQVPKMPPDECFKCSDKESLAVGTELLVFGMARIVFRYSILTNSWSRADPMNSPRCLFGSTSVGGKAFVAGGTDCVGNILSSAEMYDSETHTWTPLPSMNTARKMCSGVFMDGKFYVIGGVANSNRVLTCGEEYDLKRGSWRTIENMSGGLNGVTGAPPLIAVVSNELYAADYGEKDLKKYDKKNNRWITLGKLPERSVSMNGWGLAFRACGDRLIVIGGPRTYTGGTIELNSWIPDERPPVWNLIARRPSGNFVYNCAVMGC

SEQ ID NO: 277 - protein, 140 aa, Zea mays
  VARIANT 118: note = Ancestral polymorphism is K, Derived polymorphism is N
  VARIANT 43: note = Ancestral polymorphism is R, Derived polymorphism is S
  VARIANT 39: note = Ancestral polymorphism is E, Derived polymorphism is A
MEDEDDKKEVAVVGSSAADPVADSSAADASHEYTGIEKEIFDRLLERRIDEAVYRPSVFREQLHRHFKRLPRSYAINLNAEDVLLHSKILECAADPDKRPVFHARFLKVSITTQLDLNSAIYVLYLAKARQHISREYVFV

SEQ ID NO: 278 - protein, 580 aa, Zea mays
  VARIANT 147..580: note = Derived polymorphism lacks residues 147 to 580
  VARIANT 266..580: note = Derived polymorphism lacks residues 266 to 580
  VARIANT 272..580: note = Derived polymorphism lacks residues 272 to 580
  VARIANT 474..580: note = Derived polymorphism lacks residues 474 to 580
MGSAAASPQPSGNLTQDELKRVAAHRAVEFVESGMTLGLGTGSTAAHALDRLGDLLRAGALPGVAGVPTSLKTEAHAARVGIPLLPLDAASGASIRLSIDGADEVDPDLNLVKGRGGSLLREKMIEGAGDRFVVIVDESKLVPRLGCTGAVPVEVIPFGAPHTLGLIRKVFDGVPGFHARLRTVPAANGEDSDAPFLTDNGNYIVEMFFEDGIRGDLLDISDRLLRITGVIEHGMFLGMATTVIVANKDGTVTVINKKKMNQAVSSTSTRGRGKSERVWTYFEDEALLKALFELSLDPKWKSEGSFKNGYLSVLKATLAEKIPGCGLTAVPHIESRVRHFRTKYGAIEVMLANSGFSWDENRKMVQCEKQQYEDHCKRHPDAKGLYGISFPHLDTLAAIYGKDIATGKGAEGLGDAISNLEKEITLEESHDREVEEDSMSRETPRWASDRNLLDSTSSTSKRRKRDKGNEVRKSSDPFLDMLGEFRDDLKNASNHFGKMTEIMEREAKLQEEAAHKDPMQVLQQKSITELTRLGFTSTELVKAASVFVNVPNQMTMLFALPETLRRGFILNMLANEAQKN

SEQ ID NO: 279 - protein, 285 aa, Zea mays
  VARIANT 37: note = Ancestral polymorphism is R, Derived polymorphism is H
  VARIANT 41..285: note = Derived polymorphism lacks residues 41 to 285
  VARIANT 64: note = Ancestral polymorphism is A, Derived polymorphism is T
  VARIANT 79: note = Ancestral polymorphism is V, Derived polymorphism is A
  VARIANT 83: note = Ancestral polymorphism is R, Derived polymorphism is H
  VARIANT 108..285: note = Derived polymorphism lacks residues 108 to 285
MAASTVAATARKGALTDQRFSELSPALSLEVVEALDRGGFQWCTPVQAAAIPHLLSHKDVAVDAATGSRKTLAFIVPVVEILRRRSSPPKSHEVLAMIISPTRELSLQIFNVAQPFFATLNGVSSMFLVGGLDIKAELKKVEEEGANILVGTPGKLFDIMHTDALEYKNLEILILDEADRLLDMGFQKHINFVLSMLPKLRRTGLFSATQTKAVADLSKAGLRNLIRVEVKTEAKSTSKDAGQQELGPSITPLGLRLEYMVCEASKKSSQLADFLVQNSGKKIMV

SEQ ID NO: 280 - protein, 361 aa, Zea mays
  VARIANT 194..361: note = Derived polymorphism lacks residues 194 to 361
MNNHVSILAVLIVYVSVVLLLNSHVGLCSCYKRIFSFGDDTMDTGNFVHLIGKAPSKYKEAPYGKTFFRHATGRISDGRVLIDFYAEALKLPMIPPILPEKNSGYFPHGANFAVLGATARDRLFYSGSPWCLGAQISWFNEMVDRIAPGDAAKEQFLSDSLVVLGGIGGNDYYSYFIDGEPPKDGNIISDVIAYISHMIEELILINGAKAFVVPNNFPIGCLASYLSRFHSDNHEDYDEHGCIKSLNEFSQKHNEQLYSDIGRLRFTYPNVKLIYADYYNATMEFIKNPGRFGIGDPLVACCGGNGPYHTSMECNGTAKLWGDPHHFANWDGMHMTEKAYNIIVEGVLNGPFADPPFSLSC

SEQ ID NO: 281 - protein, 388 aa, Zea mays
  VARIANT 73: note = Ancestral polymorphism is R, Derived polymorphism is W
MDGAIQRVYTRKNWSSMVLYNYSHPNNVVPVTSEIVSAQTGTFLHLLPGSTMTRSGNCPSPETSSSVTTRLTRLIWPHAPGPSTIPPTVAVCVWVVLCRPGTHASSGASSGSSPAEPNSCLSDRGTLPTLDIVCGLKIQRLLGSARFGASLCPWGVLSRASGDFCAARRSALGLRFMVLLIHVLFVGAVFILSPVSPFPFYSLRVAACSRATVGMLLGGEDMHRFPVRSPRMDRDDLIRSPAARQIVSNYFGYPEHTPPLLAPLLRLFRFVSTSRPITLPRHRWTEQHVRADVGRAHPVPAEAHVRLRHLRVRRDGEGHPEQGQPALRVRRALVKPYKEKGKVPGRFRKLQHAHHGGAEFAGCASPTGLLDSRDPYALLLLSSAQVFS

SEQ ID NO: 282 - protein, 300 aa, Zea mays
  VARIANT 252: note = Ancestral polymorphism is A, Derived polymorphism is V
MPAGRSAPARGAAVAAMLLLTMLARLPCLEAQSSRRPTVLTVDMTGKGDYRTIQEAIDAIPAAANNSTSAAIVTINVNPGIYTEKVVVNKAGVSLVGRSATSTIVTWSGPWNQNHQSEFALYVQATDFVAKGLTFQDTLLDATGRHYYRGCYIEGATDFIFGTGKAFFESCHLHSTSDAKGAFTAQRRSTESENAGFSFFRCESTGTGVATAILGRPWGPYARVVFALCNMSNTVAPEGWNNWDNTANEKTAFFGQFQCYGQGSGTQGRVTWAHNNLSPNEAAPFLTNAWVDGQDWLRPQ

SEQ ID NO: 283 - protein, 152 aa, Zea mays
  VARIANT 112: note = Ancestral polymorphism is P, Derived polymorphism is S
  VARIANT 74: note = Ancestral polymorphism is R, Derived polymorphism is I
  VARIANT 73: note = Ancestral polymorphism is S, Derived polymorphism is L
  VARIANT 56: note = Ancestral polymorphism is L, Derived polymorphism is P
  VARIANT 30..152: note = Derived polymorphism lacks residues 30 to 152
MIWNNVYEKGLVDVMHDHKDNPKFKGQNGWNRDGWNSITTKFNEKFPLAHFSKQQLQEKERELKGYYKAIRDSRKESGVGWNDTFFMVLAEPEVWPRLIRAHPKVSKFRNRPFPLFYSLEGLYEGSVATGELNFTSTAADLPPPSAPSRSVS

SEQ ID NO: 284 - protein, 168 aa, Zea mays
  VARIANT 56..168: note = Derived polymorphism lacks residues 56 to 168
MRRPAPPFTAPSSSSQVASIFVPIVITLSIVTFSAWFLCGWLGAYPNSWVAENSNCFVFSLMFAISVVVIACPCALGLATPTAVMVATGIGANHGVLVKGGDALERAQPQGKAVVTAAKVFSGMDLGDFLTLVASAEASSEHPLAKAILDYALHFPFLWQASFIKRWH

SEQ ID NO: 285 - protein, 361 aa, Zea mays
  VARIANT 218: note = Ancestral polymorphism is P, Derived polymorphism is L
MNNHISILVILIVDVSVVLLLNSHVGLCSCYNRIFSFGDDTMDTGNFIHLIGKAPSKYKEAPYGKTFFRHATGRISDGRVLIDFYAEALKLPMIPPILPEKNFGCFPHGANFAVFGATARGKVFFSGSPWCIGTQMYWFDQLVDRIAPGDAAKKQFLSDSLVIMGGIGQNDYYSYFIKGKPPKDGNIISDVIADISHFIEELIVVNGAKAFVVANNFPVGCLASYLSRFHSDDHEDYDEHGCLKSFNEFSQKHNEQLYSAIGQIRYSYPNVKVIYADYYNATMEFIKKPSRFGIGDPLVACCGGNGPYHTSMECNGTAKLWGDPHHFANWDGMHMTEKAYNIIMEGVLNGPFADPPFPLSC

SEQ ID NO: 286 - protein, 649 aa, Zea mays
  VARIANT 25..649: note = Derived polymorphism lacks residues 25 to 649
MAGKGDGPAIGIDLGTTYSCVGVWQHDRVEIIANDQGNRTTPSYVAFTDSERLIGDAAKNQVAMNPINTVFDAKRLIGRRFSDASVQSDIKLWPFKVIPGPGEKPMIVVQHKGEEKQFAAEEISSMVLIKMREIAEAYLGSTIKNAVVTVPAYFNDSQRQATKDAGVIAGLNVLRIINEPTAAAIAYGLDKKATSVGEKNVLIFDLGGGTFDVSLLTIEEGIFEVKATAGDTHLGGEDFDNRMVNHFVQEFKRKNKKDITGNPRALRRLRTSCERAKRTLSSTAQTTIEIDSLYEGIDFYSTITRARFEELNMDLFRKCMEPVEKCLRDAKMDKSSVHDVVLVGGSTRIPRVQQLLQDFFNGKELCKNINPDEAVAYGAAVQAAILSGEGNEKVQDLLLLDVTPLSLGLETAGGVMTVLIPRNTTIPTKKEQVFSTYSDNQPGVLIQVYEGERTRTRDNNLLGKFELSGIPPAPRGVPQITVCFDIDANGILNVSAEDKTTGQKNKITITNDKGRLSKEEIEKMVQDAEKYKSEDEEHKKKVESKNSLENYAYNMRNTIKDEKIASKLAADDKKKIEDAIDAAISWLDANQLAEADEFDDKMKELESLCNPIIAKMYQGAGADMGGSGGMDEDAPAGSGGPGPKIEEVD

SEQ ID NO: 287 - protein, 288 aa, Zea mays
  VARIANT 20: note = Ancestral polymorphism is A, Derived polymorphism is V
  VARIANT 52..288: note = Derived polymorphism lacks residues 52 to 288
  VARIANT 106..288: note = Derived polymorphism lacks residues 106 to 288
  VARIANT 130..288: note = Derived polymorphism lacks residues 130 to 288
MGRPGPQKHAHAARLADVLAVPYISMGVLLRQELNPALQLYRKVGGSCSPVRYEEKLENFCKLMDFVIDSAPPELRQEAHFSMVDRMKHRVEKSAFWGHLLRHVMQQGQKNMVEFFDLLLSPASKILNTWFESEVLKATLATDAMIGAMAGVHTPGSGYVLLHHVMGETGGLGLNEEVPPNMDSKTKFSDVKGVDEAKAELEEIVHYLRDPKAALEEILYQFEEKLQVEREEAARKQEELQAQLQAQQVALEENQSLLRQAQVEVKGMHTKFEETNALLRVVLKLQKD

SEQ ID NO: 288 - protein, 369 aa, Zea mays
  VARIANT 272: note = Ancestral polymorphism is S, Derived polymorphism is L
MTGCLWPCVGAAVAGHGAGHRKAGLFRSKPRTPAEVVQHARDLVTYILDNKDGCGAGKRDAKHEHRMVELSKEVKEMKGILYGNGEEDPCEEACKQLTKEFFKKDTDTFRQLIVCLQYVDLETQKDITQVIANLQRQKVDSRLVASDYLETNLDLLDILMSGYGNLDIAIHYSTLLRDCIRHQVAARYVLESPHFRTFFDHIQFPDFNVQSDVFKTFKELMTRHKSTAAEFFSKNYDWFFAEFNSKLILSASNYFIRRKAIQLLRDILLERSNAAVMVRYVSSKEHLMIQMNLLRDESIAIQVEAFHVFKLFVANKEQAPEITGILLANRSKLLRFLKDFTTVEKDDKKFEADKATVISEILALNGAEK

SEQ ID NO: 289 - protein, 115 aa, Zea mays
  VARIANT 12: note = Ancestral polymorphism is L, Derived polymorphism is P
MLAASSMPLAVPLFLLVVVASAVPATAEYSGARMVIIRSGPGTRVGGGAAGAQSNKWRRHYRRLEDERGGSIDYRVLDKNTSGCVKGNQCATKGSGGSYTRPCMYKEGCPNGPTD

SEQ ID NO: 290 - protein, 170 aa, Zea mays
  VARIANT 105: note = Ancestral polymorphism is D, Derived polymorphism is E
  VARIANT 95: note = Ancestral polymorphism is G, Derived polymorphism is R
  VARIANT 57: note = Ancestral polymorphism is E, Derived polymorphism is K
  VARIANT 36: note = Ancestral polymorphism is R, Derived polymorphism is C
  VARIANT 31: note = Ancestral polymorphism is A, Derived polymorphism is T
  VARIANT 22..170: note = Derived polymorphism lacks residues 22 to 170
MKRPTSFADKILSKMREGLECWDRETREYVAIKVVRSTRKYRDAAIIEIDVLNRLAKNEKYRSLSFVLYPSSDCFFCSTTNMLNMTGRGLEVKPGPTVKCVLGHDFILHFLVLHLGNQRKVKVPCQNEEKELNIPVIKENGKGDGKEDQRSEEKAVAAASKSNLGLEKKQ

SEQ ID NO: 291 - protein, 122 aa, Zea mays
  VARIANT 119: note = Ancestral polymorphism is I, Derived polymorphism is T
  VARIANT 92: note = Ancestral polymorphism is S, Derived polymorphism is N
  VARIANT 36: note = Ancestral polymorphism is D, Derived polymorphism is G
  VARIANT 23: note = Ancestral polymorphism is P, Derived polymorphism is L
MRSPVLTRLLAAALLVASSSAALSQAAWVPVLDVNDLVIKQVAQFAVLVYGLAHHRDLAYVGVVRAQTEQAVGGGTNFRLVVVAARPDGGGSTARYDCLVWGVPGSRSDTWKLRRFRKIVQG

SEQ ID NO: 292 - protein, 115 aa, Zea mays
  VARIANT 101: note = Ancestral polymorphism is P, Derived polymorphism is S
  VARIANT 92: note = Ancestral polymorphism is Q, Derived polymorphism is R
  VARIANT 49: note = Ancestral polymorphism is V, Derived polymorphism is D
  VARIANT 46: note = Ancestral polymorphism is A, Derived polymorphism is V
  VARIANT 23: note = Ancestral polymorphism is A, Derived polymorphism is V
  VARIANT 21: note = Ancestral polymorphism is A, Derived polymorphism is T
  VARIANT 16: note = Ancestral polymorphism is V, Derived polymorphism is I
  VARIANT 13: note = Ancestral polymorphism is A, Derived polymorphism is T
  VARIANT 11: note = Ancestral polymorphism is A, Derived polymorphism is V
  VARIANT 6: note = Ancestral polymorphism is G, Derived polymorphism is S
MRSLAGVSFIVLAVVVVAGAASARFVDPPDADVPAGTHPLQIGRFAVLVYNLNRGAKLKYVGVSNSDRHPHQGGVRYKMVVTAADASGATAQYQVVVWGIPGTFQWMLLEFKKIN

SEQ ID NO: 293 - protein, 492 aa, Zea mays
  VARIANT 13: note = Ancestral polymorphism is P, Derived polymorphism is L
  VARIANT 207: note = Ancestral polymorphism is N, Derived polymorphism is S
  VARIANT 218: note = Ancestral polymorphism is K, Derived polymorphism is M
  VARIANT 353: note = Ancestral polymorphism is I, Derived polymorphism is T
  VARIANT 356: note = Ancestral polymorphism is G, Derived polymorphism is V
MAVKEEEVILAAPDAALGSGGVVLGRGRRNRLDDDEEDLELQRRSSKQSALQGDGDERDVFEKYIMTCPETCTEQMQQLRIAMQEEAAKEAAVAAGNGKAKGRRGGREVVDLRTLLVHCAQAVASDDRRSATELLRQIKQHASPQGDATQRLAHCFAEGLQARLAGTGSMVYQSLMAKRTSAADILQAYQLYMAAICFKRVVFVFSNNTIYNAALGKMKIHIVDYGIHYGFQWPCFLRWIADREGGPPEVRITGIDLPQPGFRPTQRIEETGRRLSKYAQQFGVPFKYQAIAASKMESIRAEDLNLDPEEVLIVNCLYQFKNLMDESVVIESPRDIVLNNIRKMRPHTFIHAIVNGSFSAPFFVTRFREALFFYSALFDALDTTTPRDSNQRMLIEENLFGRAALNVIACEGTDRVERPETYKQWQVRNQRAGLKQQPLNPDVVQVVRNKVRDLYHKDFVIDIDHHWLLQGWKGRILYAISTWVANDAPSYF

SEQ ID NO: 294 - protein, 99 aa, Zea mays
  VARIANT 98: note = Ancestral polymorphism is R, Derived polymorphism is T
  VARIANT 89: note = Ancestral polymorphism is I, Derived polymorphism is T
  VARIANT 84..99: note = Derived polymorphism lacks residues 84 to 99
  VARIANT 60: note = Ancestral polymorphism is E, Derived polymorphism is K
  VARIANT 39: note = Ancestral polymorphism is L, Derived polymorphism is F
MTVRPQLRPRRPFTALSQEEADLALARVLQERERAYMLLRMNGGGGEGSDYESSDEGSYEYDEDGEEDYEEELELSLVSVIGEQWRWSTRRIMRMIHRL

SEQ ID NO: 295 - protein, 270 aa, Zea mays
  VARIANT 4: note = Ancestral polymorphism is S, Derived polymorphism is N
MNSSRQMELHYINTGFPYTITESFMDFFEGLTYAHADFALTDGFQDQGNPYWAMMHTNSYKYGYSGPGNYYSYAHVYDIDDYMRRADGGRRIWDNTTPVNNVDSANVVLQGGEAPHTTTNTINKECIQQVHQSPGSPQVVWQDNIEPDNMTYEIIFFVCALYGALSFITQELLDLGEAVGTQSRGLSQERISSLPVTKYKCGFFSRKKTRRERCVICQMEYRRGNLQMTLPCKHVYHASCVTRWLGINKVCPVCFAEVPGEDPEAMSQQL

SEQ ID NO: 296 - protein, 437 aa, Zea mays
  VARIANT 193: note = Ancestral polymorphism is R, Derived polymorphism is G
  VARIANT 186..437: note = Derived polymorphism lacks residues 186 to 437
MANLKPALVVLYSLALLQGVLFYYRAISSLEEQRLLKLVAQAYGLDEDDKTRGSISEYLREIRVGCEKDPSFGRGRNLITYAAGLMQSNSPDSYLSGARIIDTLIRLPMSMEENQHKLMDMVGSAPASSGDAMARNLVRFIRTRVPDSVVESQRMLMNNMIGSASSGAIKKFVQMLDCRNQSDSAEIRLRAMRIVAYFAIEIRLSKIPHAIQCISSFLSNSEASHRQHKETIIYILWKLTDDEENLRLMSNTNGLALKIIGMLVDSDREELHNSNHGTWCSNIALPGMEVIKRFTSVMKRSNSMQLPREILESTDAISTLESMLDCQQCKVEEELQKSVIMVLTQITSMETSLAVGDEVKKRLDQIQKRLILSLIAIFLDGGDGKSSVKKLAGESLVQLSLVHENSATFLGAAGDGRVVDSLTRVVLDKNSEHQQIS

SEQ ID NO: 297 - protein, 127 aa, Zea mays
  VARIANT 115..127: note = Derived polymorphism lacks residues 115 to 127
  VARIANT 113: note = Ancestral polymorphism is A, Derived polymorphism is T
  VARIANT 86: note = Ancestral polymorphism is A, Derived polymorphism is T
  VARIANT 76: note = Ancestral polymorphism is A, Derived polymorphism is V
  VARIANT 66: note = Ancestral polymorphism is R, Derived polymorphism is H
  VARIANT 53: note = Ancestral polymorphism is G, Derived polymorphism is S
  VARIANT 49: note = Ancestral polymorphism is G, Derived polymorphism is C
  VARIANT 32: note = Ancestral polymorphism is W, Derived polymorphism is R
MAPPPPEDLQCAMNVKRAMSSALAAGDEELWWLWRCVEAAAKGFAIGVCLKGSLVLFSILVRIRSRRSHRSRKVGAMTNEEVVVLTVKETVRYGLFLGTFAGSYVSIDEYIAAVWGRKWSLHGTITV

SEQ ID NO: 298 - protein, 632 aa, Zea mays
  VARIANT 545..632: note = Derived polymorphism lacks residues 545 to 632
MDRDEEVGHGDRSLLFIGDEDDLGVDRDGGSPPTSSDDGSFSDRSDAETRAGHVRRRDGGEREDTPEDGQNGAWPQSYRFVNQPPRRPHLFHDSELTPFPRRRSRFACRQSIDMLSAVPSPTMNSIMAASPSLTRFGSSFLKAGSSFFLRKGEGSGLPLTRPLLPPSLPQLSQSSLHPQPRPVKQSTDSLAQAPRWPAAHEAELPERPSRQCLKSDYIELPPPASKCSRNQSIINGVRVISLWNQSSMLVEFLGFNVLCGVGILTTAYGIKEGGWLSLLLLPLLGGSSCYTGLLLKRCIDSSPNIETYPDIGQVAFGIFGRIFVSVVLYMELYASCVEYITLLGDSLSSVFPSAHLAFTGIDLNAHNLFATTMALAILPSVWLRNLSLLSYLSAGGVIATITVIVCLCWVGIGEGIGFRFSGAVVNVTHLPVALGLYGYCYSGHSVFPNIYSSMKERSQFPFVLMFCFTVVTLVYAGVAVSGFLMFGESTMSQFTLNLPQQYIPSKIAIWMTVVNPYTKYALTMTPVALSIEEALPKKMQSYLVGMLVRTCLVLSTVAVALLFPYFALVMALLGSVFTMLVALILPCACYLSIKKGAVPLWEIILCIIIIAIGVVCACIGSFTSINQMISSR

SEQ ID NO: 299 - protein, 110 aa, Zea mays
  VARIANT 16: note = Ancestral polymorphism is R, Derived polymorphism is Q
  VARIANT 19: note = Ancestral polymorphism is T, Derived polymorphism is M
  VARIANT 52: note = Ancestral polymorphism is P, Derived polymorphism is Q
MDDCGGGGKRPFQLARSLTYHHHPGHRPAAASRWRRQHQQHQLADEPRAPRPQAVVLYTTSLRGVRRTFADCAAVRAILRGCHHPATAQPHKGRPIACSSPQRFHARRCH

SEQ ID NO: 300 - protein, 105 aa, Zea mays
  VARIANT 5: note = Ancestral polymorphism is Q, Derived polymorphism is H
MVVIQVFVFTTVTNNLLLLVLLNFEEIFRFEARFSEVWKLLLILTNFSKEVWFNSALFVQARATGCLIHIQFAGESILWPYYLFSTDDGSSRMVSKVMPASTLIT

SEQ ID NO: 301 - protein, 105 aa, Zea mays
  VARIANT 85: note = Ancestral polymorphism is R, Derived polymorphism is W
  VARIANT 84: note = Ancestral polymorphism is A, Derived polymorphism is T
  VARIANT 52: note = Ancestral polymorphism is A, Derived polymorphism is V
  VARIANT 38: note = Ancestral polymorphism is T, Derived polymorphism is I
MDLQKCFTYIKDVTDDSYVQNYDGKVRDVIYSENGTVTVVYRVILKGTDGEAYRDATGTTQFHEGRREDVVASAEEAAFSKACARFGFGLYLYHQDDSHYDDHFH

SEQ ID NO: 302 - protein, 1129 aa, Zea mays
  VARIANT 667..1129: note = Derived polymorphism lacks residues 667 to 1129
  VARIANT 632..1129: note = Derived polymorphism lacks residues 632 to 1129
  VARIANT 619..1129: note = Derived polymorphism lacks residues 619 to 1129
MCGIALVLASDRLVIVPCATATTAALETQHSCKRKGVPDELKEALRRRGPDSLGYRSRCLLADGTVVVGDGCNDGVEGKIGVSDSSVADLFFIGATLHLRGAKLVSQPLVAPSGSVFLYNGEIYGGIQVADDENDTQALFNSLESCCSCDCHALGRDKTCTCCGTGSGAKSVLQMKSNTIWFGRDAFGRRSLLVHWPTADDSHFILSSVSPPSFAKIHSDQTVSDRDMSNHTKASYWEELPCGIYSMHMKDIGKHGACMKEGWIVEVNTHKWMASSLNGLIKWERKLTVPTMENIPVDRGNHQLSQSFISSREPEENTNNGITKADFLSDSSLCDANCITQSAHRVLVALRESVMLRTKMNTLFQGTLDRSEDGESAPIAVLFSGGLDSMLLAALLDQCIDSKWIIDLLNVSFDGQLAPDRISAIAGLKELQRISPCRRWRLIEIDTALTDLNGESEHVMSLIHPSNTFMDLNIGIALWLAAGGDGWVDGSICRMQDGSRYKYRSRSRVLIVGSGADEQCAGYGRHRTKYRLGGWNALDQEMRLDVQRIWKRNMGRDDRCISDHGKEARFPFLDENVIKTLLEIPLWEIAKLDEPVGRGDKKILREVARLLGLQEAALQPKRAIQVHILTRYLALVVRFKDSEGVEPQELRQQQSREPGISRQRADSPESSFSSGVGHTPAISYQQSAMNTLSCDKCRMAASRERERAGGARFDALLSVGQSIRVGRWRSPRDLNPSGRLPVRICDQPCSVLRRHECLEGVGRRSGGDMSGGGSGSGDEFGRAVARAAVAQALEAAGFDCAHRSAVDAVVDVLLRYITHLGRSAAFNANLAGRALANELDVIQVLEEVGADTDGFAGAADTGRCLVGSGVVRDLMAFVDSKDEVPFARPLPRFPVQRVQPQPSASPAAAAAGRETGLKHVPEWLPAFPDPHTYVSTEVWDEPSATKDRVDKVEQVRQRRKAEKSLLSLQRRLAMAGADGFHPAVALAEDSAEKGKEIQAAGTKRNPFLEPALPPGEKDVSEVGMPPEKKKLSVLEAFAPAMQSRTIVRDVDAGAGLDENQRSIVPKERAPVHLKIGFGKKPLAAALNSRTLDLREDPSFLKEEAKDDKKRRAGMILRASMENPQELPQL

SEQ ID NO: 303 - protein, 174 aa, Zea mays
  VARIANT 145: note = Ancestral polymorphism is H, Derived polymorphism is R
  VARIANT 83: note = Ancestral polymorphism is G, Derived polymorphism is R
MQAEKYQNRLPTVIMTVVEMDLVGNTRTGSRQLRTDSQKYQNMLYSILLKRISSRMFFLETIRLRLVWDRANEFIPERFNLQRPVPNESNTDFRFIPFSGGPRKCVGDQFALLEAIVALAVVLQKMDMQLVPDQKINMTTGATIHTTSVRKHAMHIFYNTLVLFIIQLISIGVK

SEQ ID NO: 304 - protein, 193 aa, Zea mays
  VARIANT 157..193: note = Derived polymorphism lacks residues 157 to 193
  VARIANT 136: note = Ancestral polymorphism is L, Derived polymorphism is H
  VARIANT 87: note = Ancestral polymorphism is T, Derived polymorphism is A
MASLSVAAVAATIAMPSSSGGRGRRLRVASMATQKGQKPTPKTVSGTRRSGTTTVFPVGEPGPRPATTSGKAPVKLLTNVEKLRLLTKAERAGLLSAAERAGLSLSAMERLGLLSKLEELGALSAATDPGTPGALLALALPLLAAGPAVVYLVPEEQAWQVALQAVAALVCVVGGAAAVAASTFVSRLQGSSS

SEQ ID NO: 305 - protein, 647 aa, Zea mays
  VARIANT 396..647: note = Derived polymorphism lacks residues 396 to 647
MRAPLLLWAAATWLAVSAVAHPGRRGGGGGEQPLSRIAVESAVLAVDDAAHVRASPLVLGLKGESSEWVDVEFFHPDPSSDDWIGVFSPADFSAAICEPENPRQSPPVLCSAPIKYQFATFKNDGYNKTGKGYLKLQLINQRGDFSFALFSGGLLKPKLIAVSNKVAFANPKAPVYPRLAQGKSWNEMTVTWTSGYDITEAVPFVEWGEKGGRRFLAPAGTLTFDRNSMCGAPARTVGWRHPGYIHTSYLKDLWPDSRYTYRLGHRLMNGTRVWSKSYSFRASPYPGQDSLQRVVIFGDMGKAEADGSNEFNNFQPGSLNTTYQITSDIENIDMVVHIGDICYANGYLSQWDQFTAQIEPIASTVPYMVGRSAECLSVRYSLISCPSHVYNTAYKKRSFCSGNHERDWPGTGSFYGNLDSGGECGVPAQTVFYTPAENRAKFWYATDYGMFRFCVAHTEEDWRPGTEQYRFIERCLSSVDRQKQPWLVFLAHRVLGYSSCAYYESEGTFEEPMGREALQELWQKYKVDLAFYGHVHSYERTCPVYQSQCVVDASDHYSGPFQATTHVVVGGAGASLSEFAASKIQWSHFTDFDHGFVKLTAFNHSSLLFEYKKSRDGNVYDRFTISRDYRDVLACSVDNCPRTTLAS

SEQ ID NO: 306 - protein, 139 aa, Zea mays
  VARIANT 117: note = Ancestral polymorphism is P, Derived polymorphism is L
  VARIANT 100: note = Ancestral polymorphism is F, Derived polymorphism is L
  VARIANT 76: note = Ancestral polymorphism is L, Derived polymorphism is F
  VARIANT 72: note = Ancestral polymorphism is R, Derived polymorphism is M
  VARIANT 44: note = Ancestral polymorphism is R, Derived polymorphism is H
  VARIANT 16: note = Ancestral polymorphism is D, Derived polymorphism is Y
MMGSYGEPMGRDGLQDLWQRAGESKMIWIITAGGAVQRDDPCHRWLRRRREPVYVQRQCAVLELLQGRRHLMFGKLTAINSSFLLFEYKKSRDGHVYDRFSLARLPSPGGLLRRQLPPKHLGRLIELRTLETCVDRYTV

SEQ ID NO: 307 - protein, 189 aa, Zea mays
  VARIANT 151..189: note = Derived polymorphism lacks residues 151 to 189
  VARIANT 148: note = Ancestral polymorphism is R, Derived polymorphism is Q
  VARIANT 138..189: note = Derived polymorphism lacks residues 138 to 189
  VARIANT 124: note = Ancestral polymorphism is P, Derived polymorphism is A
  VARIANT 123: note = Ancestral polymorphism is G, Derived polymorphism is S
  VARIANT 122: note = Ancestral polymorphism is A, Derived polymorphism is V
  VARIANT 110: note = Ancestral polymorphism is P, Derived polymorphism is S
  VARIANT 99: note = Ancestral polymorphism is A, Derived polymorphism is V
  VARIANT 84: note = Ancestral polymorphism is G, Derived polymorphism is S
  VARIANT 82: note = Ancestral polymorphism is R, Derived polymorphism is C
  VARIANT 70: note = Ancestral polymorphism is T, Derived polymorphism is M
  VARIANT 62: note = Ancestral polymorphism is L, Derived polymorphism is F
  VARIANT 50: note = Ancestral polymorphism is L, Derived polymorphism is Q
  VARIANT 25: note = Ancestral polymorphism is P, Derived polymorphism is L
  VARIANT 10: note = Ancestral polymorphism is A, Derived polymorphism is T
MEPSSPRILAAVFVPKFSPRILALPHRTFGVSTTITAVASPCPRNHRGGQIHYLAFLPGDVLFIAHHLATLFVFLTCCHLVRHSAYALLVLAERDQSPAAARVYSALSPSFYALYTLVRGVAGPLFLLKMAAFYLSSQAVDAIPWWVRISWILVVGTAIAVSNLWIWNLWKELIREWKQQAPPKSKKDT

SEQ ID NO: 308 - protein, 610 aa, Zea mays
  VARIANT 20..610: note = Derived polymorphism lacks residues 20 to 610
  VARIANT 63: note = Ancestral polymorphism is F, Derived polymorphism is S
  VARIANT 169: note = Ancestral polymorphism is S, Derived polymorphism is Y
MASPRGGFDEQDRRTEKGTEVFVGGLPRSATESTLREIFSSCGEIIDARIMKDQSGHSKGYGFVRFAKRDYANTAKRQKNGIEVQGKRLVVELSMDQDTVFFGNLCKEWTLEEFEELIHKAFKDVVSVDLAMASNLGSSNKKNINRGFGFVRFSSHAVSLSLTGGQKFSFLAAARVIRIGSRTDFMLGDILHPAINWADKESHLDPDEMAKMKSAFIGNLPEDVNEEYLRKLFGQFGEVVRVAISRKGQCPVAFVHFAKRSELENAIEEMDGKTVSVARPTADNDKKRSREEVRTRRSNASGDRRDYSHGRYGHDSLDRQVKAPRLSNYVADAADPYESAVNSLPSAVKEVLLRILRLRIGTRYDIDIHCVKSLDELPESSALAVLNQFLISGGDKHNKGDYFASLVAKHQAETFGLTHALHGTTYLSRNPEMHSKRYPHEDYDFVTPRSSRYDSSAHHPSTYYEDDPPVSESRVRRYAEERSTIVRSPEPRPRYDETDIRINPEPRLPYESRHNAEKHLDRRYIQEHSSNIERPAEEALLSRERRFLPAAGYMPNPGGSDFRSRSPAEYSAQRQQMRFDPFTGEPYKFDPFTGEPIRPDPNQRRSGSLY

SEQ ID NO: 309 - protein, 107 aa, Zea mays
  VARIANT 73: note = Ancestral polymorphism is R, Derived polymorphism is C
MKVPRVESKLQIFAFKIQFQSQIRDVRKNLQTVSSACEELRSSEKLKVIMKNILLIGNTLNQGTPRGQAVGFRLDSLLKLIDTRATSGRMTLMHFLCKVCSELKSKN

SEQ ID NO: 310 - protein, 125 aa, Zea mays
  VARIANT 82: note = Ancestral polymorphism is D, Derived polymorphism is Y
  VARIANT 69: note = Ancestral polymorphism is T, Derived polymorphism is I
  VARIANT 66: note = Ancestral polymorphism is T, Derived polymorphism is I
  VARIANT 65..125: note = Derived polymorphism lacks residues 65 to 125
  VARIANT 60: note = Ancestral polymorphism is Y, Derived polymorphism is S
  VARIANT 44: note = Ancestral polymorphism is G, Derived polymorphism is R
  VARIANT 32..125: note = Derived polymorphism lacks residues 32 to 125
MAEGRVGAIVDWAHRSISHHHGRVDLRSQTRLMVIVGNIRGLGGDEINGHKVMKIMLEAYPPRNETVLTLTRKKFEHFTPSDVLGRIMTFDMQKEEAFEGKLGELQTRLDGIKIKEIARKANKST

SEQ ID NO: 311 - protein, 129 aa, Zea mays
  VARIANT 72: note = Ancestral polymorphism is A, Derived polymorphism is V
  VARIANT 94: note = Ancestral polymorphism is G, Derived polymorphism is R
MAATASLTTTAPSPPALLKASAPLLISFRPVSRHCKNLCIKTKATENDQSAKKHQKVKSILCQDCEGNGAIVCTKCEGNGVNSVDYFEGRFKAGSLCWLCRGKREILCGNCNGAGFLGGFLSTFDETAQ

SEQ ID NO: 312 - protein, 950 aa, Zea mays
  VARIANT 426..950: note = Derived polymorphism lacks residues 426 to 950
MRSCRPSSRAAAAIAMSKRATKPYKPQVSLLELQHALGQIPPQMLQNLRNLENISLANNELSGHIPPYLFNTTPSLIHIHFGSNHLSGPIPHTLGSLPRLDYLVINDNELLGTIPATMFNMSRVQVFSLELNNLTGEVPYNQSFNLPMLWWFSISGNNIQGRIPLGFAACQRLQVLYLGGLPHLTGPIPAILGNLTRITDIDVSFCDLTGHIPPEIGLLQDLKNLRLGNNRLTGPVPASLGNLSALSLLSVESNLLSGSVPRTIGNIPGLTQFRFSWNNFNGGLDFLSSLSNCRQLELLDIYNNSFTGPLPDQVGNLSTYLIEFRANANKLSGELPSSLSNLSSLVSIYFHDNLLTGAIPESITRLQNLILFDVASNQMSGRLPTQIGKLKSLQQFYTNGNKFYGPIPDSIGNLTSIEYIYLSDNQLNSTVPSSLFQLPKLIYLDLSHNSLTGSLPVDVSGLKQVDFVDLSSNYLFGSIPESFGTLKMLTYLDLSFNSLEGSIPGLFQELESLASLNLSSNSLSGTIPQFLANFTYLTDLNLSFNRLEGKVPEGGVFSRITSQSLLGNPALCGAPRLGFLPCPDKSHSHTNRHLITILIPVVTIAFSSFVLCVYYLLTTRKHSDISDPCDVVAHNLVSYHELVRATQRFSDNNLLGTGSFGKVFKGQLDNGLVVAIKVLDMHHEKAIGSFDAECRVLRMARHRNLIRILNTCSSLDFRALVLEYMSNGSLEMLLHSEDRSHMGFQFHTRMDTMLDVSMAMEYLHHEHHEVVLHCDLKPSNVLFDDDMTAHVADFGIAKLLLGDDNSMVVSTMPGTLGYMAPEYGSLGKASRKSDVFSFGIMLFEVFTGKRPTDTMFEGELSIRQWVQQAFPSQLDTVVDSQLLQDAISSSANLNEVLPLIFELGLLCTTDSPNQRMSMSDVVVTLKKIKMNYTKFGISKDTMSFPAIDHA

SEQ ID NO: 313 - protein, 489 aa, Zea mays
  VARIANT 327: note = Ancestral polymorphism is R, Derived polymorphism is W
MVRVVVSTLPALRPLLRRGSLLNHKPLPRSRLQPWPFCTLSSSPAAGAPSAAVKGEEVALDKHLTRCAAAGIAPLRVAVLVSGGVDSSVALRLLHAAGHRCTAFYLKIWFQEDFRNFWSECPWDEDLKYAQAVCDKIDVPLEVVHLSDEYWNHVVSHMINEYRCGRTPNPDVLCNTRIKFGMNWSFLEAIENLGFDYIASGHYAHVVHPSAENTEAPSVLQLSKDKIKDQTYFLSHLSQSQLRRLLFPLGCITKDEVRRLATQMGLPNQGRKDSQGICFLGKVKFSEFVERHIGEKEGIILEAESGDYLGIHRGFWFYTIGQRQGLRLPGGPWYVVEKDVQNNVVFVSRNYYSLDKRRRTFRVGSLNWFDNCGPGNNEQLKCKVRHSPEFHDCTLVKERSEENGDALVVHLAEDDQGLAAGQFAAFYSENVCLGSGIILDSWDKMSFPVCSRALEIAKLADKSSLGKPIRIVNLEHIVKPEQQEEIKVA

SEQ ID NO: 314 - protein, 66 aa, Zea mays
  VARIANT 8: note = Ancestral polymorphism is L, Derived polymorphism is V
MLQLLMALAFSAAPLTLYVPPVRSLSLFVEAMEAVCRDCGPYSHGAVARFRLGFSRVLAGLARALR

SEQ ID NO: 315 - protein, 446 aa, Zea mays
  VARIANT 274: note = Ancestral polymorphism is P, Derived polymorphism is L
  VARIANT 198: note = Ancestral polymorphism is E, Derived polymorphism is D
  VARIANT 173: note = Ancestral polymorphism is G, Derived polymorphism is V
  VARIANT 168: note = Ancestral polymorphism is M, Derived polymorphism is I
  VARIANT 42: note = Ancestral polymorphism is Y, Derived polymorphism is N
MATQQPLPPADGVGDNTVDRDVWLACAAPFSRIPTVGDEVYYFPDGHIEQHQHLSAAPLPAQDRFHCTVTDVSLGVDDKTDEVFAKISLRPRPGRAAAPPPGPGGSSNSPAPAPGPPQKLRYFTKDLSQTDVYAKFRIPLENEHVLPIPKVETDGADQQRVQRQDVVMRDTRGKSWRFSETYRVNPSKEHSLGTGWLDFAKAKRLAAGDKIVFMRRPNGDLIVGVRRLHVPRYRPFDFQGPAQDVMEAVRLAAAGRPFTVTYFPRQAAVEFIVPRSEVDDALATSWEPGAVVRMEVMEDENRQHTVWVHGRVNAIRQNIWRMLEIIWGVDPPLATTRSVNAWQVASLPPLATTGRSVIRSESESQAQSPSSSTRASRHTDSGPSATPFSATPPRTISIPSASPPNNPVSLSPLQNVKTIKLFGETISVDGGGGGGSEQVNRAPPSS

SEQ ID NO: 316 - protein, 108 aa, Zea mays
  VARIANT 48: note = Ancestral polymorphism is G, Derived polymorphism is R
  VARIANT 38: note = Ancestral polymorphism is A, Derived polymorphism is T
  VARIANT 34: note = Ancestral polymorphism is A, Derived polymorphism is V
  VARIANT 28: note = Ancestral polymorphism is V, Derived polymorphism is I
  VARIANT 27: note = Ancestral polymorphism is A, Derived polymorphism is T
  VARIANT 26: note = Ancestral polymorphism is S, Derived polymorphism is N
  VARIANT 23: note = Ancestral polymorphism is R, Derived polymorphism is Q
  VARIANT 22: note = Ancestral polymorphism is W, Derived polymorphism is S
  VARIANT 19: note = Ancestral polymorphism is G, Derived polymorphism is S
  VARIANT 16..108: note = Derived polymorphism lacks residues 16 to 108
  VARIANT 13: note = Ancestral polymorphism is A, Derived polymorphism is V
  VARIANT 12: note = Ancestral polymorphism is R, Derived polymorphism is C
  VARIANT 10: note = Ancestral polymorphism is V, Derived polymorphism is I
  VARIANT 6: note = Ancestral polymorphism is G, Derived polymorphism is D
MMKYGGYFAVFRALLEEDGERWRVYSAVRGELHADAEAVGFDGFVISGRCADAHGDEPWILALVDLTRHVHAARHASPVHAARHRGSREHRRRRQRLRGMSLGELPTS

SEQ ID NO: 317 - protein, 263 aa, Zea mays
  VARIANT 162: note = Ancestral polymorphism is A, Derived polymorphism is P
MLPPHLTENGAVMIQFGHQMPDYDSPATQSTSETSHQEASGMSEGSLNEHNNDHSGNLDGYSKSDENKMMSALSLGNPETAYAHNPKPDRTQSFAISYPYADPYYGGAVAAAYGPHAIMHPQLVGMVPSSRVPLPIEPAAEEPIYVNAKQYHAILRRRQLRAKLEAENKLVKSRKVLTPSPHLIAVSTSHTRSRNSLSLSVCVCVLCAAVPPRVSAPARDEESSGNRRAVPEHEAAAGVPRQRRLLGRATRARDRERRPVHEA

SEQ ID NO: 318 - protein, 340 aa, Zea mays
  VARIANT 191: note = Ancestral polymorphism is E, Derived polymorphism is D
  VARIANT 187: note = Ancestral polymorphism is T, Derived polymorphism is N
  VARIANT 165: note = Ancestral polymorphism is R, Derived polymorphism is S
MATQQPLPPADCVGDNTVDRDVWLACAAPFSRIPTVGDEVDYFPDGHIEQHLSAAPQPLPAQHRFHCTVTDVSLGVDDKTDEVFAKISLRPRPGRAAAPPPGPGGSSNSPAPSPPQKLRYFTKELSQTDVYARFRIPLDNEHVLPIPMVDTDGVQRQDVVMRDTSGKSWRFSKTYSVNPSKQHSLTTGWLDFAKAKRLAAGDKIVFMRRPNGDLIVGVRRLDVPRYPLFDFQGPDPDQPAQDVMEAVRLAAAGRPFTVTYFPRQAAVEFIVPRSEVDDALATSWEPGALVRMEVMEDENRQYTMWVVGRVEAIRQNIWRMLEVLKLSSRLPSIGLMTFTP

SEQ ID NO: 319 - protein, 273 aa, Zea mays
  VARIANT 97: note = Ancestral polymorphism is C, Derived polymorphism is Y
MGMGSLLSLYLLPRAVFLLLAACCSFASGGVNNYNTSDAAARQLQWGNARATWYGQPNGAGPYDNGGACGFKNVNQYPFMAMTSCGNQPLYRDGKGCGSCYKIRCSKHAACSGRTETVVITDMNYTPGVAPYHFDLSGTAFGRLAKPGRNDDLRRAGIIDIQFARVPCEFPGLKVGFHVEEGSTQVYFAVLVEYENGDGDVVQVDLMEKRARRWTPMSQSWGSIWRLDSNHRLQPPFSIRTRTDSGKTLVARDVIPLNWRPNTFYRSIVQYSS

SEQ ID NO: 320 - protein, 429 aa, Zea mays
  VARIANT 23..429: note = Derived polymorphism lacks residues 23 to 429
  VARIANT 162..429: note = Ancestral polymorphism lacks residues 162 to 429
  VARIANT 256..429: note = Derived polymorphism lacks residues 256 to 429
  VARIANT 266..429: note = Derived polymorphism lacks residues 266 to 429
MVNCTDEVEEVKRRGRTKLINVWNIPRGHRIVVNCNELNQPIGEEAGVLAKFLGMVARNGSLCSLSFKDWRLLIGKKDMNNKQINKEVILNQVKDLSETNRINCTRRKAMHTSGTKSFARNREDLRENDPEKKYPHRAILYIHTHKSNISKNRNAHVVHKLQKYGELKALLAQQPDLADTSNGKVAWEGYALNKILGAEKPGHVHGLGLVPNPKQVFDTSTSRSMKNLNVTTLDETSSEDVVALRLELEKLQNRVQKQDDTILDLQHALEQQKVQHGCVDAPLSAPKDVHNTMKRKQIYCQLRNEDSSMLDELNNTMSNPPQPRREGLQATISASLKQKNNSNASKVMNQDMTQKSYNHAPNKNQDSIEVFLKSTRHPNKKVALGRVLSQDPKTKVGDVALGKEFWMVRVSLVSVRDEPLIRPYNNLKF

SEQ ID NO: 321 - protein, 246 aa, Zea mays
  VARIANT 225: note = Ancestral polymorphism is Y, Derived polymorphism is C
  VARIANT 196: note = Ancestral polymorphism is G, Derived polymorphism is S
  VARIANT 183: note = Ancestral polymorphism is K, Derived polymorphism is E
  VARIANT 177: note = Ancestral polymorphism is N, Derived polymorphism is S
  VARIANT 170: note = Ancestral polymorphism is A, Derived polymorphism is D
  VARIANT 145: note = Ancestral polymorphism is K, Derived polymorphism is E
  VARIANT 143: note = Ancestral polymorphism is Q, Derived polymorphism is H
  VARIANT 99: note = Ancestral polymorphism is D, Derived polymorphism is H
  VARIANT 46..246: note = Derived polymorphism lacks residues 46 to 246
MLSADTDNEYGPTIQRAMGYLKRAQVTTNPPGDPSYWFRHRSKGSWPLSTVDNGWGSTDTSGEATLNKDGSVSTFECQRTYSWLEILNPLETFRNIVVDYPTVECTSSVLQALVLFGDFNSDYRSKEIKENVNKAAIYIENNQHKDGSWYGTWGICFVYGTLFAIKGLVAAGRNYENSICIRKACKFLLSIQLKTGGWAESYRSCERQEHAGNTNCSVYFNFPNYRILYPVWALGEYHRKVRAKSN

SEQ ID NO: 322 - protein, 331 aa, Zea mays
  VARIANT 26: note = Ancestral polymorphism is R, Derived polymorphism is L
  VARIANT 59: note = Ancestral polymorphism is A, Derived polymorphism is D
  VARIANT 106: note = Ancestral polymorphism is R, Derived polymorphism is C
MSFGAVDMEEESGAAAAAAAVEEIRRLPAEVNWEMLDKSRFFVLGAALFSGVSAALYPAVVVKTHLQVAPPPQAATATAAAILRRDGLRGFYRGFGASLAGTVPARALYMAALEATKSSVGSAAVRLGVSEPAASAAASAAAGVSAAVAAQVVWTPVDVISQRLMVQTPDACRYRGGADAFRKILLADGVRGLYRGFGLSILTYAPSNAVWWSTYAVAQRCLWRAVGTERSESCACLMAVQGASAALAGGTAALVTMPLDTVKTRLQVMEADAAARPTLASTVRGLLKEGGWAACYRGLGPRWGSMSLSAATMVTTYEFLKRLSAKEGSLG

SEQ ID NO: 323 - protein, 267 aa, Zea mays
  VARIANT 184..267: note = Derived polymorphism lacks residues 184 to 267
  VARIANT 158..267: note = Derived polymorphism lacks residues 158 to 267
MWRLKIGEGGGPWMQTVSGFHGRQVWEYDPDAGTDEERRKVEQLRRAFTENRFQRRESQDLLMRMQFTGQKHLHADDMPAAFAKIEEGDEVTEERLRESLKRAMDWMSALQAEDGHWPGDFSGIMYMMPFWIFALHITGTVDAVLSKEHRREICRHIYNHQNEDGGWGFNIIDESAMFSTCLNYTSLRLLGEVQQEENDGLAKGREWILSHGTATAAPQWAKILLSVIGVYDWRGNNPVVPELWLVPRFLPIHPGIFLLPPSASLKA

SEQ ID NO: 324 - protein, 455 aa, Zea mays
  VARIANT 335: note = Ancestral polymorphism is G, Derived polymorphism is D
  VARIANT 243..455: note = Derived polymorphism lacks residues 243 to 455
  VARIANT 183..455: note = Derived polymorphism lacks residues 183 to 455
  VARIANT 155..455: note = Derived polymorphism lacks residues 155 to 455
  VARIANT 102: note = Ancestral polymorphism is A, Derived polymorphism is E
  VARIANT 37: note = Ancestral polymorphism is S, Derived polymorphism is L
  VARIANT 24: note = Ancestral polymorphism is R, Derived polymorphism is C
MANYSLVCWGGPKFNATNRLVFGRVLPGPCLCLPMSSCQCGVLLGSANLCDNNRYVCVNCAFELNVARPNASLIPVKGGRSRRTMWIAIAAGATAFLVFFVELQFALDTSGGAQQSLMPPRVGSSRSRGPGNVVVENFTLDMLHASTDGFSDDSQIGTGSFGSVCRGTLPDGREVAIKRAEDSAKASSSVARHCDQETAFDLELNALARANHKNIVCLLGCCADSGERVLVYEFMANSTLHDQLHSRSPLAAAMSSWRGRLTIALGTARGIEYILLDDAWTAKIADFGLSSVLDPSAGAGTPQVPLYTGGTVGYMDPEYYRLQHLTDKSDVYSFGVVLLELVSDRRVVQRYAKSVTPKNVVEFAVPHILADDVARVLDPRLPAPGVAEALAYVGYLAADCVGPVGCECPSMTEVVVALERALVACGAAPLSHAGTGCRSVLSRSGTDEFDLTDTD

SEQ ID NO: 325 - protein, 226 aa, Zea mays
  VARIANT 10: note = Ancestral polymorphism is R, Derived polymorphism is Q
  VARIANT 18: note = Ancestral polymorphism is D, Derived polymorphism is V
  VARIANT 23..226: note = Derived polymorphism lacks residues 23 to 226
  VARIANT 131: note = Ancestral polymorphism is W, Derived polymorphism is C
  VARIANT 162: note = Ancestral polymorphism is M, Derived polymorphism is V
MQTASDFHGRQVWEYDPVAGTDEERSKFAGQKYVHADLPAATKIEEEDGDEVPVTEERLRESLRRALGCMAALQAEDGHWPGDYSGVMYLMPFWIFALHITGTVDAVLSKEHRREICRHIYNHQVIGVYDWRGNNPVVPELWLVPRFLPIHPGRFWCFTRIMYMSIAFLYGKKFVGPITPTILALRDELYSSAYVHIDWSKARNSCAKVCHRSSLTLNYYFIAINY

SEQ ID NO: 326 - protein, 376 aa, Zea mays
  VARIANT 20: note = Ancestral polymorphism is R, Derived polymorphism is S
  VARIANT 44: note = Ancestral polymorphism is E, Derived polymorphism is G
  VARIANT 142: note = Ancestral polymorphism is A, Derived polymorphism is V
  VARIANT 154: note = Ancestral polymorphism is G, Derived polymorphism is C
  VARIANT 159: note = Ancestral polymorphism is F, Derived polymorphism is L
  VARIANT 203: note = Ancestral polymorphism is P, Derived polymorphism is S
  VARIANT 210..376: note = Derived polymorphism lacks residues 210 to 376
  VARIANT 213..376: note = Derived polymorphism lacks residues 213 to 376
  VARIANT 242..376: note = Derived polymorphism lacks residues 242 to 376
MICRWVENPNSDAAKRHNLRIHDYMWIAEDGMKTKVTNGANNWELAFIIQALLSADTTNEYGPTVERAMGYIKRAQATTNPPGNPSYWFRHKSKGSWPLSTVDYGWASSDTTAEVTKAMLLLSKVYPNLVENSNGDEWMLNAVDCLLSFMNKDGSVSTFECQRTYSWLEVWHVLSNDETIQIVTYIEILNPAESFRNIVADYPTVECTSSVLQALVLFGDFNSEYRSKEIKENVDKAAIFIESNQNKDGSWYGTWGICFIYGTLHAINGLVAAGRNYENNICIRKACEFLLSIQLKTGGWAESYRSCERQMERDPTPLHQAAKALISLQLESGDYPQQEHVGNTNCSVYFNYPNYRILFPVWALGEYHRKVRAKTN

SEQ ID NO: 327 - protein, 75 aa, Zea mays
  VARIANT 39: note = Ancestral polymorphism is H, Derived polymorphism is D
  VARIANT 27: note = Ancestral polymorphism is M, Derived polymorphism is L
  VARIANT 20: note = Ancestral polymorphism is A, Derived polymorphism is V
MLALIYTGQMERDPTPLHRAAKVLINMQLETGDYAQQEHVGSTNCSVYFNYPNYRILFPVWALGEYHRKVCTKSN

SEQ ID NO: 328 - protein, 198 aa, Zea mays
  VARIANT 142: note = Ancestral polymorphism is G, Derived polymorphism is R
  VARIANT 94: note = Ancestral polymorphism is L, Derived polymorphism is P
  VARIANT 90..198: note = Derived polymorphism lacks residues 90 to 198
  VARIANT 75: note = Ancestral polymorphism is A, Derived polymorphism is V
  VARIANT 58: note = Ancestral polymorphism is S, Derived polymorphism is L
  VARIANT 30: note = Ancestral polymorphism is E, Derived polymorphism is K
MFVEPVLNYWPLNKLRERALNHILEHIHYEDETTQYIGISPVTKALNMICCWVENPNSDALKRHIPRIHDYLWIAEDGMNTKIYDGTHNWELALIIQAMLSADAANEYGPTIQRAMEYLKRAQVTTNPPGNPSYWFRHRSKGSWPLSTIDNGWGSSDTSAEATKALLMFSKVYPNLVENSNGDEWMLNAVDCLLSFMV

SEQ ID NO: 329 - protein, 327 aa, Zea mays
  VARIANT 185: note = Ancestral polymorphism is T, Derived polymorphism is A
  VARIANT 47..327: note = Derived polymorphism lacks residues 47 to 327
MWRLKIGEGRGPWMQTVSDFHGRQVWEYDPDAGTEEERSKVEQLRREFTENRFRRRESQDLLMRMQLTGQKHLHADDMGAATKIEDGDEVTEERLRESLRRALGWMSALQAEDGHWPGDFSGIMYIMPFWIFALHITGSIDVVLSKEHRREICRHIYNHQNEDGGWGFNILDESAMFSTCLNYTALRLLGEVQQEENDGLAKGRAWILSHGTATAAPQWAKILLSVIGVYDWRGNNPVVPELWLVPRFLPIHPGRFWCFTRITYMSIAFLYGKKFIGPITPTILELREELYSLPYVQIDWSKARNSCAKVRHHPSLTFNHYHYSINI

SEQ ID NO: 330 - protein, 202 aa, Zea mays
  VARIANT 10: note = Ancestral polymorphism is G, Derived polymorphism is A
  VARIANT 15: note = Ancestral polymorphism is A, Derived polymorphism is V
  VARIANT 16: note = Ancestral polymorphism is R, Derived polymorphism is Q
  VARIANT 48: note = Ancestral polymorphism is A, Derived polymorphism is V
  VARIANT 52: note = Ancestral polymorphism is D, Derived polymorphism is E
  VARIANT 86: note = Ancestral polymorphism is P, Derived polymorphism is L
  VARIANT 98: note = Ancestral polymorphism is A, Derived polymorphism is V
  VARIANT 100: note = Ancestral polymorphism is G, Derived polymorphism is C
  VARIANT 114: note = Ancestral polymorphism is S, Derived polymorphism is L
  VARIANT 116..202: note = Derived polymorphism lacks residues 116 to 202
  VARIANT 124: note = Ancestral polymorphism is A, Derived polymorphism is S
  VARIANT 125..202: note = Derived polymorphism lacks residues 125 to 202
  VARIANT 129: note = Ancestral polymorphism is A, Derived polymorphism is V
  VARIANT 145: note = Ancestral polymorphism is G, Derived polymorphism is D
  VARIANT 167: note = Ancestral polymorphism is A, Derived polymorphism is V
MAEESCHPRALSWFVRSCIPADPAHHTAVLVPFTAPDVEDPEPEPPIAGLPDELLLDILRPCRELLLHLHASASASSLEAQRGRALTLFPRSKFLAAVVCARIYMAGSSARTASVEEYDPATESWRVVVEAPRRRYGCTGTGAADVFYIAGGVAVSGGGTAGMTAHVCAGSVDALHMGSGARVWARHPVLVMPRHRWTWASP

SEQ ID NO: 331 - protein, 200 aa, Zea mays
  VARIANT 7: note = Ancestral polymorphism is R, Derived polymorphism is Q
MVHAYLQLIDILGSTKWRLNRRVHDVVDTIWSQGGGIAGLVDKANVARKMREEDGFYYPHNLDFRGRAYPMHPHLSHLGSDLCQGVLEYAEGRPLGKCGLCWLKIHLANKYGGGIEKLSHEGKLAFVENQLFDIFDSAANPVDGNCWWTNAEDPFQCLAACMDLSDALRSPSPYHAVSHLPIHQDGSCNGLQHYAALGRD

SEQ ID NO: 332 - protein, 54 aa, Zea mays
  VARIANT 9: note = Ancestral polymorphism is D, Derived polymorphism is V
  VARIANT 22: note = Ancestral polymorphism is P, Derived polymorphism is S
MLEKMPKEVVEIMAMVVAGKIPSYVLETRLGDCRRAAGIRQEALRRITGREMDR

SEQ ID NO: 333 - protein, 215 aa, Zea mays
  VARIANT 26: note = Ancestral polymorphism is H, Derived polymorphism is Q
MMMMMMDRQLVRQCDMEVMRMAMLKHEETFRQQVHELHRLYRIQRELMSDLITTRYDDEPLLLTTAGRRSKQPRRALDLQLPADEYIVSADEESDAAGAELELTLAVGGRCAAGGGRRKSNRRRRQLAERQQRDNNDAAAAGGGSSPFGSDCSGASALSSPPPSSAEYYSDDGPAAAACQRAVAFDLGGEGDGVMRQQHAPWLAQCQQYLSLRMT

SEQ ID NO: 334 - protein, 435 aa, Zea mays
  VARIANT 235..435: note = Derived polymorphism lacks residues 235 to 435
MRAAAAATSTAAALLAPGLKLCAGGARARVSCPSRSRLPLHRIAAMASAPNPSFRPEEARSPPALELPTPPLSKFKVALCQLSVTADKNRNIAHARAAIEKAASEGAKLVLLPEIWNGPYSNDSFPEYAEDIEAGGDAAPSFSMMSEVARILQVTLVGGSIAERSGNNLYNTCCIFGSDGKLKGKHRKIHLFDIDIPGKITFKESKTLTAGQNPTVVDTDVGRIGIGICYDIRFQELAMLYAARGAHLLCYPGAFNMTTGPLHWELLQRARATDNQLFVATCGPARDTSAGYVAWGHSTLVGPFGEVIATTEHEEATIIAEIDYSLIEQRSCLLQHALRVEIPYQCRVGQQTCELREAGKHNEGVSSRRNPGGAAESGPRHCSTATAAQELPLLTGTAHCYRRWLCLTLSVRQARHGELMSQQLKKPPAFWWPEL

SEQ ID NO: 335 - protein, 478 aa, Zea mays
  VARIANT 291: note = Ancestral polymorphism is C, Derived polymorphism is S
MDAKRQGFFSALREEVARGLSPGRARRRSASNAAEVAAALRRLGGGGEALAPLMEGPDPEAGPGATCGGSARKEGGWGRWVRGQLQLTRAPALEAGAGAGSGAAAAAAAAGRRNDLRLLLGVMGAPLAPVHVCAAEPLPHLSIKDTPIETSSAQYILQQYLAASGGQRLLSSIRNSYAMGKVRMVATEFEAGGRVVRNRMAAQRAEPGRFVLWQMAPEMWYMELAVGGSKVHAGCNGKLVWRHTPWLGAHSAKGPVRPLRRALQGLDPLTAASMFAGARCIGERKVNGEDCFILKLSADPETLRARSEGLAEIIRHVLFGYFSHKSGLLVHLEDSHLTRIQSATGGDAVYWETTISSSVEDYRAVDGVVVAHAGRSAVTLFRFGEAAVGLGHTKTRMEEAWTIEEVAFDVPGLSADCFIPPTDVGPGSVSEAAELPRGERSKAAAGLVLPCHRARVAALEKADDGGVAWSGALQLGCK

SEQ ID NO: 336 - protein, 284 aa, Zea mays
  VARIANT 189: note = Ancestral polymorphism is D, Derived polymorphism is G
  VARIANT 198: note = Ancestral polymorphism is R, Derived polymorphism is Q
  VARIANT 233..284: note = Derived polymorphism lacks residues 233 to 284
  VARIANT 242: note = Ancestral polymorphism is G, Derived polymorphism is R
  VARIANT 274: note = Ancestral polymorphism is G, Derived polymorphism is D
MDGGELRASRIWGATGVAAEFRRSYGGSAGRRYSGPLLDRRSAHWGYNPAIVFCCPDESYCPAALPFMSMATTPEEFFIKDLMEQPPLSPPVFLELPHKPNASNEDRHQVPNNDMTLPYISRMLMEDDDNELGDHPALLQVQQSFAKILSSPPLVGTNTNNSEGTNDFLHEACSPRDTVLSNIRKMRPDVFIQSVVNQSYGSSFLSRFREILFYCTAMFDMLDATLPRESESRLVFEKLVLGCYVFNGISCEGSDLVLRPKKYRQWQARNERAGLFWMATKTRS

SEQ ID NO: 337 - protein, 525 aa, Zea mays
  VARIANT 247: note = Ancestral polymorphism is A, Derived polymorphism is T
MDNSAYYCYCCLLALLPPLYFLVKFWWRTSCARRSHGLRLPPGPWQLPIIGSIHHLRGSLVHRALRDLSLRHGPLMFLRLGEVPVVVASTPDAAKEFMKTHDATFATRPMTLSAKVFAKDGPGIVVAPYGGDHWRQLRKICIVELLSARRVRSFGPVREEEAARLVQAVAGASTRRAPAPAPLVDLGRLAAVYVADASVRAIVGRRFGETDALLRFVDESVSLAGGFTPVDLFPSSLLVRVLTLRRTVRRLEHFRESLFGFMDGVVREHLERKQSSRGGGGGEEEEEADMVDVLLRIQQEGNLKFPLTMRIIEAVIFDLIAGGIETASSTLQWAMAELMRNPAAMSKAQAEVRGVYAGQTKVTEDRLGELPYLQLVIKETLRLHVPGPLLIPRECQEHCRVLGYDVPKGAMVLVNAWAIARSPEYWEEPDAFDPDRFAGDAARDFRGNDFEFIPFGAGRRICPGMAFGLANIELGLASLLFHFDWSLPEGVVPSEMDMAETMGITARRKADLLLSATPRVVPRPS

SEQ ID NO: 338 - protein, 566 aa, Zea mays
  VARIANT 413..566: note = Derived polymorphism lacks residues 413 to 566
MAATDDGAVDSASAAAAARAVEEARALLPAPAPDYDDEDLEERAYEAAEKVIVSISGGPDPEDVDGDGDGAELCSSSGSSPPPFSWRKLWLFTGPGFLMSIAFLDPGNLEGDLQAGAVAGDTLLWLLMWATAMGLLVQLLAARLGVATGRHLAELCRDEYPDWARRALWLMAEVAMVGADIQEVIGSAIAIKILSRGYLPLWAGVVITALDWSVLSFCFFLDLFFHLPVLHANCFIFLSLENYGVRKLEAVFALLITTMAVSFAWMFTDTKPNGKDLLIGILVPKLSSRTIRQAVGVVGCVIMPHNVFLHSALVQSRKIDQNKEYQVREALRYYSIESTIALVVSFMINLFVTTVFAKGFYGSKEAGNIGLENAGQYLQEKFGGGFFPILYIWGIGLLAAGQSSTITGTYAGQFIMGGFLNLRLKKWVRALITRSFAIVPTITVALFFDTSDSALDILNEWLNVLQSIQIPFALIPLITLVSKEQVMGVFKIGPNTQAVTWTVATLLITINGYLLMDFFSSEIRGPLSGSLLCVAVLIYASFVLYLILRGTELSEKIAKAIRGSFS

SEQ ID NO: 339 - protein, 518 aa, Zea mays
  VARIANT 112: note = Ancestral polymorphism is R, Derived polymorphism is W
  VARIANT 50: note = Ancestral polymorphism is L, Derived polymorphism is Q
MDAVATSDAVLLLAAVAISLLITATFWSRHRRQGEAPSPPSLPLLGHLHLLGNGKPLHHSLAALAIARGTGGAPAPLLSLRLGARRALLVSEHAAAEECFTAHDAALGGRPRLLVGDRLNYGYTTVGWSSHGDHWRALRRFMAVELFAASRLAARAADRRAEVAALVGALVRDAPRAGAAVALRPRLFELVLNVMLRALTGAPGHGGGDVRGLQEIIEETFAVTGVMSVGDFYPALRWVDRLRGVDAALLRLQARRDAFVAGLVHDGRRSHNRKAGGGGGPTDTEKRSTIDELLSLQETDPGYYTDTVIKGIVSILLSAGTDTTALTMEWAMAQLLMHRDAMQKARAEIDANVGTSRLVDESDTTHLPYLQCVVKETLRLCPVGPVIPAHEAMEDCAVGGFRVRRGTMVLVNAWLIHRDPRLWEAPEEFRPERFLDATATVAAPLLPFGLGRRRCPGEGMALRLLSLTLAALLQCFDWEVGGCVDMAEGVGLSMPMAKPLAAVCRPREFVQTVLSAST

SEQ ID NO: 340 - protein, 241 aa, Zea mays
  VARIANT 3: note = Ancestral polymorphism is A, Derived polymorphism is T
  VARIANT 16: note = Ancestral polymorphism is A, Derived polymorphism is E
  VARIANT 17: note = Ancestral polymorphism is S, Derived polymorphism is C
  VARIANT 20: note = Ancestral polymorphism is T, Derived polymorphism is I
  VARIANT 31..241: note = Derived polymorphism lacks residues 31 to 241
  VARIANT 55: note = Ancestral polymorphism is A, Derived polymorphism is T
  VARIANT 60: note = Ancestral polymorphism is R, Derived polymorphism is W
  VARIANT 61: note = Ancestral polymorphism is S, Derived polymorphism is L
  VARIANT 64: note = Ancestral polymorphism is L, Derived polymorphism is F
  VARIANT 68: note = Ancestral polymorphism is Q, Derived polymorphism is H
  VARIANT 90: note = Ancestral polymorphism is Q, Derived polymorphism is H
  VARIANT 96: note = Ancestral polymorphism is L, Derived polymorphism is P
  VARIANT 98: note = Ancestral polymorphism is T, Derived polymorphism is I
  VARIANT 140: note = Ancestral polymorphism is N, Derived polymorphism is D
  VARIANT 144: note = Ancestral polymorphism is G, Derived polymorphism is R
  VARIANT 147: note = Ancestral polymorphism is A, Derived polymorphism is T
  VARIANT 159: note = Ancestral polymorphism is H, Derived polymorphism is R
  VARIANT 214..241: note = Derived polymorphism lacks residues 214 to 241
MAAKIFAILALLALSASVATATIIPQCSQQYLSPVTAARFEYPTIQSYRLQEAIAASILRSLALTVQQPYALLQQPSLMNLYLQRIAAQQLQQQLLPIINQVVAANLAAYLQQQQFLPFNQLAGVNPAAYLQAQQLLPFNQLVRSPAAFLLQQQLLPFHLQVVANIAAFLQQQQQLLPFYPQVVGNINAFLQQQQLLPFYPQDVANNVAFLQQQQLLPFNQLALTNPTTLLQQPTIGGAIF

SEQ ID NO: 341 - protein, 530 aa, Zea mays
  VARIANT 18: note = Ancestral polymorphism is L, Derived polymorphism is H
MDAAATAVSSSGDAPVLLLALAVSLLLLAAAVWSSRRRGQGHGNGNGAPSPPSRPLLGHLHLLGKPLHRSLAALAAAHGAGGQLAPLLSLRLGARRALVVSERGVAEECFTAHDAALAGRPRVLAGDRLGYGYTMLVWASHGDHWRALRRLLAAEIFSAARVAARAADRRSEVAALVTSLAALHLHCGGGAVSLRPRLFELVLGVMLRALTGERAHGGDVRTFQGIVEETFAVSGAPSVGDFFPALRWVDRLRGVDAALVRLQARRDAFVGGLVQDQRRRRRDAGDGRGRHAAEKQSIVDELLSLQETDPEYYTDTIIKGVVLMLLTAGTDTSALTTEWAMALLLTHPEAMRKARAEIETSVGTARLVEESDIANLPYLQCVVKETLRLRPVGPVIPAHEAMEDCTVGGFHVERGTMVLVNAWAIHQDPKLWDAPEEFRPERFLDAAGTVTAVTTPMLPFGLGRRRCPGEGLALRLISLTLAALVQCFEWDVGEGGVVDMTEGVGLTMPMAMPLAAVCRPREFVKGMLST

SEQ ID NO: 342 - protein, 93 aa, Zea mays
  VARIANT 76: note = Ancestral polymorphism is S, Derived polymorphism is F
  VARIANT 66: note = Ancestral polymorphism is L, Derived polymorphism is I
  VARIANT 64: note = Ancestral polymorphism is V, Derived polymorphism is I
  VARIANT 61: note = Ancestral polymorphism is S, Derived polymorphism is F
  VARIANT 54: note = Ancestral polymorphism is A, Derived polymorphism is T
  VARIANT 47: note = Ancestral polymorphism is L, Derived polymorphism is V
MAKPLSPTSDSLAPKSLSRPSPGGLLDPLTASMRSLASARRSPITTLVMYDEDTRTIAELSIDIYLYLDTDLYNVSGLSLTLPPPTCDLSRGR

SEQ ID NO: 343 - protein, 414 aa, Zea mays
  VARIANT 201: note = Ancestral polymorphism is C, Derived polymorphism is R
MARKRKASDSAAGIDGVHSLPPPLALASTDACAWASSGGTSMAAVAEAAAAQQQRRGRKRFVGVRQRPSGRWVAEIKDTIQKIRVWLGTFDTAEEAARAYDEAACLLRGANTRTNFWPRPSPASSVAVAAAAHPAPPPPTPPPLPGLMGSPTQPPALPSKVTNLLLLRLRARNNQQQLLLNATPARQQEAAAAALLQGPLCAEPYGGGEECAFQVDDFLSYDCGSDENSSQEIEDEEEEEEEEEEEELDFQFMDQQTASPGAGCEGGLCSPFEVVAAELGGAVEAGGGEPATAVQELMMSRMDYERKISASLYALSGVSECIKMRLGAAAGGHAVRDQLSGLREACRKKQREIVQQQHEQEPSMDTAEDVKPPREERSPGDGAPEATSSSSEASHGDSDGDVLLWSSLDLAPIC

SEQ ID NO: 344 - protein, 641 aa, Zea mays
  VARIANT 192..641: note = Derived polymorphism lacks residues 192 to 641
MKYMKLGSKPDAFQTEGNSIRSVATELAVDIVVTVGDVKFYLHKFPLLSKSSRLQTLVASTSEEGSDEVDISDIPGGPAAFEVCAKFCYGMVVTLNAYNVLAARCAAEYLEMSETVEKGNLVYKIDVFLSASIFRAWKDSIIVLQSTRPLQRWTDSLKVVNHCVDAIASRASTDPSEVDWSYTYSRRKLPSETDGDARGWNGVRKRQAVPRDWWVEDLCDLEVCLYRKVILAIKAKGRTGGAVVGEALRAYACRRLFGSLDHAVSDGLDCTKHRAALEAVADLLPAEKGSVSCGLLLKLLRASCLLESGQAYRGELIRRIGAQLERASVPDLLIPADSGDGDGDATYNVGMVAAMLEEFLLHHKVNGAEAEKREDGEDDVDVAADDPVTSSKLAAVAKLVDGYLSEIAKDPCLPLETFVALAESMPPLSRPVHDALYRAIDVYLKEHPGLSKGEKKRLCALMDCRKLTADASEHAVQNERLPLRVVVQVLFFEQVRQSAAAAAASAAPARSLILPRDDGASYGSSRSATTTATEDEQWGSGAVVGAPVTTSTSGGAGDAGSLRSMSQLSANENGRSGGGGDRKKAKGGAVAPAPVKRVLGKLWSGKASSGGSDDTSASPVGSLNLEETKSMSSQITRHSVS

SEQ ID NO: 345 - protein, 379 aa, Zea mays
  VARIANT 73: note = Ancestral polymorphism is P, Derived polymorphism is L
  VARIANT 14..379: note = Derived polymorphism lacks residues 14 to 379
MPISLRLMGLRMSQLHDEKDDPSTSTQKTLDIFFHSSNSNSNGNGTNVQRTTNSPGQDNDSISLTSKEEYLAPDAGTSVSTGQQDFFLHDEICFIPEQQRSLDNDTKEAVLSDPLGGTKSDDVSYSAKHVKLAFHKVTPTTKLDEPDPLVSPKVVSSSSKPDQQSWIDGYICSICGFELPSGFEEERLEHSDFHLAETLQQEEEVDGTRHISNERSAGSSSPMAPPTSRSILLPIHDSLGSRCDRSLRVLVNMLDIIIHRLNKCLPVDGTCLIKQPGDTYDDFASSKPDSECHYVVFDLDLNNFYACGSSGVSLSAFAFLFSELVQYNQTQVDNITELERRYESIIATLCESLDTLDEPEAKASMIWIIGEYAERIDNG

SEQ ID NO: 346 - protein, 157 aa, Zea mays
  VARIANT 141..157: note = Derived polymorphism lacks residues 141 to 157
  VARIANT 106..157: note = Derived polymorphism lacks residues 106 to 157
  VARIANT 81..157: note = Derived polymorphism lacks residues 81 to 157
  VARIANT 47: note = Ancestral polymorphism is C, Derived polymorphism is R
  VARIANT 42: note = Ancestral polymorphism is S, Derived polymorphism is F
  VARIANT 18..157: note = Derived polymorphism lacks residues 18 to 157
  VARIANT 2: note = Ancestral polymorphism is G, Derived polymorphism is R
MGRRKEHLERVRVEAYCWDVFKPVEMVEIDSMEKLDDAFRLSVECFCTCCQTCRDHSTPLTSDSDDGKLVSEMHLPNAQNGEDSRTISWVTQTLLLPLSPVYSIIWLHLCSTKLSTLFHFGIFLLLVSDLIGKHSEMKLKQSKRETHRGHSLSKGKV

SEQ ID NO: 347 - protein, 110 aa, Zea mays
  VARIANT 57..110: note = Derived polymorphism lacks residues 57 to 110
MDEQARSSQHLSSSTTEISLPPSEDSDQMSGQVENDDGLGLVQSDTPVGAAYGDSTQITSTLTAFSAYGHKDPNIHTTNEAQLYGLVEPNVHPQALASSSQVNVTLEFSC

SEQ ID NO: 348 - protein, 175 aa, Zea mays
  VARIANT 123..175: note = Derived polymorphism lacks residues 123 to 175
  VARIANT 83..175: note = Derived polymorphism lacks residues 83 to 175
  VARIANT 75..175: note = Derived polymorphism lacks residues 75 to 175
  VARIANT 42..175: note = Derived polymorphism lacks residues 42 to 175
  VARIANT 11: note = Ancestral polymorphism is C, Derived polymorphism is Y
MVFPVPAEFACSICRAVIKEPLTTPCAHNFCKTCLLGAYDSQSSVRERSCGGRTLRAQKIVKTCPSCPTDICDFLENPQINREMELIETLQHKAVEEAKMASDDAEECGDGDLEENDGDLVKGGSGLNEGEQDSADADACNWFERGLDRSRKIVVEIKEEGKDDKRSKMGVTEVL

SEQ ID NO: 349 - protein, 305 aa, Zea mays
  VARIANT 142..305: note = Derived polymorphism lacks residues 142 to 305
  VARIANT 180..305: note = Derived polymorphism lacks residues 180 to 305
  VARIANT 222: note = Ancestral polymorphism is A, Derived polymorphism is T
  VARIANT 245..305: note = Derived polymorphism lacks residues 245 to 305
MSPLPPSSDTAVALSPSSMLPSILLPTSTTTPPLPPRRLPRPQHVLPDHNDRSPTVVPADKPKLIGEKSNGGAEACLPISSGPYGDPAPPGLGNSKVEKVQSEEAWDLFTDQASNEGWARYRRCPRRHRNLLRGHRRARPVQRPVGLGRAKASILAEERLLGIPDLLNQPNMSILKQLLQTLQPTENFDDVLSKFQSSLGPCNVDYLYCGACKMLEDIMDSAHKLLSADFPSEDVGKDGRGDLIQKILQIYLRNSDSTSDLLAKIGRELPKVGHLFFSSDALELCICHHSALKRTSGIILNPAEE

SEQ ID NO: 350 - protein, 111 aa, Zea mays
  VARIANT 78..111: note = Derived polymorphism lacks residues 78 to 111
  VARIANT 51: note = Ancestral polymorphism is P, Derived polymorphism is L
  VARIANT 43: note = Ancestral polymorphism is G, Derived polymorphism is D
MGRSSSTEKLVCFVLAVLAVLSPLYIDRRPVAEREEEDEDDGGGPSALWLPAVLLALILAINVTCFMDRRVVRFDPYWIHRVWGSSGGLLAMLLLLGFVLRCKASLLYTSY

SEQ ID NO: 351 - protein, 871 aa, Zea mays
  VARIANT 22..871: note = Derived polymorphism lacks residues 22 to 871
  VARIANT 30: note = Ancestral polymorphism is T, Derived polymorphism is I
  VARIANT 40: note = Ancestral polymorphism is P, Derived polymorphism is L
  VARIANT 62..871: note = Derived polymorphism lacks residues 62 to 871
  VARIANT 248: note = Ancestral polymorphism is G, Derived polymorphism is E
MDRMLLDQLAGEALREVLHAVQGTLFCRSTAERLRRSVEPLLPLVQGLGPHSTQRSAGELGELAARVREALDLARRAAASPRWNVYRAAQLSRRMEAADRGIARWLERHAPAHVIGGVRRLRDEADARIGRLERRVEEIAAATAQPPPPALSVPVAPPPHKGVPMPMEAPLAKPAFVAMTKEVPQHKGMAMSEPVPAKAAPAKAGVMAMDIADGHEDAEGMVGGGVKVAKEKVKEMVMSGGGSWEVVGISGMGGSGKTTLAMEVFRDHKVRAYFNDRIFFETISQSANLEAIKMKLWEQISGNMVLGTYNQIPEWQLKLGPRDRGPVLVILDDVWSLPQLEELIFKFPGCKTLVVSRFKFPTLVKQTYEMQLLDEAAALSVFCRAAFDQECVPQTADKRLVRQVSAECRGLPLALKVIGASLRDQPPKIWLSAKNRLSRGEAISDCHETKLLERMAASVECLSEKVRDCFLDLGCFPEDKKIPLDVLINIWMEIHDLDEPDAFAILVELSNKNLLTLVNDAQNKAGDLYSSYHDYSVTQHDVLRDLALHMSGRDPLNKRRRLVMPRREETLPRDWQRNKDAPFEAQIVSIHTGEMKESDWFQMSFPKAEVLILNFASSLYYLPPFIATMQNLKALVLINYGSSSSSAALDNLSAFTTLSGLRSLWLEKIRLPPLPKTTIPLRNLHKISLVLCELNSSLRGSTMDLSTTFPRLSNLTIDHCIDLKELPPSVCEIGSLETISISNCHDLTELPYELGRLRCLSILRVYACPALWRLPASVCSLKRLKYLDISQCINLTDLPEELGHLTSLEKIDMRECSRLRSLPRSSSSLKSLGHVVCDEETALLWREAEQVIPDLRVQVAEECYNLDWLAD

SEQ ID NO: 352 - protein, 611 aa, Zea mays
  VARIANT 122..611: note = Derived polymorphism lacks residues 122 to 611
MREVVTVQVGGFANFVGSHFWNFQDELLGLADDPGADPVFRTAALDMDVLYRAGETHQSVASYCPRLVSVGSRGSLGSLSSSGTLGSSSAAADEPNIFTWQYSGDLILSDERAQIRNSVIGSWNLVITGLSCCRSGKVTKSVAKPHERNLFLQSLSEEEQNPSSSDGQNNASVEDKDLVANLENGVKFWTDYSKVQYHPQSLYELYGSWTDFDRFDNYGTAKEVVSEWSQMEEMNERLRFFVEECDHIQGIQFLVDDSGGFASVAAQFLESIVDDYTNTPVMLYCVRNPDSYGSSRNQCETIIRSLHDAVSLSKLSYYCNLMVPIGLPSLSMLLIAYNLLRYLSPLLSIKDEKHFHSSAICAAAMHSLSIPFRLQHVGPASDSAHSSGKLDIGELVHILSDQGRQNMITALDVAMPAPSLTDRTDLRNIQRSLHSLTPEISDEDEDPYAVESMVVHGVLDAGGKRASISQVKESICSALEGRATKPKFSHLSVSRCPLPIPLPFPSIFSSSVGQQGEILGTSHAGARPKGPLAVGSVPMAARLRSSSAIAPFIERRSASLQRLGVARGTLGSQVLHDWGFGREEVEDMAEHLAKMLRPFYPEMDLTSDSDD

SEQ ID NO: 353 - protein, 345 aa, Zea mays
  VARIANT 111: note = Ancestral polymorphism is T, Derived polymorphism is M
MMPVEEAAADDWSECAFSLTCEEDCADLGDGELFPLYSAGDEEEDEYLEQLVFKETSFCSSSDSAADCDGDEEGDEEYSSLTSEEWFRQARLAAVKWILETRGCFGFGHRTAYLAISYFDSFLLRRRIDRETMPWAAQLLSVACVSVAAKMEECQAPALSEFHAGGFDFDSASIRRMELLVLSTLGWRMGAVTPLDFLPCFSSRVHPHGGAGAGAGGRVAIGFIFATAEAGSVLDHRPSTVAAAAILAATYGPLLTKEALSSKMSCLSPSYLIEKEHVHACYSMMVGDMSRRGSKRSLPCSGPDEIATSTYHSVLVDDATDTAAFASAVAAARSKQIRLELTGIH

SEQ ID NO: 354 - protein, 180 aa, Zea mays
  VARIANT 117: note = Ancestral polymorphism is Q, Derived polymorphism is H
  VARIANT 38: note = Ancestral polymorphism is P, Derived polymorphism is L
MASADARLAGIASSIRVIPDFPKPGIMFQDITTLLLDPKAFRDTIDLFVERYKDQGITVVAGVEARGFIFGPPIALAIGAKFVPLRKPKKLPGEVISEEYSLEYGTDKIEMHVGAVQANDRALVVDDLIATGGTLCAAVKLIERVGAKVVECACVIELPELKGRDKLGDRPVFVLVEADA

SEQ ID NO: 355 - protein, 157 aa, Zea mays
  VARIANT 100: note = Ancestral polymorphism is G, Derived polymorphism is R
MAAAAATAATQTATTTACSPFAVSPATMLIQGAAGGGLLVSSLLLGSASASPLLALGTAPLLEGRLGFDLGLGDAAALAAADGTPGDLAHHHQPLTLGAGPLPWPAATILEGDRVETTTWKASADVFPFPPAAALWQELAPAVEAGGLHHGAPHLLL

SEQ ID NO: 356 - protein, 301 aa, Zea mays
  VARIANT 12: note = Ancestral polymorphism is F, Derived polymorphism is S
MGAFMRKMKAAFPAMEQVCVWHALCRYWGGLRPGTPGLPPTKVVAPKFSSGLQRTMEDLAVDKIVSNGVGLIEHKRAQPSPPWRVGPSCSLLVDLSRRSSTASRPARSSPSSLPQLAESLCFLPWRGVPCRLLAAPISSARPRAHLPSSDARACSLCLSVSPWSICTGRPPPKSGQTCVTSLLGPPWPPRRRSSLVMPLPCVIVVARVCVFSWWCSTSGSGSHVRGRRACSPSKLPCWLRPARLCVARIAFCCSHARKALCSSTLQLVARPAPCCRELQPGFRFVAQLGPTSPMTVCSSSP

SEQ ID NO: 357 - protein, 510 aa, Zea mays
  VARIANT 39: note = Ancestral polymorphism is G, Derived polymorphism is D
MSAACAVSWQSPTPAAWDATSLASSLKAAAARRSAAHVGPLHAVLLKLGLSASAIHATSLAHVALRAGLARYARELFDEMPRPDVVSWTSLVTGHAHQGLHRDSLALLRRMAGSGVQTNGYSLSGGLLACAGVGQSALAHGKEIHASVVKMSSCGSVDPVVENGVLGMYSRCGSMDYALRVFRAMPVRNIVAWNSMMAALLGSGQAEDALRLFVSMVSSGVGVDGFSLSIAVDACGELALLKQGMQAHAQVAGNGFEADVVVRNSLVDMYAKCGSVDSAELVFEAVSSNDAVLWTTMISAYGKSGRAQDAVSLFDRMARMGIEQDGIAYLAVLSACSHGGLVREAWHYFSSISDGSRSVEMRAEHYGCMADLLCRRGYLEEALEFIKNMPFDSSVAAWSALLNSSRIHGNVRLSQFAASCLLKLDPENHSNWVALSSVHASGNDWHETWTIRESMSRECVKKEPGCSWVELCDGVHVFVTADQSRPELFQILQSLDYLKEDTSVMPWQVS

SEQ ID NO: 358 - protein, 365 aa, Zea mays
  VARIANT 67: note = Ancestral polymorphism is E, Derived polymorphism is V
  VARIANT 258: note = Ancestral polymorphism is F, Derived polymorphism is S
  VARIANT 273: note = Ancestral polymorphism is Y, Derived polymorphism is C
  VARIANT 309: note = Ancestral polymorphism is Y, Derived polymorphism is H
MQQEHAQPSMVGAKGCERCRDWQEHYYWEHMDASKIRFFRCMTGDFAHRISVPEKFAKNFKGQITEEFHLKSPSSAETWHVGVEKHGDKLFLVSGWENFAKAHELEENDLLLFACSGNSSFEVLVFGASGCEKVSSLFGSGLGPDMGKQFNDVVRRHGVHHSVTVSDSEDTVAPSQLVRSPRNALPLKEPSGKARPSKYESPNSSNFIVRHVATGKEGTDDEYANSNYYYSLSANRLGDEEKEEIIGLAPIRPNNPVFVTLLRKNHVQRRNNCLIIPSKFAADHLGERAHNIILRRPNRKEKWHVSYYHSRHTRCFQNLALFKFTRENKLHEGDICVFELMKGERRVTMTVHVVRKANGRFILVV

SEQ ID NO: 359 - protein, 293 aa, Zea mays
  VARIANT 196: note = Ancestral polymorphism is G, Derived polymorphism is R
  VARIANT 203: note = Ancestral polymorphism is T, Derived polymorphism is I
MQEHWSRMNKMGPRLGCESCRKWQEHCYQEHTVRERASFVRLMAGDFARGILTETLSLKSPSGATWLVDVARNADADELLLGSGWGDFARAHELQEDDLVVFTRGGGGGSGSGCSFDVLVLDSSGCEKAPCFFAANKGQGGDGDRLAAGSSYCCYYYSRSSGTLLTGGERDQMRSLVSVQPGNPAFVTVLMKTHVGHKNSMLTVHHGFAAEHLEGRSHEVLLLRPNREERWCVRYYHASHTRGFNCRRWVKFVRENRLRKDHVCVFELIKGATRTTMLVHVLRKADGRLALVA

SEQ ID NO: 360 - protein, 600 aa, Zea mays
  VARIANT 363..600: note = Derived polymorphism lacks residues 363 to 600
  VARIANT 275..600: note = Derived polymorphism lacks residues 275 to 600
MAVANVSLAETPESFMSTIVAPSVSVLPNRISGLCGIDSAGLQNGYLKDHFPGDAYPNTENISKASGQKLFTGEGQLFQQYREYEKELDGAWSHPAEKAVHSNRTTQSNEIYLNGECGPDTFMEMTENYWCISDSRNSCREIYSNLSTSNQCFVSDCDPCDPEREIVERSEHTPNSTVSKPTSPISDESSAKRPAKRLKAVMEEKLYFAKGDIEMREAKTVAWDQTPRGVSLSSRRERGASILYGLTAEELGDHMSSLTNQNTCLSKETSQEFPSIDGLPDQNTCSLCGMEMLLFEPPPRFCALCFKIINSAGCYYVEVENGSEETSICCKCHHLSSLKAKYQKKFNYAETDAEAEWWVQCNKCKAWQHEICALFNRKCEGAKAEYTCAKCFLSEKDSGDIQALEPSTVLGAHELPRTKLSDHIEQRLSERLKQDRQHRASASGKVAEEVPGVKGLTVRVVSSVDRLVQVQPRFRDLFKQEKYPGEFPYRSKAILLFQKIDGVDVCLFAMYVQEYGSDCPSPNQRHVYLAYIDSVKYLRPEIKSSSGEALRTFVYHEILIGYLDYCKKRGFVSCSIWACRGGPRPMAAWATARGAGPIFS

SEQ ID NO: 361 - protein, 214 aa, Zea mays
  VARIANT 6: note = Ancestral polymorphism is E, Derived polymorphism is Q
MASATENSSLRRCSSLPNLLVWLLNLSLLVLAAAALGPVFLLRPRPTPFGWALVSVHATTLLSALAALHAQLTHLCLAASTALALAALSGHALASLAFFLRHDHSLRLLGSARDRREQFVLAFLEELLLLAMFMAQAVALAATCVLSRRWAREYQEAETEKAAAARKRGRKMARVQAESAAAAEAGVKAVDEKVMRSSSGKKVHWANNDGYEEC

SEQ ID NO: 362 - protein, 902 aa, Zea mays
  VARIANT 766..902: note = Derived polymorphism lacks residues 766 to 902
  VARIANT 140..902: note = Derived polymorphism lacks residues 140 to 902
MATTATISLLQHVRPPASGGSLLPLPLQRLRPIHCRRSAPASHHSLHRSLHLRLPTRGAPADRPRATADPSSALDAAAGEGAAGATTALLDVSGMMCGGCAARVRSILAADPRVEMAAVNLLAESAAVRLRAPAPPGAGEELAARLTECGFPATARRGGAAAGAGESARKWREMAARKEELLVRSRGRVAFAWTLVALCCGSHASHILHSLGIHVGHGTFLDLLHNPYVKCGIATTALFGPGRDILFDGFRAFKQGSPNMNSLVGFGSAAAFTISAVSLLNPDWEWNSTFFDEPVMLLGFVLLGRSLEESARLKASSDMNELISLLSPQSRLIVTSSSDNPSADSSLNSDAITVEVPVDDVRVGDSILVLPGETIPVDGNVIEGSSFVDESMLTGESLPVAKETGLPVFSGTVNWDGPLKIRATCTGPSSTIAKIVRMVEDAQAREAPVQRLADSIAGPFVYTVMTLAATTFSFWYYIGTHLFPEVLLNDIAGPDGDSLLLSIKLAVDVLVVSCPCALGLATPTAILIGTSLGAKRGLLVRGGDVLERLAGIDTLVLDKTGTLTEGKPVVTSIASLAYEETEVLRLAAAVEKTALHPIANAIMNKAELLKLDIPITSGQLTSPGFGCLAEVDGSLVAVGTLDWVHDRFETKASPTELRDLRNRLEFMLSSEASSSNQSKSIAYVGREGEGIIGAIAISDILREDANLTVERLQQESITTFLLSGDRGEAVTSIGRTIGIRNENIKSSLTPQDKASIISTLQAKGHRVAMVGDGINDAPSLAAADVGIAMRTHSKENAASDAASVVLLGNRLSQVVDALSLSKATMAKVHQNLAWAVAYNIVAIPIAAGVLLPQYDFAMTPSLSGGLMALSSIFVVSNSLLLQLHGSFQNTEKRQGDLSSRLN

SEQ ID NO: 363 - protein, 106 aa, Zea mays
  VARIANT 32: note = Ancestral polymorphism is A, Derived polymorphism is D
  VARIANT 78: note = Ancestral polymorphism is D, Derived polymorphism is V
MASTTTTASNNLAGVWLGELSSALHGTWQAVAVAATHGLGEDDDPRLPCQQQQRPWRGDDRSSSNNKALRGAAAAGTDRREGDVARCGGAMSDTTLYLLLDRFAPS

SEQ ID NO: 364 - protein, 878 aa, Zea mays
  VARIANT 491..878: note = Derived polymorphism lacks residues 491 to 878
  VARIANT 464..878: note = Derived polymorphism lacks residues 464 to 878
  VARIANT 418..878: note = Derived polymorphism lacks residues 418 to 878
  VARIANT 407..878: note = Derived polymorphism lacks residues 407 to 878
MAAGASDYSFAAEYVGPPLPYTLPRAIPLDLSRIPLAALSSSPPASPSASSSPLPVVRPLTPSSLCNAIHAHAHPAPRSAVPAPAGGGAVVDSPTSVIENHHAAAHHSAELPSSPSDDEAAGDGDGDGGSEALPLKPRHHPPVVTFAETSGSLLQSSDDEDEYEEEDDDDDDADAGETRPRAAAGQSSGSLSPAHWRGGRTRGCYRCGKGGGFWGRDKESCLACGARYCVGCVLRAMGSMPEGRKCLECIGRPVAESRRDALGRGSRVLRRLLSAAEVELVMRSERECAANQLRAEDVYVNGSKLSPEELVVLQGCPCPPSRLRPGFYWYDKVSGFWGKEGHKPHCIITANLNVGGSLDQKASNGNTGILINGREITKSELQMLKLAGVQCAGKPHFWVNADGTYQEEGQKTVKGKIWDKPIVKLLSPVLSLPTPNKAANQSSEDAVDIVNRAIPDYLEQRTTQKFLLVGSGASTILKQAKFLYKTGKPFSVDEREDLKLIIQSNIYNYLGILLEGRERFEEESLADRRKTSQCDPSSSGCCEPGLCDEVTEYSLIPRLKAFSDWILKAMALGNLEDIFPAASREYAPLVDELWKDPAIQATYRRSELPFLPPAASYFLDKAVDISRTEYELSDMDILYADGITSSDGVASTEFSFPQLSLGGLGVDEPDAQDTLLRYQLIRINSRGLHGNCKWLQMFDDVRLVIFCVAASDYDEYYEDANGTIVNKMIESRQLFESITLHPTFEQADFLLLLTKFDLLEQKISSSPLTSCDWFSDFTPLISRNLLNGGGGGGRRTARSSTGATLPQMAAHYMATKFKRLFESMTGRKLYVSYVNALDQESVRSAIRYGREVVKWEEEKPVFGASETVYSEEPSSFTA

SEQ ID NO: 365 - protein, 81 aa, Zea mays
  VARIANT 57: note = Ancestral polymorphism is R, Derived polymorphism is H
  VARIANT 48: note = Ancestral polymorphism is S, Derived polymorphism is L
MATQDKTSWPELIGKDTNDAIAVIEQERPDVTLFESLYVDLNETPRPSDQLPPGTIRVVIYFSVDPNTNEEIVEETPYIKA

SEQ ID NO: 366 - protein, 81 aa, Zea mays
  VARIANT 56: note = Ancestral polymorphism is I, Derived polymorphism is M
  VARIANT 54: note = Ancestral polymorphism is G, Derived polymorphism is E
  VARIANT 9..81: note = Derived polymorphism lacks residues 9 to 81
MATQNKTSWPELIGKEINGAIAVIEQERPDVTFFDSVDVDLNETPIPSYELEPGTIRVVIYFGLDPNTNEQIVEETPYIKA

SEQ ID NO: 367 - protein, 327 aa, Zea mays
  VARIANT 38: note = Ancestral polymorphism is A, Derived polymorphism is G
  VARIANT 18: note = Ancestral polymorphism is E, Derived polymorphism is D
MGASLSLVPVLDYFARRECLRAGLHQNAVTLPYPDGGAGATCTVQYWAPQGEPELPPLLLVHGFGPRADWQWRCQVGPLSRHFHVIIPDLLGFGGSAYPSETAPPPTEATQAAVLAALLGALPGMERRRVAVAGTSYGGFVAYWLAREAGPARVGPVVIASSDLLKTAADDRAFLKRAGEGWGGVDEILLPAEPAALRKLLELASCRPPPRLVTPDFLLRDFIQKLFTQNRERLVHLLKGITVGTEKFQVTPISQEVLIVWGDHDQLFPVEKAFAVQRALNGTARLEVIPKTGHAPQLEDPARFNKVMLDFLLASHKPDPSVSGSAQ

SEQ ID NO: 368 - protein, 156 aa, Zea mays
  VARIANT 40: note = Ancestral polymorphism is A, Derived polymorphism is V
MVGRGSLGTVYRAVLSDGRMVAVKRLHDSFRMVAVQLRRVGPGGADWQGAYTAPAARRAQEGRGGDEPEPPRRPALCLQPPWRPRSPAGFPLLLPLPVIERERPDVTFFDSVDVDLNESPRPSDELAPGAIRVVIYFGLDPNTNEEIVEETPYIKA

SEQ ID NO: 369 - protein, 81 aa, Zea mays
  VARIANT 19: note = Ancestral polymorphism is D, Derived polymorphism is G
MATQNKTSWPELIGKEINDAIAVIEQERPDVTFFDPVDMDLNETPRPSDEHAPGAIRVVIYFGLDPNTNEEIVEETPYIKP

SEQ ID NO: 370 - protein, 230 aa, Zea mays
  VARIANT 27: note = Ancestral polymorphism is A, Derived polymorphism is V
  VARIANT 175: note = Ancestral polymorphism is P, Derived polymorphism is A
  VARIANT 185..230: note = Derived polymorphism lacks residues 185 to 230
MSATADGGSIGTGMSHRIIVALFLSAALCRCDPDLLLDYCVADTSSSQLHLNGLACIDPASARAEHFATSALSRASETETAYGFSVTVTSPASSLPGANAQGLAMARTDLAPGGLAPPHTHPRASEVALVLAGSVLVGFADTSYRLYTQLLRAGEAFVVPRGMVHFMYNVDVAAPAVVLSGLNSQSPGAQLVPFSAFRTEPRVPDEVLKMAFRINGQDVQRIQRNLGGSS

SEQ ID NO: 371 - protein, 217 aa, Zea mays
  VARIANT 185..217: note = Derived polymorphism lacks residues 185 to 217
  VARIANT 165..217: note = Derived polymorphism lacks residues 165 to 217
  VARIANT 123..217: note = Derived polymorphism lacks residues 123 to 217
  VARIANT 117: note = Ancestral polymorphism is A, Derived polymorphism is T
  VARIANT 80..217: note = Derived polymorphism lacks residues 80 to 217
  VARIANT 77: note = Ancestral polymorphism is P, Derived polymorphism is S
  VARIANT 76: note = Ancestral polymorphism is L, Derived polymorphism is F
  VARIANT 6: note = Ancestral polymorphism is A, Derived polymorphism is P
MALRRALLRSAETSFERKSEPGVNGEEPVGEVERVVVLDVAEDIRLSLAHGVRLVASSKRAAHQLFIYVLDNRIALPWKQKGGGGECCDDGSDTRWWPPWLRPLLSVCFFVQCRVHTDAHKSECNMYCLDCMGDALCALCLAARHRDHHSIQAAIEYIHSLSRAQPARSLNCAGLCPASRSLSTQAATTSSTPQLKAHPTSSSQAATTLSKTEDEKN

SEQ ID NO: 372 - protein, 92 aa, Zea mays
  VARIANT 32: note = Ancestral polymorphism is Y, Derived polymorphism is H
  VARIANT 35: note = Ancestral polymorphism is P, Derived polymorphism is H
  VARIANT 38: note = Ancestral polymorphism is G, Derived polymorphism is E
MSSSMVPKNPPPPTGYDGEGGVEAAPVTSCLYLRPGAGALDRDAVLRRIRHRRRHSRLRDTLRPMVLQAQPAEPDGAEWRLPWPLDDAFSAP

SEQ ID NO: 373 - protein, 465 aa, Zea mays
  VARIANT 189: note = Ancestral polymorphism is P, Derived polymorphism is S
  VARIANT 219: note = Ancestral polymorphism is Y, Derived polymorphism is N
MVKPPPPPPTSTCTSDTPLPTPGGLLGSLSSSAHSLLAAARRSPVTTLVAAFFLLALFMYGEDVRTIAELSIDDYLYPDADFYNVSALPPLALPPATCDLSRGRWVFDNVSLPAYREKDCTFLTKQVTCLANGRPDDLWQYWKWQPNECSLPTFDARRFMEAMRGKRLMFVGDSLNRNQWESLVCLVQPILSKGRKKIVKRGSLTVFHAKEYRATLEFYWAPFLVESNSDNPKIHSIEHRIIRPERIEGHAKYWRGVDYLIFNTYIWWMNTADMKVRRPNSRYWSEHDEVPRIEAYGLVFKTWSDWLNDNIDPDRTLVFFMTISPLHISPHNWGNPDGIRCVKETLPYQNYSQPLDLYHDMRMHDLVVKVASAMAKVPVTVINITRMSDYRKDAHTGLYSIRQGKLLTPEQKGDPEKFADCIHWCLPGVPDVWNQILYTRILSKPPSWGSSNVSPLSPSQSLPPR

SEQ ID NO: 374 - protein, 283 aa, Zea mays
  VARIANT 3: note = Ancestral polymorphism is H, Derived polymorphism is R
  VARIANT 204: note = Ancestral polymorphism is S, Derived polymorphism is L
MHHQLLLFLFLLLLDATTFAAPAGPCNRRCGSTTVPYPFGFSGGGACPILLACNATASTALLPRSTAAAAASYPVQSFDSAASTFLVSLVPSCGRGVAEARAALGGAGYGVSSRTGLFLRGGCGRAAGSRSPSDCNVPSGVMAAILRTVQCGGGNDSSWTCVLSAPPAPGSPAAARGQGQFMRWDEVAAAGCEDALTSAVYAYSPQGVPSIQFGIAEMGWWVDGRCGDGGGGGGRCARNATCHDVQTPGGAWGHRCACVDGMAGDGFAAGQGCYYDGAPRGEH

SEQ ID NO: 375 - protein, 293 aa, Zea mays
  VARIANT 201: note = Ancestral polymorphism is H, Derived polymorphism is R
MALLPLPPCSPCHRRAAPLPAPTVASARHRRGSLRLAAAGACSGPTAARKPRPTAADRRRCECFDLHRRLVPYAEAYCWQKSIVERRKRLIDSGEDHSDTLIALQHPPVYTLGTDSKEEYLHFDKEDAPFEVHRINRGGEVTYHGPGQLVMYPIMNLRYHKEDLHWYFRSLEEVIIRALKSAFSITAARVEGLTGVWVGDRKVAAIGIHGSRMIVYHGLALNITTDLAPFRMIDPCGIKDRGVGSIKEILQRVSDAEEIDDASLMDIVYDSMIKEFAELFQLSLDFSPGCSFQ

SEQ ID NO: 376 - protein, 401 aa, Zea mays
  VARIANT 235: note = Ancestral polymorphism is T, Derived polymorphism is A
  VARIANT 10: note = Ancestral polymorphism is A, Derived polymorphism is S
MEEMARQLVARLAATPDSALRGLPFLHRVLTLPLLSAASAVLRLSLLLSRLRSRRALPVPVVSVGNLTWGGNGKTPMVDFLARSFHRLGVSPLLLTRGYAGGDEPKMLRRRLSDTSAKIGVGANRTAVASSMLQEYGFIHHFQNTFAEKKLSSVCKLESGNRIGVAILDDGMQHWSLLRDVEIVMVNGLAPWGNSHFIPRGPMREPLSALGRADIVVIHNADMASEMQLKAIRSAIEDNNATCSVFYSRLAPSHFFEVKQPSQRLPLNVLNDKIVLCVSAIGCPNAFIHTAREIGPLKIARLDFSDHHFFSAHDLEKIQETARNLMDEHSKDTIVLVTEKDYDRDPEALKTLDANVWVLSSSLQIMHHSKQGEDEFMRKVNEIITVTWCAKSHAADRATGC

SEQ ID NO: 377 - protein, 289 aa, Zea mays
  VARIANT 37: note = Ancestral polymorphism is R, Derived polymorphism is C
  VARIANT 265: note = Ancestral polymorphism is G, Derived polymorphism is R
MAAGGGRCLLALALAAAWISGAVVAASSSGEQEGGSRTPVKCMPCSRTYIGGAHLDTLTGQLAQRRDIVEMSDSGELCKGLADDVEVPMLSKLRRQLVGKGSHRRLVYSVDFGAHEGAMVNFLDHYDAHLVIFEKLPDGVFADPFELQHFVERKVFVDVAVFGDANLELPTALSNGSSVEIHFDLRRIISINCNLVIEMPLHARYPPLDASGYATVEFGSADLFLRYRKKDIHSGSCLWVINNLKAAPLEKAAWRIPCGDEAHIGFVSSITFLSALVCSMSIVLASLIF

SEQ ID NO: 378 - protein, 456 aa, Zea mays
  VARIANT 163..456: note = Derived polymorphism lacks residues 163 to 456
  VARIANT 177: note = Ancestral polymorphism is L, Derived polymorphism is S
  VARIANT 239: note = Ancestral polymorphism is S, Derived polymorphism is I
  VARIANT 248..456: note = Derived polymorphism lacks residues 248 to 456
MAGALAEDNAGDGRSSSTEEMSSDDQIHSENPLSEWRSSQQVENRVPPTLRIYLGNDDDDDFSYGPRPSELYGKFTWRIDYFSQINRSELRSTSFDVGAYKWYILIYPRGCGVCDHLSLFLCADHNKLLPGWSHFAQFTIALINKDPKKSKYSDTLHRFWKKEHDWGWKKFMELSELHDGFIVQDALTIKAQVQVIREKIDRPFRCLDGQYRRELIRVYLSTVEQIYRRFIDEKRRMFSRLIEDKLGWSSFSGFWLAMDPSVRRHMTREKTETILKVVVKQFFIEKEVTSTLVFDSLYSGLKALEYQSNNKKGIPKITEADARSTPMVLIDQDMFVLADDALLLFERAALDTQSHQPLPKKDDKGSPNRTKDDTSSDEFDKDSIERDDRWLEELGCKTLELFAVTHIFSRAEAAYQEAMALQLQEELIREEASERAGTELKPKRRAADKKRRGKNM

SEQ ID NO: 379 - protein, 116 aa, Zea mays
  VARIANT 82: note = Ancestral polymorphism is C, Derived polymorphism is Y
  VARIANT 74: note = Ancestral polymorphism is G, Derived polymorphism is V
  VARIANT 52: note = Ancestral polymorphism is N, Derived polymorphism is K
  VARIANT 37: note = Ancestral polymorphism is R, Derived polymorphism is S
  VARIANT 35: note = Ancestral polymorphism is G, Derived polymorphism is R
  VARIANT 15..116: note = Derived polymorphism lacks residues 15 to 116
  VARIANT 8: note = Ancestral polymorphism is R, Derived polymorphism is W
  VARIANT 5..116: note = Derived polymorphism lacks residues 5 to 116
MLRTGGRWLLAPGLWWRGLGTGATTYVDLATTTAGVSAYHEQVMDHYNNPWNIGSFNKDDPNVDTGLVGASACVDIMKLQIYVDKDSNKIVDACFKTFGCGSTIVSSPHRCELNID

SEQ ID NO: 380 - protein, 505 aa, Zea mays
  VARIANT 265: note = Ancestral polymorphism is N, Derived polymorphism is I
MPPSPIVLPATALPAARLARVVAASESGGATPPRASPRRGRRGKPGFSRRSAIKKSFHQEQVVFSTPVSTDPTVAVIGGGASGLSCATSLAARGVRSVVFDTGMHGLGGRMATRFVDGGKQLVFDHAAQFFTASDERFQRLVNEWLDRGLVREWSGLIGELEAGGCFRPIPSLTPRYIGVNGMRPLADAMLPETDMIKVLRPCWISKLEPFNGLWRLFENEKPRGEYDAVVIAHNGKCANRLLSTSGLPLLTKQMKVPWFYYCNNFLTHEAYILLFLLLTKFPAVNDQRLELSSVWALLAAFEDPLPIPLLDSNAAFEGAFVRDVDSLSWMGNNTRKLFPMQTGAPECWTFFSTAAYGKRNKVPQENIPKLTAEKVKEDMLGGVEHALGLSEGSLQQPIYTRVQLWGAALPMNTPGVPCIFDPLGRAGICGDWLTGSSIEAAVLSGMSLANHIADYFVSTQDRPEEFAIGVHDDLNAVEGHDIGQFPGLDTQTPQVAEAQLTPSI

SEQ ID NO: 381 - protein, 88 aa, Zea mays
  VARIANT 11: note = Ancestral polymorphism is T, Derived polymorphism is I
  VARIANT 22: note = Ancestral polymorphism is P, Derived polymorphism is L
  VARIANT 25: note = Ancestral polymorphism is R, Derived polymorphism is C
  VARIANT 26..88: note = Derived polymorphism lacks residues 26 to 88
  VARIANT 28: note = Ancestral polymorphism is Y, Derived polymorphism is F
  VARIANT 36: note = Ancestral polymorphism is P, Derived polymorphism is L
  VARIANT 39: note = Ancestral polymorphism is G, Derived polymorphism is D
  VARIANT 49: note = Ancestral polymorphism is K, Derived polymorphism is E
  VARIANT 70: note = Ancestral polymorphism is R, Derived polymorphism is W
MNYFTYKAVRTVLTQLYELNPPSYRWSYNFVAVNKPTDGKHFLRALGKKCDHAKTYEKISDENLALMQERLMETVIWPTDDSSTEKIG

SEQ ID NO: 382 - protein, 144 aa, Zea mays
  VARIANT 1: note = Ancestral polymorphism is L, Derived polymorphism is M
  VARIANT 3: note = Ancestral polymorphism is G, Derived polymorphism is R
  VARIANT 8: note = Ancestral polymorphism is S, Derived polymorphism is L
  VARIANT 16..144: note = Derived polymorphism lacks residues 16 to 144
  VARIANT 21: note = Ancestral polymorphism is A, Derived polymorphism is G
  VARIANT 27: note = Ancestral polymorphism is R, Derived polymorphism is C
  VARIANT 32: note = Ancestral polymorphism is V, Derived polymorphism is M
  VARIANT 62: note = Ancestral polymorphism is G, Derived polymorphism is V
  VARIANT 64: note = Ancestral polymorphism is A, Derived polymorphism is T
  VARIANT 85: note = Ancestral polymorphism is L, Derived polymorphism is P
  VARIANT 90: note = Ancestral polymorphism is K, Derived polymorphism is N
  VARIANT 93: note = Ancestral polymorphism is R, Derived polymorphism is Q
MSRSFLQSDNGGHHSRTGGPASVPNGRVLIVVEASWMFNIAVQGKKLMLMWYFKPYLYMDVVLASTVTALRICTDVAHVLEQFCLVWCGKLVRDARAVALSRASASTSSSLGVETELSMHAGGARCDRYYPYLINDDNGDGHDI

SEQ ID NO: 383 - protein, 968 aa, Zea mays
  VARIANT 384..968: note = Derived polymorphism lacks residues 384 to 968
  VARIANT 395..968: note = Derived polymorphism lacks residues 395 to 968
  VARIANT 399..968: note = Derived polymorphism lacks residues 399 to 968
  VARIANT 489..968: note = Derived polymorphism lacks residues 489 to 968
MAAPCRDLTGLRRGLAAARLAPGRRGANKLCLAPFHHRAPPPQQQQGRRRQRQGLKVVAAISEDLPRLAAPGTGKGAPEGRRPEKVLVRAALTVRRKHKEDLKEALAGHLDALWDMVGRSVALELISTKIHPRTKKPLHSGQASIKDWCQKRGVKGEHVVYTAEFMVDSDFGEPGAITVANRHHREFFLESIVVEGGLPCGPVHFACNSWVQSTRELPGKRVFFSNKPYLPSETPPGLRELRDKELKDLRGDGTGVRKLSDRIYDYATYNDLGNPDRGKEFIRPILGGDNIPYPRRCRTGRPPTDTNMLAESRVEKPHRIYVPRDEAFEELKQGAFSSGRLRAVLHTLIPSMIATISAETHSFQGFHHVDNLYKEGLRLKLGLQEHLFQKIPLVQKIQESSEGMLRYDTPRILSSKFKCLHVQRMLILRLYAEDKFAWLRDDEFARQTVAGINPVSITRLTVFPPVSKMDPAIYGPPESSITEAHITGQLNGLTVQQAVDEAKLFILDYHDVYMPFLDRINAIEGRKAYATRTILFLTKAGTLKPIAIELSLPPSKAGEPRPSKVLTPPADATSNWLWMLAKAHVSSNDAGVHQLVNHWLRTHAVMEPFILAAHRRMSAMHPVFKLLHPHMRYTLEINALARQSLISADGVIESCFTPGPVSFEISAAYYRDHWRFDLEGLPSDLVRRHSCRCPIPVCSCLFLPLSTDISSSLVIRRVAVEDASQPHGIRLLIEDYPYANDGLLLWSAIRSWVESYVQLYYPDAGTVQSDDELQGWYHETVHVGHADIRHAPWWPSLSTPGDLASILTTLVWLASAQHAALNFGQYPLGGYVPNRPPLMRRLLPDPERDAAEYATFMADPHRFFLNAMPGVLEATKFMAVVDTLSTHSPDEEYLGEERDEPWTGDAAAVAAHDMFTADVRRAEEAIDSRNADQRRKNRCGAGVLPYELLAPSSPPGVTCRGVPNSISI

SEQ ID NO: 384 - protein, 469 aa, Zea mays
  VARIANT 97: note = Ancestral polymorphism is G, Derived polymorphism is R
MPSKPNAASRLVFLAFLLVISAAAANDDAAARRTMEQFAGFPASDDGEGPSSDFHVDSEGLQRQIDELASFSDSPAPSVTRVLYTDKDVQARRYIKGIMNQLGLVVREDAVGNIFGRWEGSEPGLGAVATGSHVDAIPFSGKFDGVVGVLGALEAISLLKRSAFLPKRSLEVIMFTSEEPTRFGISCLGSRLMAGIEELAQSLRKVVDNQNVSFLDAAESAGYKLNLEDLHSVFLKTDKYSAFIELHIEQGPILEKEGIPIGIVTAIAAPASLKVDFEGNGGHAGAVLMPARNDAGLAAAELALAVEKHVLESGSIDTVGTVGILQLHPGAINSIPSKSHLEIDVRDIDEKRRNDVIEKIRQSAAHISKNRGVELSEFKIINQDPPALSDKSVVDAMEFAAKQLNLAYKKMISRAYHDSLFMARVSPMGMIFIPCYKGYSHKPEEYASPEDMANGVKVLALTMATLSLE

SEQ ID NO: 385 - protein, 202 aa, Zea mays
  VARIANT 102: note = Ancestral polymorphism is V, Derived polymorphism is L
MGVLNWMQTKLHGSHRSRRRPAEFSASTARPYTPHVAAADASGGVPQTENNLDDGWTTAMLSIGTFGMGEGNTTKSCGHLDELSRLQEELKSLATANELGRVNHLQLERLLSSSSTSRTLATRAFGGFGPRPSLRETVPEMRFDEIVWGLLLKKAHPENPAFSDTAARDDQVVRMAPKGKVQADDKGGKWIRTDSQYIVLEI

SEQ ID NO: 386 - protein, 280 aa, Zea mays
  VARIANT 178: note = Ancestral polymorphism is L, Derived polymorphism is V
  VARIANT 181..280: note = Derived polymorphism lacks residues 181 to 280
  VARIANT 184: note = Ancestral polymorphism is A, Derived polymorphism is T
MNYPADAAADPWCCYSNNAGEAAAAAAVPTSGETSSFFADMVAADYSTDDLFELVLKQEGHEGGASGPTQPAVSCVWSSSSRFSKPPDVQFDPPSEDEMAGWLYTIVKGDQRVCNDDDDGRRPVANDDGAEDAVPVIGTSTVTTDKKEKVPSMTMTTTTDKSNQASTLDQTIHYMKSLQHQVQAMSSAGLLAPAAAAYPAVVQPRCVPMGTPPPVPSVPFQAAAPTTTVLGGYHPPSSPAATMVPFGTTAVLQLPHYPGAAAAVMVPVAPLYPARRRLLQ

SEQ ID NO: 387 - protein, 45 aa, Zea mays
  VARIANT 3: note = Ancestral polymorphism is R, Derived polymorphism is C
MGRIYASTATLATMVEADEVDVVIDPKDIDLKITRSGGEGHLRHL

SEQ ID NO: 388 - protein, 171 aa, Zea mays
  VARIANT 142: note = Ancestral polymorphism is R, Derived polymorphism is C
MATNDGRSTPPCRLRTHGEKCGLDLEPKDFTNTPSSIGATPASSFATMRHLRPTSLHPILHQCGSSTHSSIDAAASSSSVDVVEVLLPNCVFRLRGNHKSFNMVSRRSVDTVSNMDATMEAELWENEFWSTHHTKLICTMGRWTAPRHHGGIILACADGLDCAIKRLQYNL

SEQ ID NO: 389 - protein, 337 aa, Zea mays
  VARIANT 45: note = Ancestral polymorphism is T, Derived polymorphism is M
  VARIANT 70: note = Ancestral polymorphism is A, Derived polymorphism is V
  VARIANT 84: note = Ancestral polymorphism is P, Derived polymorphism is S
  VARIANT 134..337: note = Derived polymorphism lacks residues 134 to 337
  VARIANT 171: note = Ancestral polymorphism is T, Derived polymorphism is I
  VARIANT 173..337: note = Derived polymorphism lacks residues 173 to 337
  VARIANT 261: note = Ancestral polymorphism is S, Derived polymorphism is L
  VARIANT 265: note = Ancestral polymorphism is V, Derived polymorphism is A
  VARIANT 276: note = Ancestral polymorphism is P, Derived polymorphism is L
  VARIANT 281..337: note = Derived polymorphism lacks residues 281 to 337
  VARIANT 287..337: note = Derived polymorphism lacks residues 287 to 337
  VARIANT 297..337: note = Derived polymorphism lacks residues 297 to 337
MDRFVAKTDGKRDSVLTYYSTFAESEGNIEHDQLMYSPRSVARAMVTGIPIGDQGVAMLQGPLIVGAGPAGLVCAVELTMGSVPYVILERDMCIASMWHCRTYRRLCLHLPKRYCQLPRMPFPHSYPTYPTKQQFLAYLDEYKRNHGIRPFFNMEVGHILPREIMGLSTFTLSVWLLKFLNVKIVDQILLLLARLILGDTKYIGISRPTLGPMELKSLSGKTPVLDVGTISKIKSGDIKVFPAIESFQERGVQFIDGRIESFDVAILATGYKSNVPYWLKENDFFSQKNGFPRIPNEWKGNNGLYAAGFSRRGLFGVSIDATKIANDIIQSYNNTTS

SEQ ID NO: 390 - protein, 482 aa, Zea mays
  VARIANT 334: note = Ancestral polymorphism is T, Derived polymorphism is I
MATPELWWYWWLWVTTMLAVVVSTVVCYLTNQHRRWGGWGSSSGRRRPPGPRPLPLIGNLLDLRRAPGSLHHTLARLARAHGAPVMRLDLGLVPAVVVSSRDAAREAFAAHDRRIAARPVPDSKRALGFCDRSMLSLPSSAPLWRTLRGVMAAHVLSPRSLAASRAARERKVADLIGYLRARAGTVVDLKEAVYGGVANLVSTAMFSIDVVDVGAAESSSAAHGLQELLEELMQCMAQPNVSDFFPFLSALDLQGCRRRVAVQLGQVLQVLDDITDRRLASSSSSSTSSKGGDRRGDFLDILLDLQSTGKITRDNVTLTLFDIFAAGSDTMALTVVWAMAELLRNPGVMARLRAEVRDALGGRDAVEEADAAGLPFLQAVVREAMRLHPAAPVLLPHKAVEDGVQIGGYAVPRGCTVIFNSWAIMRDPAAWERPDEFLPERFLARDLDFRGKQLEFVPFGSGRRLCPGRQACPWRSGWCRWF

SEQ ID NO: 391 - protein, 465 aa, Zea mays
  VARIANT 443..465: note = Derived polymorphism lacks residues 443 to 465
  VARIANT 386: note = Ancestral polymorphism is D, Derived polymorphism is V
  VARIANT 370: note = Ancestral polymorphism is S, Derived polymorphism is L
  VARIANT 363..465: note = Derived polymorphism lacks residues 363 to 465
  VARIANT 355..465: note = Derived polymorphism lacks residues 355 to 465
  VARIANT 351: note = Ancestral polymorphism is M, Derived polymorphism is T
  VARIANT 336: note = Ancestral polymorphism is D, Derived polymorphism is V
  VARIANT 329: note = Ancestral polymorphism is P, Derived polymorphism is S
  VARIANT 326: note = Ancestral polymorphism is G, Derived polymorphism is C
  VARIANT 319: note = Ancestral polymorphism is R, Derived polymorphism is I
  VARIANT 257: note = Ancestral polymorphism is T, Derived polymorphism is A
  VARIANT 173..465: note = Derived polymorphism lacks residues 173 to 465
  VARIANT 171: note = Ancestral polymorphism is W, Derived polymorphism is R
  VARIANT 88..465: note = Derived polymorphism lacks residues 88 to 465
  VARIANT 45: note = Ancestral polymorphism is S, Derived polymorphism is Y
MSFTGSIPVHRLTAIAMAEVTERRKRAAVVVLGDIGRSPRMQYHSLSLANQNTKHAILRSEPYLSQRESINLHPRDEKVQLTGISKISGALALLLKAAVQFILLVWFLCFKIPRPYVFVVQNPPSVPTLAAVKLASWLRGAKFIVDWHKFGYTLLGLSHGRSHIIVKIYFWFEKYFGQMADGAFCVTKAMQHELAQNWGIRAKVLYDQSPDFFHPASLMEKHGLFSRLGNSICSAMGNAKCISVEEVWEDMSITVFASKIDDEVFLKSNRPALVVSSTSCIDVRDYDRRVAAALGEDDSTDEEQLWIDIKNGKQFVYPRLLFIVTGKGPDRKKYEVQIKRLKLRRVALRTMWLASEDYPLLLGSADLGVSLHTSSSGLDLPMKVVDMFGCGLPVCAAPFSCIEDLVKVNKNDLFSTSSELADELMMLFKGFPEECNALKSLKECAMKSPSSSKWSQNGKPTPYRW

SEQ ID NO: 392 - protein, 164 aa, Zea mays
  VARIANT 135..164: note = Derived polymorphism lacks residues 135 to 164
  VARIANT 124: note = Ancestral polymorphism is R, Derived polymorphism is M
  VARIANT 122: note = Ancestral polymorphism is K, Derived polymorphism is N
  VARIANT 51: note = Ancestral polymorphism is E, Derived polymorphism is D
MAAMPTDSITRRFAVACGVLSQHVRNGGAPFLTKHAQAGAGAGAGPAAAQEMIAGSPQQLTILYGGRVVVLLDACPPEKAAELIRLAAAAAQQGPQPPPEQALVDMPIARKASLRRFLAKRKDRSSFYEDDETPEPKKGKMAAASEEHSSSWLALGSLCSMHGR

SEQ ID NO: 393 - protein, 116 aa, Zea mays
  VARIANT 4: note = Ancestral polymorphism is R, Derived polymorphism is C
  VARIANT 7..116: note = Derived polymorphism lacks residues 7 to 116
  VARIANT 17: note = Ancestral polymorphism is R, Derived polymorphism is C
  VARIANT 20: note = Ancestral polymorphism is G, Derived polymorphism is R
  VARIANT 23: note = Ancestral polymorphism is R, Derived polymorphism is C
  VARIANT 24..116: note = Derived polymorphism lacks residues 24 to 116
  VARIANT 26: note = Ancestral polymorphism is R, Derived polymorphism is L
  VARIANT 41: note = Ancestral polymorphism is G, Derived polymorphism is D
  VARIANT 47: note = Ancestral polymorphism is R, Derived polymorphism is H
  VARIANT 50: note = Ancestral polymorphism is R, Derived polymorphism is H
  VARIANT 68: note = Ancestral polymorphism is H, Derived polymorphism is Q
  VARIANT 81: note = Ancestral polymorphism is R, Derived polymorphism is K
  VARIANT 86: note = Ancestral polymorphism is V, Derived polymorphism is E
MFARAGEVSTELAVDLRVVGTRRQRRCLYRRIPLLRRYILGSIDALRAARNSTDRARHGRCILFIHLHTTAGCDYVNDSTKVAYHVLDRMSMRYPVQEASPNSYAAGQSDEIAFKK

SEQ ID NO: 394 - protein, 415 aa, Zea mays
  VARIANT 320: note = Ancestral polymorphism is V, Derived polymorphism is A
MTRGRSVKDRSKKKRVHALEVATERWKVLSKVLAVVDALKKEDEHVTPLKRLEILRPQLGLVKPHKVAHFVRRSPHLFEVCRDSRGVMWAGLSPQAEALVEEEARLLEDHSPVAVQYVTRMLMMSVDRRLPVDKIAHFRRDMGLPHDFRTRWVHMFPEHFRLVRLEDGEYLELISWDPTWAVTELEKKASVSTGDAIASSPGELSLPFPMKFPPNFTTYYRFRGKAHHYVKMGNTDQFQKVTYLSPYAEAKGLTPGSPEFDKRAVAVMHEILSFMLEKRLVTDHLTHFRREFVMPQKLMRLLLKHYGIFYVSERGKRLSVFLTEAYDGNELIEKCPLVRWREKLLQLTGYRGRLKNLGKVDVCSDSDEYLLGHDDDDDVLDVESENPDDILDDCSISDDSEMDLGDADADEFCRD

SEQ ID NO: 395 - protein, 455 aa, Zea mays
  VARIANT 87: note = Ancestral polymorphism is T, Derived polymorphism is M
MPALSDVALQAAIAGNLRLLKLVASKMNLREAKDAAGRNALHLAAEMGRLEVCRFLVEESGFEVNFACAEGAAAAIAGILRLGGGRTVPSTIRQRSVTEILPLYYCVIGGSPVHCAAAGGSESVLGYLLDHGGDPVMPDSMGSTPLHDAAEEGHCAAVRMLLSKGVDVDPHGCRGTPLHLACSNDRDQVVRILLEHGADPNKVVGHVLPPLMMAYCGGSLRCMKLLIEAGADVNLIAPSGVILAQAVCDGSTEIVKFLLEVGADPNIPDEDGKIPIMYPAFNGHRELVEILFPKTRPVSSLPDWSVDGIIRSMKDLFFKPQDAAVVEKKIADAKSQGKEAFARGEYPAAVYFYTMVLENDLDATAFANRSLCWLRLREGAKALLDAQQCKMIRPRWSKAWYREGAALSLLKDYQGAVNAFTEALKLDPASLEIKKALREATDSLANVGRSGEQNP

SEQ ID NO: 396 - protein, 543 aa, Zea mays
  VARIANT 224: note = Ancestral polymorphism is V, Derived polymorphism is A
MAREEQALLSTEIVNRGVEPSGPDAGSPAFSVRVRRRLPDFLQSVNLKYVRLGYHYLISHGVYLATIPVIVLVCGAELGSLSRDELWRKVWGEATYDLATVLAFLAVLAFTISVYIMSRPRPVYLIDFACYKPADELKVSKAEFIDLARKSGKFDEDSLAFQSRLLAKSGIGDESYMPRCVFEPNASCATMKEGRAEASTAMFAALDELFDKCRVRPKDVGVLVVNCSLFNPTPSLSAMIVNHYKMRGNILSYNLGGMGCSAGVIAIDLARDMLQASGAGLAVVVSTEAVSFTWYPGKRRSMLIPNAFFRAGCAAVLLSNRRRDFHRAKYQLEHVVRTHKGADDRAFRSVYQEEDEQRIKGLSISRDLLEVGGHALKTNITTLGPLVLPFSEQLLFFAGVLFRHLFPSKASTPAPPTTPGDASAAAPYIPDFKRAFEHFCMHAASRDVLEHLQSNLGLRDADLEASRAALHRFGNTSSSSIWYELAYLEAKGRVRRGDRVWQLAFGSGFKCNSAVWRAVRRVRRPARSPWLDCIDQYPARMDA

SEQ ID NO: 397 - protein, 80 aa, Zea mays
  VARIANT 3: note = Ancestral polymorphism is R, Derived polymorphism is Q
  VARIANT 8: note = Ancestral polymorphism is S, Derived polymorphism is F
  VARIANT 45: note = Ancestral polymorphism is C, Derived polymorphism is F
MARPPILSVALPSDTGRVLSIQSHTVWLPAPLPHPIHLFAGLLLCVPSMGYVGNKSAVFPLQLLGFDVDPINSTVFLTIQ

SEQ ID NO: 398 - protein, 159 aa, Zea mays
  VARIANT 55: note = Ancestral polymorphism is L, Derived polymorphism is I
  VARIANT 25: note = Ancestral polymorphism is S, Derived polymorphism is N
MSHFAAAAVKSPLAVAAPAAGDAKSPLFCPKPRRPAAPLRCHQGGDAGMDLLDLLLSKGEESGLSAASPLFCGSPPRRASNPVVHDSRFGVDCPPLPVPMPVAAAAVHRPSAAPPMSPRGGNGCARARFAFQPAAVRVEGFDCLDRGRGGRGHGITAMA

SEQ ID NO: 399 - protein, 594 aa, Zea mays
  VARIANT 157: note = Ancestral polymorphism is A, Derived polymorphism is T
  VARIANT 183: note = Ancestral polymorphism is R, Derived polymorphism is W
  VARIANT 212: note = Ancestral polymorphism is N, Derived polymorphism is I
MASDAPAPAAAQPKRRGSYNCGRCGLPKKGHVCTVPRLAAAGGGDKAGEQQPPPPPPQTKPRRALQFDDPPAASDVLLDAVPLAAAAPGKKARVEAVDVEEEEDGGGDYDPPPLDWWVEAGAGRRAPGEVLVEVLRRMPPRAVAAAAGVSRGWRECARRVWRAAEEVRLRAAGVGPVGALMARCPALARLVLRMDSDVDATMLACIAFSCPNLQSLDISMANSAVNRITGDELSRFVSEKRSLSVLKLDGCSSLGFLNISSSSLSTLWMSGLCSLTKAVMNCPNLTELSLDFPKQNNDSTDLAALIDSLGRTCPNLRNMHVSSIRLCNEAVFALESANLRGLCMLSLVLGSKITDAAVASIVRSYSSLELLDLSGSGITDNGLGMISKAFPDTLTRLLLALCPNITSSGVQVAAAQLPLLRLMDCGNSICANPQPEAGRSYFGDLTGGIKFCSKLPVQKKQQQQQAACQKLIIKHGALKKLSLWGCSAIDALYVNCPELVDLNLNACTNLHPERLLIQCPKLKDVHVSGCRDMLIGAVRNQVLNEFAAAEPRLPCKRLADGSKRVHVPHFMIEQLEEQEKWGGPRKSQCTVHLT

SEQ ID NO: 400 - protein, 190 aa, Zea mays
  VARIANT 28: note = Ancestral polymorphism is P, Derived polymorphism is A
  VARIANT 30: note = Ancestral polymorphism is L, Derived polymorphism is P
  VARIANT 79..190: note = Derived polymorphism lacks residues 79 to 190
  VARIANT 115: note = Ancestral polymorphism is P, Derived polymorphism is T
MLEMLSGQRALDSNQPSGQLSLDDWAKPYLADRRRLAWLMDPRFKGQYNSRQGFAQLTLGCLAGEPRSRLSMKEVVETQEQVEATKSRARSGGSESSRAGVCGAPAVAARRWRRPCRVQARRQRPQHQVRAMTLQQGGDDSSCKWCFFPGGGPSKNGAGWTSRNQRAGKVGVDFTEPLGVGEEHGRHSRA

SEQ ID NO: 401 - protein, 425 aa, Zea mays
  VARIANT 328..425: note = Derived polymorphism lacks residues 328 to 425
  VARIANT 313: note = Ancestral polymorphism is S, Derived polymorphism is L
  VARIANT 303: note = Ancestral polymorphism is R, Derived polymorphism is G
  VARIANT 296..425: note = Derived polymorphism lacks residues 296 to 425
  VARIANT 293: note = Ancestral polymorphism is R, Derived polymorphism is M
  VARIANT 259: note = Ancestral polymorphism is S, Derived polymorphism is L
  VARIANT 48: note = Ancestral polymorphism is A, Derived polymorphism is T
  VARIANT 19: note = Ancestral polymorphism is G, Derived polymorphism is R
  VARIANT 11: note = Ancestral polymorphism is P, Derived polymorphism is S
  VARIANT 7..425: note = Derived polymorphism lacks residues 7 to 425
MAPLRRWADLPADLLCRIGDRLDLKWSFELTAIVLGSRCIGSSNGWIALSVVLFNGKTVFVLLNPIAAVEILLPPLIYESRWVSKVVFTPSPAKDDFAAAAICDIDRIAYVTAGARRWAVMDPVRLTCGDQLIDVVYTDKGKARPRDQDLTIPLRVTFCAETLIPYKKVPPESQGPHLNAPATVEPLLSEANLPFNPATVFAPPYDSGGATDFPETYNSTANFARERKLTWLLDFFNVGAPPEIVSRLSTLAVDVEMNSDDRQEHRRAADPELDRFMEIYCHMLVRYRQELTRPIQEADEFFRSMEAQIDAFLLLGLTLGSGVTLPARSILVVPLHLVQMDASVWGDDADQFNPHRFLKRDIDLGGLLTALTPNIEVPVYVKALSKTATSIIECVLRRDPHEAEYIQSIQEVVHSLEPVLVKNTQ

SEQ ID NO: 402 - protein, 312 aa, Zea mays
  VARIANT 285: note = Ancestral polymorphism is I, Derived polymorphism is T
  VARIANT 223: note = Ancestral polymorphism is R, Derived polymorphism is Q
  VARIANT 64: note = Ancestral polymorphism is Q, Derived polymorphism is R
MYMHPSKLLILTVVVTGAAAAHDHPSASTPAAQFWQQALPGTPMPEAIADLVQKGIDHSPLVERYPSAPGLSACGAWSNLCTRSVAAGTGIFFHEAELRPGSAMALSFPAEVDTPILPHAVAAAAPFANLTAVFATFGVAGGSAEAEHVRDTLRWCEAPPRPAGERVAACATSLESTVRSATRMLGAAGGDGVWAAATSARLRAGLPRGRYVVGAVAPLHGDQLVACHRVPFPYAVYQCHMTTRKTDRAYVVSLRGRGGPVLDDVLAFCHRDTSGWSPDHPAFRILRVRLGTPVCHFVPYGNPVFGRKASTT

SEQ ID NO: 403 - protein, 862 aa, Zea mays
  VARIANT 671..862: note = Derived polymorphism lacks residues 671 to 862
MEESDAAEGVAVQLIDGEGEFAAEGAERFMAAAGVAGCGLSYAVVSIMGPQSSGKSTLLNQLFGTNFREMDAFRGRSQTTKGIWIARCVGVEPCTVVLDLEGTDGRERGEDDTAFEKQSSLFALAISDIVLINMWCHDIGREQAANKPLLKTVFQVMMRLFSPRKTTLLFVIRDKTRTPLEHLEPVLREDIQKIWNSVAKPEAHKDTPINEFFNVQVTALSSFEEKEDQFREQVQQLRQRFSNSIAPGGLAGDRRGVVPASGFLFSSQQIWKVIRENKDLDLPAHKVMVATVRCDEIANEKFGCITSDTEWLDVESAVQSGPVPGFGKKLGNIVDVHLQEYDKEAVYFDEAVRKGKRQHLESRILNLVQPAFQKMLTHLRVKALEKFKTGLNSSLESGKGFAVSARDNTECSLKEFEQGCADAIIKQANWDCSKMLEKVRRDIEDHALSIRESKLSEMTRHAKDKLRKALAEPVESLFDAADQTTWQSIRNIYKRETDAILPEFLNNLCQFEMEYAPAEEMVSKLKDYARSVVESKAKEESSKVLIHMKERFTTVFSHDKDSIPRVWTGKEDVRAIAKEARSAALKLLSVMAAIRWDDEPDRIESILTSTLLEGSVVSKIASAASADPLASTTWEEIAPKHTMITPSQCKSLWKQFKAETEFTITQAVSTQQAHRRGNSKLPPPWAIVAIAILGFNEIMVLIRNPIYLFLLFVGYLMVKALAMQLDVSREFQNGVVPGIISVSVKLLPAIQNLVNKVAAEQQAEHQQQHPHPHPHTQAPGPPQPQMQPPPLLLSPRSPMSELRRLHMPRSPRSPRKVASPAPSSSSSSSAVSSPRHVGEDQKPRPGAVGAPENEATVADSIV

SEQ ID NO: 404 - protein, 113 aa, Zea mays
  VARIANT 88..113: note = Derived polymorphism lacks residues 88 to 113
  VARIANT 87..113: note = Derived polymorphism lacks residues 87 to 113
MLLSHFQQIRTFIQMRTNLKVVDNSGAKRVMCIQSLRGKKGARLRDMIIGSIAPKGYRQSIPSLKFQKLAEVTCKMLTAPLYDFVFQQNQQIPIKGNLTKIRRETKCIPDLIF

SEQ ID NO: 405 - protein, 121 aa, Zea mays
  VARIANT 6: note = Ancestral polymorphism is E, Derived polymorphism is V
  VARIANT 30..121: note = Derived polymorphism lacks residues 30 to 121
  VARIANT 48: note = Ancestral polymorphism is E, Derived polymorphism is K
  VARIANT 64: note = Ancestral polymorphism is T, Derived polymorphism is I
  VARIANT 67: note = Ancestral polymorphism is D, Derived polymorphism is G
  VARIANT 75: note = Ancestral polymorphism is P, Derived polymorphism is L
  VARIANT 81..121: note = Derived polymorphism lacks residues 81 to 121
  VARIANT 84: note = Ancestral polymorphism is T, Derived polymorphism is I
MTNTVEWERIPAQEREERLRVFHQRENIVRFDMRLANEDVGMLAFTSEQIPAPFLLPKMRKSLTVKDPEKYEFKPKQLLKQIATIYVHILRGDKESVFPSAISKDGRAYNDQSPPTENRQL

SEQ ID NO: 406 - protein, 258 aa, Zea mays
  VARIANT 162: note = Ancestral polymorphism is L, Derived polymorphism is I
  VARIANT 148: note = Ancestral polymorphism is A, Derived polymorphism is S
  VARIANT 106: note = Ancestral polymorphism is E, Derived polymorphism is K
MMTLNHLGNLMQIGHSAYVDSPLGPDAFREYETLLIQDHDELLKKSENLDRHKENIHKEASDFTSDVDNYSKWGSGVHYGSNSESSPTKRDFLMTKWARVFVLPSEGIIADSSLSNHHEDSLGSGLPSISTGKPFDSDEVPPGVTLTAQFLYHLANKMDLKLDIFSLGDTSKHHGFWNQVVKAAFWILNQLFLERFADHQQDRNLLMFLQQMVKQQAPRSRAHLAHALLMRSLNKIAMLLKDSRWSQELFLNICQNLL

SEQ ID NO: 407 - protein, 406 aa, Zea mays
  VARIANT 351: note = Ancestral polymorphism is H, Derived polymorphism is Y
  VARIANT 290: note = Ancestral polymorphism is W, Derived polymorphism is R
  VARIANT 283: note = Ancestral polymorphism is N, Derived polymorphism is I
  VARIANT 278: note = Ancestral polymorphism is S, Derived polymorphism is F
  VARIANT 261: note = Ancestral polymorphism is C, Derived polymorphism is Y
  VARIANT 247: note = Ancestral polymorphism is T, Derived polymorphism is K
  VARIANT 229..406: note = Derived polymorphism lacks residues 229 to 406
  VARIANT 195..406: note = Derived polymorphism lacks residues 195 to 406
  VARIANT 174: note = Ancestral polymorphism is E, Derived polymorphism is G
MAQEHMKQRPGGTVHIEITFVSEFFKRDAGDDREFDDIYCETSERSQVERRVLLYLQHDMLKGLQKQIDGVSHYMKLKYHNWPDLQIAYWPWKLIEFIDAKQTDRTLPNPNKRKRSPPISPEDDPISLYFEEICAKQENDVIPTPTSVNECGKDSLISGLSTKDMSVRKADMIEFLCDYIMTIQDATILEAKWVQSFKPYRIDLTVKTLQELLNVNKDMPIDCFNMDVRILAHNEPKRLSLAKRKITKHYMDLCFCVLMPYRYSTGYVLFIINHANKFVYVFIFTPTPEWCKDIPLKRFWEVILLISKKYKAAYGVKRIGWSHDIYMWRHSIRPDAPIDLKSVNTGHFALHIIEWWESGSKAQFSMDGATLRRNLFIDLLTYEGNTYRFNIPVNIREYLDRIMKKD

SEQ ID NO: 408 - protein, 370 aa, Zea mays
  VARIANT 70: note = Ancestral polymorphism is A, Derived polymorphism is V
  VARIANT 75: note = Ancestral polymorphism is G, Derived polymorphism is D
  VARIANT 79: note = Ancestral polymorphism is R, Derived polymorphism is L
MTSTAAGASSSAAKSESYLRADKIDLESLDIQLEKQLAKTWEKHKGSYNQGPREDWEIDLAKLEIRYVIAQGTYGTVYRGTYDGQDVAVKLLDWGEDGFASETETATLRASFKQEVAVWHELNHPNVTKFVGASMGTTDLKIPANSSNSGGRTELPPRACCVVVEYLAGGSLKQYLIKNRRRKLAYKVVVQIALDLARGLNYLHSRKIVHRDVKTENMLLDTQRNLKIADFGVARVEAQNPKDMTGATGTLGYMAPEVLEGKPYNRKCDVYSFGICLWEIYCCDMPYPDLSFADVSSAVVHQNLRPDIPRCCPSPMANIMRKCWDANPDKRPDMDDVVRFLEALDTSKGGGMIPEGQAGGCLCFFRARGP

SEQ ID NO: 409 - protein, 170 aa, Zea mays
  VARIANT 15: note = Ancestral polymorphism is L, Derived polymorphism is P
  VARIANT 51: note = Ancestral polymorphism is G, Derived polymorphism is V
  VARIANT 140..170: note = Derived polymorphism lacks residues 140 to 170
MGRRNDDIDWKSVFLSYFSHGASSDPAATRASGVAMAASSDDDERRRGSPGLHQRSEEPRSELERRFGKCCRPGAQVDGGAQAQHCRVTRAAAKAAVGLGPDVSSASNVVYDLSKIPSYACCRYRFFNLARLRVVLKVDWENLGSSNGVLNLSRTAGMHAIPVRVEYQSK

SEQ ID NO: 410 - protein, 95 aa, Zea mays
  VARIANT 77: note = Ancestral polymorphism is A, Derived polymorphism is P
  VARIANT 59..95: note = Derived polymorphism lacks residues 59 to 95
MICMCQHLKLLGKLRRNKLNDRFLEFGSTLEPGKPVKADKAAILSDATLMVIQLRSEAQQLKETNGSLEEKIKELKAEKDELRDEKQKLKLEESL

SEQ ID NO: 411 - protein, 385 aa, Zea mays
  VARIANT 91: note = Ancestral polymorphism is W, Derived polymorphism is S
  VARIANT 244: note = Ancestral polymorphism is R, Derived polymorphism is S
MSDRLNEPKIYYPSRDDQEVVELTRSDIRCLDPEVFLSSQVINFYIKYIKMTRLCDENFRDKFYIFNTYFYGKLEEALRRPRDFPKLRRWSKGVNIFNNAYIILPIHGKEHWSLVIICLPPKERTSSEPIIILHLDSLGMHPSTKILNTVGRYLEKEWRFLSVAWPCLLNDIRKEAVQVPQQNNAYDCGIFMLYYIEQFIKKAPARFTTDKLGMFNRSWFKPEEASGLRQRIRELLLQEFGSARPDEAASEADVAAKRKEGISAAEWNEEEAGRVVSESDSCSYGAGDEKGTVKADSGSAEAEKEGGLVVTASSQKRSKGTAEEEEEVRGSSMPVPDAVCEITGTKVWIKRVYRRTGWPPGNWCWSSGGSSRDARRAFIEQFSRK

SEQ ID NO: 412 - protein, 222 aa, Zea mays
  VARIANT 194: note = Ancestral polymorphism is A, Derived polymorphism is G
  VARIANT 186: note = Ancestral polymorphism is T, Derived polymorphism is R
  VARIANT 156: note = Ancestral polymorphism is G, Derived polymorphism is E
  VARIANT 152: note = Ancestral polymorphism is F, Derived polymorphism is V
  VARIANT 143: note = Ancestral polymorphism is S, Derived polymorphism is L
  VARIANT 142..222: note = Derived polymorphism lacks residues 142 to 222
  VARIANT 130..222: note = Derived polymorphism lacks residues 130 to 222
  VARIANT 127: note = Ancestral polymorphism is V, Derived polymorphism is A
MGSGADRPSAVARKITREWWKEAGERQRNEAPLAAQGLHPCLGKAWRARHGEAMDCHNLVERVHFPKALLHYYFFASSSLLATKIRVLSFFPCFLCETGEDQLADEAATGSRAELQQDLAMANRGIVTHRGFLNATLLAPSWSKVNRKSLVFVKPGLLWLSMLLGPLIKVEDMDAYAPKDLLVVTRGSQGEPRAALNLASYGRSHALKLSKEDVLLYSAKVF

SEQ ID NO: 413 - protein, 246 aa, Zea mays
  VARIANT 178: note = Ancestral polymorphism is W, Derived polymorphism is S
  VARIANT 135: note = Ancestral polymorphism is Q, Derived polymorphism is K
  VARIANT 114..246: note = Derived polymorphism lacks residues 114 to 246
  VARIANT 110..246: note = Derived polymorphism lacks residues 110 to 246
  VARIANT 55..246: note = Ancestral polymorphism lacks residues 55 to 246
  VARIANT 50: note = Ancestral polymorphism is H, Derived polymorphism is Y
  VARIANT 44: note = Ancestral polymorphism is A, Derived polymorphism is T
MSMMLRCQYSDTKTIELLGSKISHEHFNEASHLADLLMLLKPNAWKLNGHFHNSLAALVPSSVGTVVTAEQKDNGHHASGEWHGDNVQVIGQQQKIYIIKVPNFAGDDLWNKIQAAQAHLDHLTQERDAINRRRQKQKAVCDQYREKLVAAHERTSLRKLTEEHRAANEIRQKAYSEWTELRSEPSKKNEYFFRYRNDRNAAEIFRANGDINGLKSHCNSQLKVIGDGGDPNGHYDKDDHHEALCR

SEQ ID NO: 414 - protein, 428 aa, Zea mays
  VARIANT 55: note = Ancestral polymorphism is P, Derived polymorphism is L
  VARIANT 190: note = Ancestral polymorphism is V, Derived polymorphism is A
  VARIANT 249: note = Ancestral polymorphism is T, Derived polymorphism is A
  VARIANT 278: note = Ancestral polymorphism is R, Derived polymorphism is Q
  VARIANT 315..428: note = Ancestral polymorphism lacks residues 315 to 428
  VARIANT 340..428: note = Ancestral polymorphism lacks residues 340 to 428
MVVTAAGSAEEAVRRWVDAAGGRLVLDGGLATELEANGADLNDPLWSAKCLLSSPHLIRKANHSPQTLLFVHMDYLEAGANIIITASYQATIQGFESKGFSKEQSENLLTKSVEIALEAREMFLKEHLEKSTPIQHPVLVAASLGSYGAYLADGSEYRYSLLFFAVNSGDYGEAGTKEFLKDFHRRRLQVLAEAGPDLIAFETIPNKLEAEAYVELLEECNINIPAWFSFNSKDGVHIVSGDSLIECTTIADKCAKVGAVGINCTPPRFIHGLILSIRKVSLVSTTLCTVFTACLAPPSVMDDCSTYPCGVHIPWSPFLVYLGTNHCVGDGEGCCYVFTWITFVALPQVTDKPILIYPNSGERYDGEKKEWVESTGVSDGDFVSYVNEWCKDGAVLIGGCCRTTPNTIRAIHRTLNKSPNKQQLPAVE

SEQ ID NO: 415 - protein, 169 aa, Zea mays
  VARIANT 65: note = Ancestral polymorphism is P, Derived polymorphism is S
  VARIANT 36..169: note = Derived polymorphism lacks residues 36 to 169
  VARIANT 20: note = Ancestral polymorphism is G, Derived polymorphism is R
MSEVRIISRLRPWNLVLLVGWCFGGGGGDDLLLVYELVRKGSVDRHLYDTDKKLAWGRGREETESCVVHRDVKPSNVMLDASFAAKLGDFGLARAVVEDGRWSRTTAAAAGTTGYVDPECLSTGRTSVGSDVYSFGIVLLEIACGRPVPRGDAVEREHAPPGAQGLGAP

SEQ ID NO: 416 - protein, 70 aa, Zea mays
  VARIANT 51: note = Ancestral polymorphism is A, Derived polymorphism is V
  VARIANT 42..70: note = Derived polymorphism lacks residues 42 to 70
  VARIANT 36: note = Ancestral polymorphism is R, Derived polymorphism is Q
  VARIANT 14: note = Ancestral polymorphism is A, Derived polymorphism is V
  VARIANT 12: note = Ancestral polymorphism is R, Derived polymorphism is H
  VARIANT 6: note = Ancestral polymorphism is I, Derived polymorphism is V
  VARIANT 3: note = Ancestral polymorphism is F, Derived polymorphism is L
  VARIANT 1: note = Ancestral polymorphism is V, Derived polymorphism is M
MAFGLIMCFVDRNAAQCLDCLSRAPPGIAAACPGSRSVDAAYDACVLRYSVAPIPAAADLDYDPSVTAAI

SEQ ID NO: 417 - protein, 675 aa, Zea mays
  VARIANT 364..675: note = Derived polymorphism lacks residues 364 to 675
  VARIANT 386..675: note = Derived polymorphism lacks residues 386 to 675
MASCLLLLAALAIFFVAAAGQNNSIMEPFNPSCSSTDNYTDGSQYKKNLDQLLAALPAAAADNGWFYKGSAGAGPDEAFGLIMCFADRNATQCLDCLSRAPAGITTVCAGSRNVSAAYDACVLRYSAAPIPATADLNAAFAVHETIVGVPVTSEAVRDAWVPLMSKLSGGVANTPLRIFNSSTPYSGAGSQEMYGLAQCTRDLNGSECSNCISGYATRLGELFPNNTGGSIKGYSCYLRYLVAPIDITLPPPPTPTSSPPAPKASKTGIVIGVSVGAVSVLIIIGVFSIWLLRRRRKRRQARILEEAREQELGEGGFFDEQPELEDEFERGTGPKRFRYGELAVATGNFSDTQKLGEGGFGSVYRGFLEDMDLHVAIKRVSKGSKQGRKEYASEVRIISRLRHRNLVQLIGWCHGGGELLLVYELMPNGSLDHHLYSSSHGGLLPWPVRHEIVLGLGSALLYLHEEWEQCVVHRDIKPSNVMLDASFHAKLGDFGLARLVDHGRGSHTTVLAGTMGYMDPECMVTGRANAESDVYSFGVVLLEIACGRRPLVPRHGEDVIHIVQWVWEWYGRGAILDAADARLNGELDAREVETVMLVGLWCAHPDRSLRPSIRQAVNVLRLEAPLPSLPARMPVATYMPPPDALYYTSSVTTGGSSTGTGTTRSSTTETSTLLK

SEQ ID NO: 418 - protein, 436 aa, Zea mays
  VARIANT 199: note = Ancestral polymorphism is D, Derived polymorphism is V
  VARIANT 198: note = Ancestral polymorphism is Y, Derived polymorphism is N
  VARIANT 178..436: note = Derived polymorphism lacks residues 178 to 436
MAASLLSRAAAAAAALRGAARPNHLLARASLPKETLLPPLLLLIIIITAATPLAVGRVGWAARAAEGAGGPRCGPSPLLGAFGIAARCNATSSSSAVSEATGVHTVPPTEPVVSAEWLHANLKDPDVKVLDASWYMPAEQRNPLQEYQVAHIPGALFFDVDGISDRTSSLPHMLPSEKAFSAAVSALGIYNKDGIVVYDGKGLFSAARVWWMFRVFGHDKVWVLDGGLPQWRASGYDVESSASSDAILKASAAGEAIEKVYQGQLVGPTTFEAKLQPHLLWSLDQVKENINTQTHQLIDARSKPRFWQSKFCTCYFAQLSCIFRLTDLKLLFRFDGAVPEPRKGIRSGHVPGSKCVPFPQVLDSSQKLLPSDELRKRFEQEGISLDQPLVTSCGTGVTACVLALGLHRLGKTDVAIYDGSWTEWGAHPDTPVATAV

SEQ ID NO: 419 - protein, 310 aa, Zea mays
  VARIANT 266..310: note = Derived polymorphism lacks residues 266 to 310
  VARIANT 235: note = Ancestral polymorphism is Q, Derived polymorphism is R
  VARIANT 225: note = Ancestral polymorphism is A, Derived polymorphism is T
  VARIANT 215: note = Ancestral polymorphism is S, Derived polymorphism is A
  VARIANT 205: note = Ancestral polymorphism is P, Derived polymorphism is L
  VARIANT 187..310: note = Derived polymorphism lacks residues 187 to 310
  VARIANT 161..310: note = Derived polymorphism lacks residues 161 to 310
  VARIANT 128..310: note = Derived polymorphism lacks residues 128 to 310
  VARIANT 112: note = Ancestral polymorphism is P, Derived polymorphism is S
MPQPAAFVSVQPSDGQPTPSNVSNKKMKHGGEALFLDGAEEVAVTIGRNSQQPLSTAPPPVQMDLRRIPLSKGKENLKIFQPVDHAELGSRSQCPLPRHVNLSVNMLPVTYPQSHNYQQDDFHKTVARTLSQGSTSMSMDFHPLQQTLLLVGTNVGDIGLWDVGTKDRLVVRNFKVWDLSKCTIILQASLVKDPVVTVNRIIWSPDGTLFGVAYSRHIGGVNDIAFGFYLAWAMQHFHSSCFLNFFLQFIDILKSSATITGSLTSKSLLNDLLVIQILMHALYIHDLLVISTILLTANCNITPLCFVSGY

SEQ ID NO: 420 - protein, 311 aa, Zea mays
  VARIANT 66: note = Ancestral polymorphism is A, Derived polymorphism is E
MARLAVAARAFSAAASGGGVSLVQGASRGIGLEFVSPPHLPLIASPPPSVSSGPSVCVLIRCPLHALGDPVQVRQLLRRSDGGRVVATCRTPGSAAELQKLREEHAPGRLTVLPLDVTDESTIEAAAASITETHGSLDLLINSAGILSIPNVIQPETTLSKVQKSSLMLAYEVNAVGPILVIKHMWPLLKIGGRSETRRGFALVANMSARVSSIGDNALGGWHAYRASKTALNQLTKTVSVEFGRKDNIACVLLHPGTVDTDLSRPFQRNVPEGKLFTREFSVQRLLSVIDSVKKGDNGKFFAWDGQEIPW

SEQ ID NO: 421 - protein, 591 aa, Zea mays
  VARIANT 215..591: note = Derived polymorphism lacks residues 215 to 591
  VARIANT 211..591: note = Derived polymorphism lacks residues 211 to 591
MDSVRSGPFGQIFRPDNFVFQSGAGNNWAKGHYTEGAGNNRNRTRHPRPSTTYLHPLSASDVGAPTGNRQVSLWGSSTKEITCDTLLQKVSEENQLHRHLCCAAAAALSIQVIFTNDCYVFALCPFAGPQFQMNLKDEETTVETDSTQAPISQVLYTFHSVHHSMPKLEYSSSKMDMEKEIRKQVDDAIAKAKLDEASRALLMKVLEDATQDVVQRQAKMLVLFETPAGFTLFKVLDEGKLDKVEDLWKEFTTSDSARKVVELKAFNKFENTSDALSAATLIIDSKPSKGLRKFLQKHCEGETLVVADSKLGNAIKEKLLMRGLRNQLTELITGLGAQDLGPMSLGLSHSLSRYKLKFSPEKVDTMIIQDIGLLDDLDKELNTYAMRVREWYGWHFPELTKIVTDNIQYAKVVKMMGNRVNAVNLDFSKILSDEELETQLKEAAIISMGTEVSDLDLSNIRELCDQVLAISEYRAQLYDYLRSRMNTIAPNLTALVGELVGARLIAHGGSLLNLAKQPGSTIHILGAEKALFRALKTKHSTPKYGLIYHASLIGKASQKHKGKISHSLAAKTALAIRYDALGDAKLIKTEY

SEQ ID NO: 422 - protein, 337 aa, Zea mays
  VARIANT 40: note = Ancestral polymorphism is I, Derived polymorphism is V
  VARIANT 181: note = Ancestral polymorphism is A, Derived polymorphism is G
MPQVESATASEAPPPQDAWLVELGSRLPQWESLRDSSKVIIPISISRVNQFDAARLDVEMSAMLKEQLVKVFSLMKPGLLFQYEPELDAFLEFLIWRFSIWADKPTPGNALMNLRYRDERAAPITGKEVRTGLEGPGLSVSQKIFYCISFVGGQYVWSRLQSFSAFRRWGDSEQRPLARRAWALMRNAEVFYRAASFFNLLLFLYGGRYKTVVERILKARLVYGSPNMNRAVSFEYMNRQLVWNEFSEMLLLLLPLLNSSSVKKFLLPFSKDKSGGSSGDEADCPICRSSPSIPFIALPCQHRYCYYCLRTRCSATTSYRCTRCDGAVVAIQRLGSG

SEQ ID NO: 423 - protein, 226 aa, Zea mays
  VARIANT 218..226: note = Derived polymorphism lacks residues 218 to 226
  VARIANT 202: note = Ancestral polymorphism is S, Derived polymorphism is L
  VARIANT 178: note = Ancestral polymorphism is R, Derived polymorphism is G
  VARIANT 175: note = Ancestral polymorphism is V, Derived polymorphism is M
  VARIANT 92: note = Ancestral polymorphism is P, Derived polymorphism is L
  VARIANT 83..226: note = Derived polymorphism lacks residues 83 to 226
  VARIANT 58: note = Ancestral polymorphism is E, Derived polymorphism is D
  VARIANT 46: note = Ancestral polymorphism is F, Derived polymorphism is V
  VARIANT 40: note = Ancestral polymorphism is Y, Derived polymorphism is H
  VARIANT 25..226: note = Derived polymorphism lacks residues 25 to 226
MLRCTKGYNLGQLLLQALGGWRRRQAQEGRHEWSGFRQEYQMSSLFVLVDQVNKIFSENAFDVVMHFVTVAYVGVMEARCMTKARRLGVPTPVLYDVDPVLHTLTFEHVDGLSVNDILLRFGSNGVNEERLNDIATQIGNAMANYMMEALFMVLIDFGLSFTSTIPKDRAVDLYMLERALISMHSSCGDVMEKILAAYRKASKQWCSTRNKLAQVRQRGKKRTMVE

SEQ ID NO: 424 - protein, 81 aa, Zea mays
  VARIANT 45: note = Ancestral polymorphism is P, Derived polymorphism is S
MATQNKTSWPELVGQEINDAIAVIEQERPDVTLFESLDVDLNETPRPSNQLAPGAIRVVIYFGTDPVTNEEIVEETPYIKA

SEQ ID NO: 425 - protein, 573 aa, Zea mays
  VARIANT 76..573: note = Derived polymorphism lacks residues 76 to 573
  VARIANT 12..573: note = Derived polymorphism lacks residues 12 to 573
  VARIANT 9..573: note = Derived polymorphism lacks residues 9 to 573
MDSARSWLQKLQPRDKDRERGAKTPAPASPNGGAGNSARMAAAAGEEALSSATKQKVAAAKQYIENHYKSQMKSLQERKERRWMLERKLADADVSEEEQNNILKDLEKKETEYMRLRRHKMGVDDFELLTIIGRGAFGEVRLCREKATSNVYAMKKLKKSEMLRRGQVEHVRAERDLLAEVDSPYIVKLYCSFQDDEFLYLIMEYLPGGDMMTLLMRKDTLTEDESKFYVAETILAIESIHKRIYIHRDIKPDNLLLDRSGHLKLSDFGLCKPLDSSCFPNLSDLDYAAGKSTNPSSDGDKQSSNSTAPRRTQQEQLLHWQKNRRMLAYSTVGTPDYIAPEVLLKKGYGMECDWWSLGAIMFEMLVGYPPFYSEDPMSTCRKIVNWRSHLKFPEEASLSLEAKDLISKLLCNVDQRIGTKGAHEIKAHPWFAGVEWEKLYQMEAAFIPEVNDELDTQNFEKFEETAPPMQTSSKAGPWRKMLSSKDVNFVGYTYKNFEIVNDPELPGIAELKKTNNKPKRPTIKSLFETADSEDQPSDGSFLNLLPTQLELPESLEPSPHSSISSEDSQARNR

SEQ ID NO: 426 - protein, 817 aa, Zea mays
  VARIANT 221..817: note = Derived polymorphism lacks residues 221 to 817
MITGGQSYVSAPPAFSADGRLLLVCSGRAVSVFSTATAMLVSELEGHEGDVTAVVVVAPPAQATAAAKLASYCWTAGLDGVLIYWDFLAAEVMRKVQVGLPVHSMVVPDIYRTSKGVEVSSPFAFISVEDTSKLASEPKALCGQMRVYDLTKGRQVGGLLAETRKPEKIVASSSGEFLGITNKRKLHIWRIPTKDFKPDKIRKIKLRHTKHLTTLAFHPTERTVAGGDVTGRILIWRCFGNSKFSESSVQSKEDDGRDGVRGDDDADTCTTWHWHSSSVRFLKFSSDGAYLFSGGLEGVIVVWQLDTGKRRYKPRLGSPLLFFVDSPDSSISCVSCTNNQVYLLKMPNMEVMRSIAGIKVCNMEICTPPMQLLALLLPIASPNLGGSNRAVYGFDYTNRLVAIPTEDYCIQFYNLFENAEVSEVQVCERNFQPIDDITMYISMVSLSIDGDLMCTVDVKLPEEGLGGLVTLKFWNHGSRAGHYFLSTVIYEPHSDDGVSSVAFRPGRNMAVSSSFGGNFKVWVQSLSSQSNDERNCSGWRCQSVGSYKKKPMTSAAFSADGSVLAVAAESTITLWDPDNNALVGVIAETLSPVTNLSFVGTSVFLMSLCQSSRPQIALWNVSNLSMQWSYSIYAEAACCSPDGSEFAVLALLSCPDGEASTQQDGVILLFDAESSNPIASWSVKKASGGSISFVKGDVPLDANADSSRDKEPMLLVYVNGSHEYAIFDPRESEEVVISKNKHKKIQAEEPAPIGYASIYGELTKLEPKKEVSDVPFVPSDRPWETIFSGSSHVLPPLTKLCSAFLSSLLEKRPVANE

SEQ ID NO: 427 - protein, 515 aa, Zea mays
  VARIANT 479..515: note = Derived polymorphism lacks residues 479 to 515
  VARIANT 450..515: note = Derived polymorphism lacks residues 450 to 515
  VARIANT 421..515: note = Derived polymorphism lacks residues 421 to 515
  VARIANT 333: note = Ancestral polymorphism is S, Derived polymorphism is L
  VARIANT 275..515: note = Derived polymorphism lacks residues 275 to 515
  VARIANT 181..515: note = Derived polymorphism lacks residues 181 to 515
MAAAGLLEGLLNAFLKDYPLSLPELRYLGDCSGLASTSKFNIPKNMGEESINGASSKRQKGCKGKVSEKVNPDDKLKQPTILDAFKRAGVTVSHAANKASSQPSSSEMMSKDIEQDATDPGELGLIDLMAAPVKLDIQRYKFRTICATCLSLLNYSELLGIPDLLNQPNMSILKQLLQTLQPTENFDDVLSEFQPSLAPCNVDYLYCGACKILEDIMDLDKSGEPNGKNIHMGCSKAIIPFLRKRLGYSAHKLLSADFPSEDAGKGWQSKGDLIQKILQIYLWNSDSTSDLLAEIGRELPKHEENTGSLNKTIKQALKARGSVDTILQEIQKSVDAFVSLIGMCKSHEKVSMHAMAVKHGGKFIDTFLKAFNFLERHFKQHNDTIVKMVRVSHVPFGITVELQWLVSVADEIMLIQLKQLQKGTRIIQSICSDAKVKALLHSCSAEKEFQMGNLKHKYLQGHVVSSQAYGNVDEEDEEQTEIDSDLPADEHDNGNAMEEDVVEGSNETPMEDEEE

SEQ ID NO: 428 - protein, 449 aa, Zea mays
  VARIANT 25: note = Ancestral polymorphism is V, Derived polymorphism is A
  VARIANT 62: note = Ancestral polymorphism is K, Derived polymorphism is N
  VARIANT 247: note = Ancestral polymorphism is R, Derived polymorphism is W
MEALKPERVVDDAAADFICDAPSNALDEILVRLSPKWTLRMRSVCRAWRDKLDHWATRSRRKNPPQPLLCFDRVACPDRYVRLTDYCVESLDLRSGRPHHVLRFTASDYYEAAGARDDDDDDPPGDTEPEVSRVVDYAKMERENYADGFKQMVLLHASVDGYLLVSFSFDWYVINPATRHWASIPDLTLWNVIGFYEHFSSGEYRVLCSGGRTRTSSTVDEGPERWYHIVTVTRPVQWRSIGRPIARHVPRDHGLAAGVRMAGVSPPVQLRHRHLHWPPQKSQGYRILVFDIWVDAFSWKEPAPVTDMDQKDMALLEFPNGRLGMSVSGKNLATVELWRLEDYHNELWVLAYRIQLPLPWMRLMQDDDCWIPPSVVSADGDVLILSGRWLLHCDRNGNLLREFGLPHVRRMLPIRHVLRESLVQHRTFLNPKPAREPPFFRWLCGDPSW

SEQ ID NO: 429 - protein, 205 aa, Zea mays
  VARIANT 63: note = Ancestral polymorphism is A, Derived polymorphism is V
MDLERGDKKPPPPAPRTAATTTTTTTTSACSGKKRPPLRDSLVALQPVLLRAAAALAAAAAAAVMALDAQSYTAVVAIVGTRPLTQTFTARFSDTPAFVYFVIANAIAAAYNLLVLLVRRRRTTASLVVRMLDMVVMALLATGAAAAASMAELGRNGNARARWNPMCDRFGSFCRRGGAALASSFVGVALMLALNLLSAASGAGC

SEQ ID NO: 430 - protein, 611 aa, Zea mays
  VARIANT 172: note = Ancestral polymorphism is I, Derived polymorphism is T
MYAVLRRAAPLRRRAVSALATALLQQQPAALDAVARRAPLPAAAWFHSSPAWLGFRETGAAGAAARAEFAADNGSFYEEDKRAAAGGGAAAEGLEIAKLGISSKIVERLASKGITKLFPIQRAVLEPAMQGRDMVGRAKTGTGKTLAFGIPIMDAIIRHNEKYKPGKFPLAIVLAPTRELAKQVEREFLDSSPLETLCVYGGTPIMQQIRKLNYGVDVVIGTPGRVIDLLKRGSLSLAEIRFVVLDEADQMLSVGFDLDVETILERVPPQRQTLMFSATMPTWIRKLTQKYLNNPVTVDLVGEDDQKLAEGISLLAVSSENREKPAVLGELIKEHAKGGKCIVFTQTKRDADRLSHNMSRSFQCEALHGDISQSQRERTLAGFRDGRFNILIATDVAARGLDIPNVDLVIHFELPNSSELFVHRSGRTGRAGKKGTAIVMYNYDQSRAVRVIERDVGCKFTELPKITVDGSDLLSGGFDSFGGGYSGSNYGRSGGFGGRGGFGRSGGGGGYGNSGFGHSSGGYGRSGGGGFGDSGFGGRSGGGGGFGDSGFGGQSGGGGGFGDSGFGRTSGGGSGFGRSGGFGDSGSGRFGGGFGGSGSGGFGGFGDKNSR

SEQ ID NO: 431 - protein, 232 aa, Zea mays
  VARIANT 212..232: note = Derived polymorphism lacks residues 212 to 232
  VARIANT 210..232: note = Derived polymorphism lacks residues 210 to 232
  VARIANT 206..232: note = Derived polymorphism lacks residues 206 to 232
  VARIANT 166: note = Ancestral polymorphism is G, Derived polymorphism is R
  VARIANT 44..232: note = Derived polymorphism lacks residues 44 to 232
MQPPRNLRRRAQPPRSPVIPPPAFTAPSRPQSHPRARSSWSTPQSMPPSTASHRARSPLPAPAVPAPPRSPRHRAQLPIPSRSPRRLPVPAVPAPCNASAPGMEYLRRQWNCGTGWSSEHQISTLRHQISVAPPSMEGLWPRARNGAASIHALVRNHSLMLLLGVGTDVIRFDLSPRRRTRARTRRRSQSPRQLTVAALACGRRCQPTPRGRGGRGSGTSCPWQPRRQGGRC

SEQ ID NO: 432 - protein, 474 aa, Zea mays
  VARIANT 349: note = Ancestral polymorphism is P, Derived polymorphism is L
  VARIANT 340..474: note = Derived polymorphism lacks residues 340 to 474
  VARIANT 330: note = Ancestral polymorphism is S, Derived polymorphism is Y
  VARIANT 311: note = Ancestral polymorphism is P, Derived polymorphism is T
  VARIANT 308: note = Ancestral polymorphism is Y, Derived polymorphism is F
  VARIANT 286: note = Ancestral polymorphism is M, Derived polymorphism is T
  VARIANT 239: note = Ancestral polymorphism is R, Derived polymorphism is G
  VARIANT 107..474: note = Derived polymorphism lacks residues 107 to 474
MVRHPTSSYTAELTYYLRAFCHTQYCVNHYDNGQPLIRGLEYVTKPSALALATKSIGHQYLGLRNPDELAIVAVEEQTNTNLEEEGPTQGNDGSNVSAPAHEQFATECHSVDEQFVYSTDIYDPKNWNRLDNKARDILVEKGPIREENLVFPKDGNSRHFSYAHYFRKMKNGELIDRKCCCKSSLAHNCFGGWRHINDRLKDYETSVEHITNMNTWNELRARLAKAQTTDKEIQEEIKREKERLRQVLLRLVAIVKFLGKRCLAFRGSNEQLYNDQNGNFYACVEMIAKFDVVMQDHLRRIKNKETHYHYPSHKIQDELIYLMASNIIESIIKVVKDAKYFSIILDCTPDVSHQEQMTLLLRCVEMCGSSINIQEYFLGFLKVDDTSGLGLFNVLTDSIKLFGLNIDDIRGQGYDNCSNMKGKHQGVQRRLLNINPRALYMPCACHSLNLTLCLIFEELQTFKSIFGFLLSSTT

SEQ ID NO: 433 - protein, 143 aa, Zea mays
  VARIANT 127..143: note = Derived polymorphism lacks residues 127 to 143
  VARIANT 126..143: note = Derived polymorphism lacks residues 126 to 143
  VARIANT 98..143: note = Derived polymorphism lacks residues 98 to 143
  VARIANT 29..143: note = Derived polymorphism lacks residues 29 to 143
  VARIANT 16: note = Ancestral polymorphism is R, Derived polymorphism is C
  VARIANT 12: note = Ancestral polymorphism is R, Derived polymorphism is Q
  VARIANT 11: note = Ancestral polymorphism is G, Derived polymorphism is S
  VARIANT 7: note = Ancestral polymorphism is D, Derived polymorphism is N
  VARIANT 4: note = Ancestral polymorphism is S, Derived polymorphism is R
MMRSLRDSLHGRIAARLEAKRKTDEQRIWRTSKEQDIMELRNRLTELKRKTAVDKTEVEQASSDLKAKTVPLNLALVTLKKRRADAVAMHTNAMKVAQMNLMATTSDCMKMQSKSVKQLCRLFPMRRVSFYMHIYSCEVVIQG

SEQ ID NO: 434 - protein, 68 aa, Zea mays
  VARIANT 2: note = Ancestral polymorphism is F, Derived polymorphism is S
  VARIANT 5: note = Ancestral polymorphism is L, Derived polymorphism is Q
  VARIANT 29: note = Ancestral polymorphism is P, Derived polymorphism is H
  VARIANT 56: note = Ancestral polymorphism is E, Derived polymorphism is D
MFENQRRLQLVNLQWLEKWVVHAPCQLFPFLEALVIRGYSELVELSFSHAACCQQEKGTCADLFPRLA

SEQ ID NO: 435 - protein, 504 aa, Zea mays
  VARIANT 123: note = Ancestral polymorphism is S, Derived polymorphism is I
MKSRFLVLCAIVCVMAQMGDANVVLLGNNLTLSFADIEASFSPGVKGSGVNGIVYASEPLNACSPLTIKAVKGPPSPFALIVRGGCTFDEKVKNAQDAGFKAAIVYDNENSGVLVSIVAVAGSSSGIHIYAVFVSKASGEVLKKSSGHTDVEVWILPTFDNSAWSIMAISFISLLAMSAVLATCFFVRRHRIRRDHPRIPEAREFHGMSSQLVKAMPSLIFTKVQEDNCTSSMCAICLEDYSVGEKLRVLPCRHKFHAACVDLWLTSWRTFCPVCKRDATSGVSELPATEATPLLSSAVRLPSQPSSFRSSVAASPPRPISRHPSSHSVSRAYSVSSTPHSPNPFRSHTNLPGVIHASRSTTDLANMSSPHPRISHLSSSTHSLVGSHLSPPISIRYPLPHSRHESPSPHVSSPYISNSGYGSSSYYYLGGSSQHGSYLRRCGESGPSLSTMVPRSSQQQFQSEANVAAGASSAQSSRQSYLRRCGDSDASLSDMASAQSLPGC

SEQ ID NO: 436 - protein, 360 aa, Zea mays
  VARIANT 277..360: note = Derived polymorphism lacks residues 277 to 360
  VARIANT 189: note = Ancestral polymorphism is A, Derived polymorphism is V
MAMLALSSRPLSSSSFLRSKPRALHLHRHLLPKPLGSASPLTPPTPRADPAPAPDADPTPLFLRPASHRVPRAALAAFRRRAAALVPPTAPHLHRHLRWLLADATGDPSAATTSSSEGPALLRAPLEDLEALWLRHVRERTPFQYVVGNEHWRDLVVAVREGVLIPRPETEAIIDMVRAVEDFADGWWADLGTGSGAIAVALARELAGQGRVFATDVSEVAIDVARLNVQRYGVQDKVEIRHGSWFEPLEDLKGKLMGVISNPPYIPTDDLPGLQPEVGWHEPKLALDGGKDGLEHLLHLCEGLSSVLKPGGFFVFETNGNKQSELLVDLISTKWSCSFHNVKAVLDFADIKRFVTGYRR

SEQ ID NO: 437 - protein, 149 aa, Zea mays
  VARIANT 25: note = Ancestral polymorphism is W, Derived polymorphism is L
  VARIANT 88: note = Ancestral polymorphism is I, Derived polymorphism is V
MLRNFPQARRLLRRMGFEKEDAYFWKQMGKAMLCTYTLFGVVWLWNETSPLGWWTLKPRPKEEREMAHLYERRKFPYPGDDEAVEEFVKSGGALGTTIGPRGFADANMDSENMQKQLQSKKFEQEAQKLWIRMRNEVVQELQEKGFDIE

SEQ ID NO: 438 - protein, 742 aa, Zea mays
  VARIANT 94..742: note = Derived polymorphism lacks residues 94 to 742
  VARIANT 16..742: note = Derived polymorphism lacks residues 16 to 742
MHPGPRDHSDTGHQRWAPPPRRVLVPPPPSRLPNLRPKAPSAPIATPPATPQTTPPAAAASRSLRAQPSSGRPGPSALAPPPHVGDHRAEDQNQQKKQAEPGDQQEAPVTSSDSQPTVGTPSTDYVAPYAPHDMSHAMGQYAYPNIDPYYGSLYAAAYGGQPLMHPPLVGMHPAGLPLPTDAIEEPVKIRERKTRDVNQVKCIKDEANQLLVKSEEIKNRWKEYFNKLFNGGNESATIELDEPFDDNNRGFVRRIQEYEVKEALKRMKVGKAMGPDGIPIEVWRCLGDIAIVWLTKLFNTIFRANRMPDEWRRSTLVPIFKNKGDVQSCTNYRGIKLMSHTMKLWERVIEHRLRKMTSVTQNQFGFMPGRSTMEAIFLLRQLMERFREQKKDLHMVFIDLEKAYDKVPRSVMWWALEKHKVATKYINLIKDMYTNVVTSVRTSDGDTDDFPINIGLHQGSALSPYLFALVIDEVTRDIQGVLPWCMLFADDVVLIEESRSGVSQKLELWRQTLEAKGFRLSRSKTEYMKCDFSAMGYEDGDVSLDGQVVPKKDTFRYLGSMLQKEGDIDEDVSHRIKAGWLKWRQAAGVLCDHRVPRKLKDKFYRTAIRPAMLYGAECWPTKRRHVQQLSVAEMRMLRWICGHTRRDRVRNDDIRERVGVAPIEEKLMQHRLRWFGHIQRRPEEAPVHIGIIRRPENVKRGRGRPTLTWTEAVKRDLKEWNIDKELAADRKGWKCAIHVPEP

SEQ ID NO: 439 - protein, 789 aa, Zea mays
  VARIANT 459..789: note = Derived polymorphism lacks residues 459 to 789
  VARIANT 525..789: note = Derived polymorphism lacks residues 525 to 789
MEAMTGGKFLQKFRLYETRSKFYLIGRDKSRIHWRVLKIDRSEFTELGVEEDPTIYTENECQELLRRIHEGNRLTGGLKFVTKCYGIVGFVKFLGPYYMVIITRRRKIGTICGHEIYSVGKSEMIAIPSVTVWPNMAYSRDENRYKHLLCSVDLSKDFFFSYSYNIMHSLQKNITEKNIGQVYETMCVWNEFMTRAIRDHLMNTCWTVALVHGFFKQSRFSVSGKDFWLTLIARRSRHFAGTRFLKRGVNGKGRVANDVETEQIVFEDTSGGIPTQMASVVQHRGSIPLVWFQETSRLNIRPDIILKPDLDYKATRLHFENLALRYGNPIIILNLIKASAASLLFDTHEKKPRESLLCAEFAKAIHYINKSLSDDKCLKFLHMDLSNLFRRKGTNVLALLSKVASDVLDLTEFLHCEISTSTKSDDISSEEKTVAKPRDDRSSRDQTECAAKLVPLLLQKGVLRTNCIDCLDRTNVAQFSYGLAALGRQLHALGLAEAHKIELHDPLVDDLMDFYERMGDTLAIQYGGSAAHNKIFCEQRGQWKATTQSQEFLRTLQRYYNNAYTDHEKQDAINMFLGHFQPQQGKPALWKLDSDQHYNIGRQGTLKEEIGRSFIKRSLSDGNILLESSLPVTICNNETDNTELLPVQQLDDIREASDSAPEISICEPNLCSSMNYGTVPGRHSMSEERQSYLKRLGYPELHSSNFFDLDLLSSSGNSFDEEVFERSLLINSPMDVISPESSMSYSEQGHTDEGRDDTDLSRSSSQLSDIRDYSDHFAQWVVNGDTLCY

SEQ ID NO: 440 - protein, 276 aa, Zea mays
  VARIANT 43: note = Ancestral polymorphism is G, Derived polymorphism is S
  VARIANT 41: note = Ancestral polymorphism is G, Derived polymorphism is D
MAADEGQVFNYCKLAQAAYAAYDDHNGTCRYSLADMLPAVGLGGSGYVATSFIYATVNILAGDGVNEGNDDDGCQHEQHWIGYVALATDAERDRVGYRDIAVVWRGTSALDELLKDLQAVLVPIHGEQQAGTVRVERGFESLYTSSCEACAMRTSARTQVLAELTRLVTYAFCDELVAGQRHVSVQRVIVDRDVVPTLPPTFFGYADAGTNVRLLSSGGSGRFPLPFLTLLEPLRFHSIKQYLRLLDPAPAPPQARAPVPADHLVPVPEAELDNMI

SEQ ID NO: 441 - protein, 491 aa, Zea mays
  VARIANT 126: note = Ancestral polymorphism is F, Derived polymorphism is C
MDAAVRVPPALGNKTVTEVTPPPPPPAGEERLSDADTTASSTAAPNSSLSSASSAASLPRCSSLSRLSFDCSPSAALSSSSAAAAAAAASSPAPAPARPHRAGDAAWAAIRAASASAAAPLGPRDFRLLRRVGGGDVGTVYLCRLRAPPAPAPVCCLYAMKVVDRRVAAAKKKLEHAAAERRILRALDHPFLPTLFADFDAAPHFSCVVTEFCPGGDLHSLRHRMPNRRFPLPSARFYAAEVLLALEYLHMMGIVYRDLKPENVLIRADGHIMLTDFDLSLQCTSTPSLEPCAAPEAAAASCFPDHLFRRRRARLRRAASARRPPTTLVAEPVEARSCSFVGTHEYVAPEVARGGPHGAAVDWWALGVFLYELLHGRTPFAGADNEATLRNIARRPLSFPAAGAGDADARDLIARLLAKDPRHRLGSRRGAADVKAHPFFRGLNFALLRSSRPPVVPAASRSPLHRSQSCSAARTRASKPKPPPDTRFDLF

SEQ ID NO: 442 - protein, 328 aa, Zea mays
  VARIANT 156: note = Ancestral polymorphism is D, Derived polymorphism is Y
  VARIANT 88: note = Ancestral polymorphism is I, Derived polymorphism is T
MAAAVPNGHTAAAGDDDAPPAASSSLVFLGTGCSSAVPNARCLIQPPDPPCPVCSQSLSVPPELNPNYRCNTSLLIDYCQDERAHKYIIIDVGKTFREQVLRWFVRHKIPCVDSILLTHEHADAILGLDDVRVVQPFSPTNDIDPTPIYLSQFAMDSICQKFPYLVKKKLKEGEEVRRVAQLEWKIIESDIQKPFTTSGLEFVPLPVIHGEDYICLGFLFGRKSKVAYISDVSRFPPSTEYAISKSGGGQLDLLILDCLYRTGSHNVHLCWDQTLDAVRRICPKRALLIGMTHEMDHHKDNQTLEEWSRREGIDVQLARDGLRVYIDL

SEQ ID NO: 443 - protein, 305 aa, Zea mays
  VARIANT 144: note = Ancestral polymorphism is P, Derived polymorphism is L
MSPPPCDALPTAANNIQPFLVLHKAAASSVPSSRSQRQIQTSQPSSPNRKSANRCRQPAGEECEDEGDSELYEQLRAEAFHRTWSKIQSTIDEVLRAINLKLFDQVLQWAKESFASAHAITKKHHTEVQQPYPLLTDVICRRIPTVFVLTKNAEFVDDITTFHDLAGHMKSNGCHIVKLSAAELSAKHGVGGCFRSLLGQLLSDVPDVADVSALASWYCEAENFDQPIIVIIDDLEQCSGDVLGEFVMMLSEWVFKIPVFFVMGIATTLDAPKKLLSLTIIPPCGKLGSRGRKVWLLVSVLRREL

SEQ ID NO: 444 - protein, 961 aa, Zea mays
  VARIANT 625..961: note = Derived polymorphism lacks residues 625 to 961
MEDEGSGDRRRAAEALVSPPPRAKTVTIPVARDFIIPHAADQCRCSGFEVAEEGSPTGSSALGPASAGGGVPCEGALQDTPDYIRRSAARHRVAPLELFSSASPPPAGLGAADAVASSAKCHATEGEAVGGRQPQETRVDKSDCWGISEQQYGVLLREEEECRKLLDDLMAENELKTRECREAQESLRDLRMELMRKSMHVGSLASAVEGQVKEKSRLCQLLKALGEKFMVLKSEHQNLRQESLEYRKCVLDASQMSATIQRYVNQYVSLECEFKDLKEKFNEEAKERKDLYNKLIELKGNIRVFCRCRPLNADEIAEGASSAIDFDLAKDGELIVRGHVSSKKTYKFDSVFSPEEGQESVFEKTMPYAISVLDGFNVCIFAYGQTGTGKTFTMEGIEGARGVNYRTLEELFRIIKEREGTFLYEITVSVLEVYNEQIHDLLMTGSQPGATTKRLEVRQVAEGVHHVPGLVEARVTNMNEAWEVLQTGSKARVVGSTNANEHSSRSHCIHCVIVKGENLMNGECTKSKLWLIDLAGSERVAKTDAQGERLKEAQNINKSLSALGDVISALATKTSHIPFRNSKLTHLLQDSLSGDSKTLMFVQISPNENDVGETLCSLNFASRVRGIELGQAKKQVDIGELSRYKLMVGRAKQDSKNKDAQIKSMEERIQILEAKNKTKDLLTMNLQEKIKELESQLLVERKIARQHVDNKIAQDHLQKQHGMKEENSYSRSPMAERNLNSTAEKAAAPKDLGGISKQMFSDSNTDTYSFKQLMSLGDEKENDPEAAVQLPPTTKARRVSLCNGGAHQRPLNPASRRTSLIPLPRRNSLLPMPVAKPAAAAAAVLPLDKITENLSSPPLCSPPAVSNDKGSRSRRINSILRRSLQKKVVIRPSLAAQAGKKAAGAAAARGTDSARRAARRVPVSDGAGGQRYSRTGTRSGGGATSDQNIAAPLLLKKPVEI

SEQ ID NO: 445 - protein, 116 aa, Zea mays
  VARIANT 1: note = Ancestral polymorphism is R, Derived polymorphism is M
  VARIANT 66: note = Ancestral polymorphism is R, Derived polymorphism is W
MPVCCHLTSTVACPSTRIRTPSFRDTDAAPKEGASRGTQTSTSSSSSMAVMWRLCCCNCQVDETDRCESHVKATTNKIDGVTKGLRDSATAKVEPHDDAPPIDVDVLSLDDLIKNC

SEQ ID NO: 446 - protein, 310 aa, Zea mays
  VARIANT 263: note = Ancestral polymorphism is W, Derived polymorphism is R
  VARIANT 255: note = Ancestral polymorphism is S, Derived polymorphism is F
  VARIANT 236..310: note = Derived polymorphism lacks residues 236 to 310
  VARIANT 191: note = Ancestral polymorphism is M, Derived polymorphism is K
  VARIANT 119..310: note = Derived polymorphism lacks residues 119 to 310
  VARIANT 89: note = Ancestral polymorphism is G, Derived polymorphism is S
  VARIANT 70: note = Ancestral polymorphism is V, Derived polymorphism is I
  VARIANT 54: note = Ancestral polymorphism is I, Derived polymorphism is M
  VARIANT 51: note = Ancestral polymorphism is G, Derived polymorphism is S
MAAAAAVGGAVRPLSQKEQDIQMMLAADVHLGTKNCDFQMERYVFKRRTDGIYIINLGKTWEKLQLAARVIVAIENPQDMIVQSARPYGQRAVLKFAQYTGAHAIAGRHTPGTFTNQLQTSFSEPRLLILTDPRTDHQPIKESALGNIPTIAFCDTDSPMRYVDIGIPANNKGRNSIGCLFWLLARMVLQMRGTILPGHKWEVMVDLFFYRDPEEAKEQEEEAAVAPEFAAITDYQGADQWVGGDQWTADVAAPSVAPTGAEWGAAPAPVPTGDGWDQTGAPVPADGAVPPVIAPTGWDQAAQPTAQGWE

SEQ ID NO: 447 - protein, 546 aa, Zea mays
  VARIANT 324: note = Ancestral polymorphism is A, Derived polymorphism is T
  VARIANT 230: note = Ancestral polymorphism is R, Derived polymorphism is Q
MIPPPLIPVPVPVPVAPASESLAPSSPPPDSSSRPDAVSDLDDDDDIDVSWARPPPPAFPEPNKRHLTERKNEHAPPTPVSQKPKLSKAERRAIQESQRAAKAAAKEAGLKSTAMASDANTKQPKTAKISLKKDVNQVNSPVASDKKTGERPPDKDRKKDAPQPRMQFDDTHRVVKAKKRSVVRQSEAQNRVELFRHLPQYAHGTQLPDLESKFFQPDLMHPSVYKIQIRIILAMVDMIQMDINILNMRFEYSDSDMVGLQYLSGDISGGNARCIAMLLAFREAINDYSMPSEKILNRDLTAKISSYVSFLIECRPLSISMGNAIRFLKNRITKLPLAFSESEAKVSLQSDIDRFINEKIIVADKVIVSHAVTKIRDGDVLLTFGSASVVEMIFDNAHELGKKFRVVVVDSRPNHEGQGLLRRLVAKGISCTYTHINAVSYIMHEVTRVFLGASSVLSNGTVYSRVGTALVAMVAHAFGVPVLVCCEAYKFHERVQLDSICFNELGDPDAISRVPRDESLSNLKNWAENENLHLLNLKYVHCFVQV

SEQ ID NO: 448 - protein, 140 aa, Zea mays
  VARIANT 123: note = Ancestral polymorphism is A, Derived polymorphism is T
  VARIANT 122: note = Ancestral polymorphism is A, Derived polymorphism is V
  VARIANT 109..140: note = Derived polymorphism lacks residues 109 to 140
  VARIANT 105: note = Ancestral polymorphism is G, Derived polymorphism is S
  VARIANT 86: note = Ancestral polymorphism is A, Derived polymorphism is V
  VARIANT 84: note = Ancestral polymorphism is T, Derived polymorphism is A
  VARIANT 29: note = Ancestral polymorphism is R, Derived polymorphism is H
  VARIANT 20: note = Ancestral polymorphism is R, Derived polymorphism is L
MPTASSRRTSSEAVAARQRRVGRAGGRRRRRPSRAGSYAVLQCGEDSEYVRQKYGGYFAVFRALLEEDGERWRVYSAVRGELPTDVEAAGFDGFVISGSCADAHGDEPWILALVDLTRRVHAARHAKSIKVKSKFFSLVI

SEQ ID NO: 449 - protein, 569 aa, Zea mays
  VARIANT 207: note = Ancestral polymorphism is R, Derived polymorphism is C
  VARIANT 221: note = Ancestral polymorphism is G, Derived polymorphism is D
  VARIANT 288: note = Ancestral polymorphism is R, Derived polymorphism is S
  VARIANT 305: note = Ancestral polymorphism is P, Derived polymorphism is L
  VARIANT 441..569: note = Derived polymorphism lacks residues 441 to 569
MQALTARTPASSPCPSSSTVHSRGATRPRSSARFAPPRAAANSVLSAPRAAARAAAAALDAFESGVIAGLLERPRALPRSADPAVQIAGNFAPVGEQAPVRSLPVSGRIPPFISGVYARNGANPCFEPSAGHHLFDGDGMVHAVRIRNGAAESYACRFTETARLRQERALGRAVFPKAIGELHGHSGIARLALFYARGLCGLVDPSRGTGVANAGLVYFNGRLLAMSEDDLPYQVRVTADGDLRTVGRYDFGGQLAGCGSMIAHPKLDPASGELFALSYDVIKRPYLRYFYLRPDGGKSGDVEIPLEQPTMVHDFAITERFVVVPDHQVVFKLGEMLRGGSPVVLDAGKTSRFGVLPKYARDASEMAWVDVPDCFCFHLWNAWEDAGTGEVVVVGSCMTPADSIFNDADDGRQLQSVLTEIRLDTRTGASTRRAVLPASAQVNLEVGMVNRNMLGRRTRYAYLAVAEPWPKVSGFAKVDLGTGDVVRFDYGDGRFGGEPCFVPAEGAAPRGEDDGYILSLVRDERKGTSELLVVNAVDMRLEATVQLPSRVPYGFHGTFISERELEAQA

SEQ ID NO: 450 - protein, 996 aa, Zea mays
  VARIANT 239..996: note = Derived polymorphism lacks residues 239 to 996
  VARIANT 227..996: note = Derived polymorphism lacks residues 227 to 996
MDVDSRMATESDSDSDARGGSGSGSETPTASPSPSASPSPSAPGTPTAAVASPAPVAGPRPAPGYTVVDAAMDKKEDGPGSRCGHTLTAVPAAGEEGSPGYVGPRLILFGGATALEGNSATPPSSAGSAGIRLAGATADVHCYDVLSNKWTRLTPLGEPPSPRAAHVATAVGTMVVIQGGIGPTGLSAEDLHVLDLTQQRPRWHRVVVQGPGPGPRYGHVMALVGQRFLLTIGGNDGKRPLADVWALDTAAKPYEWRKLEPEGEGPPPCMYATASARSDGLLLLCGGRDANSVPLSSAYGLAKHRDGRWEWAIAPGVSPSPRYQHAAVFVNARLHVSGGALGGGRMVEDSSSVAVLDTAAGVWCDTKSVVTTPRTGRYSADAAGGDASVELTRRCRHAAAAVGDLIFVYGGLRGGVLLDDLLVAEDLAAAETTSAANHAAAAAAASSNVQREPGRYAYNDEQSGQTVTVSSPDGAVVLGTPVAPPVNGDMYTDISPENAIIQGQRRLSKGVDYLVEASAAEAEAISATLAAVKARQVNGEMEHSPDREQSPDAAPSAKQNSSLIKPDPALMNNSTPPPGVRLHHRAVVVAAETGGALGGMVRQLSIDQFENEGRRVIYGTPENATAARKLLDRQMSINSVPKKVIASLLKPRGWKPPVRRQFFLDCNEIADLCDNAERIFSSEPSVLQLKAPIKIFGDLHGQFGDLMRLFDEYGAPSTAGDIAYIDYLFLGDYVDRGQHSLETISLLLALKVEYPHNVHLIRGNHEAADINALFGFRIECIERMGERDGIWTWHRVNRLFNWLPLAALIEKKIICMHGGIGRSINHIEQIENLHRPITMEAGSVVLMDLLWSDPTENDSVEGLRPNARGPGLVTFGPDRVMEFCNNNDLQLIVRAHECVMDGFERFAQGHLITLFSATNYCGTANNAGAILVLGRDLVVVPKLIHPLPPAITSPETSPEHHIEDTWMQELNANRPPTPTRGRPQAPNNDRGSVAWI

SEQ ID NO: 451 - protein, 328 aa, Zea mays
  VARIANT 81..328: note = Derived polymorphism lacks residues 81 to 328
  VARIANT 216..328: note = Derived polymorphism lacks residues 216 to 328
MEGATSAPNSPGKAWSTLHGLPQSTVSHPTTTTLPWLPMEGHGRCDRAPAQHGRRDPLSSPHHRRPLSIKESRLPSPPSPQMVGEPIATVPTGPESVAEADRLLALAESELSAGRLRATRRHALHAARLYPTSPRAPVVATTANVLLADASSHHAALLLPEPDDPDASPLFASELRRHFKSLVKSLRVGLNAATAAAYPSVAAAAEEALGHATEAYEALTTPTPGTFWTACAGCRLLHEFERNCARQGSQILDKNSGRSIPRSRLRNCNLRGCKKFGKIKLSDCEIYVSCEPCPMCFGAVHLSRIKKLVYGAKAEAAIAIDLQCTTLL

SEQ ID NO: 452 - protein, 341 aa, Zea mays
  VARIANT 187: note = Ancestral polymorphism is G, Derived polymorphism is S
  VARIANT 151: note = Ancestral polymorphism is H, Derived polymorphism is R
  VARIANT 33: note = Ancestral polymorphism is P, Derived polymorphism is L
  VARIANT 22: note = Ancestral polymorphism is R, Derived polymorphism is C
MPPPYMLLLFVPAVFVFFLEPRLVPPRTLPAIPDADEAEDLALFRRAVLLSSSSSSSAHRQTKQKVAFLFLTNSGLAFAPLWEKYFAGNHGLLNIYVHADPSTPLSLPPSARSFHGRVVRGSKATQRASATLISAARRLIAAALLDDPANRFFALLSQSCVPLRPFPALHRALAADPNHRSFIEVLGAAPTLRDRYSARGDGAMVPEVPFESFRVGSQFFVLARRHAVAVVGDRRLWGKFRLPCLVERRRSCYPEEHYFPTLLDMLDPAGCAGFSLTSVNWTGSFDGHPRTYRPEEVSADLIRDLRRPKSNGTYSHMFARKFAPGCLAPLMEIADSVILRD

SEQ ID NO: 453 - protein, 505 aa, Zea mays
  VARIANT 2: note = Ancestral polymorphism is G, Derived polymorphism is R
MGISAKWIKSLVGIKKHEKGRNAECSDARSSAVQLLRKREHSVDTESVPAAEELRVQAEPLAGDTNTETISNSASSPSTSLQASQTELGTKEHQAAVVIQSAFRAFLARRALRALKGLVRLQALVRGHAVRKQAAETLQCMQALVRAQARVRARRVRVSLESQGTQKKPPEENVHEDHVRDIEEDWCGSIGSVEEMKAKTLKRQEAAAKRERAMAYALTHQWQASSRKQKAASLQGQGLAGDENQWGRNWLERWMAARPWENRLLDSNARDSVTAGDDDDKPAEEGKAKAPDLSKPKGKAPVLASQSNGSRQEKAADHEKSHSDVSGCGSSSGRSADVQPTVSLESSKVEVKVKAPQEVADEASSGPSNPASRSASNPKERPARTDAPARKRLSLPNNGNSSGLPVYISAIPPFSESCMHLNSERWCALHSNLSATYLCFDMLSLHLSKTSAVGAWKKQLILVTCGAATAASRGVGKRPTNSSRSRTNVASRPKNGRGASSPGLE

SEQ ID NO: 454 - protein, 226 aa, Zea mays
  VARIANT 161: note = Ancestral polymorphism is A, Derived polymorphism is T
  VARIANT 145: note = Ancestral polymorphism is V, Derived polymorphism is A
  VARIANT 124: note = Ancestral polymorphism is N, Derived polymorphism is S
  VARIANT 86: note = Ancestral polymorphism is L, Derived polymorphism is F
MATEQEAENYTVEDLVALNPYNPDILNDLEKFVNEQVASQTYNLDANLSLLRLYQFEPGRMSIHIVAHILIKALMAMPAPDFSLCLFLIPEHVQMEEQFKALIVLSHYLETARFRQFWDDAANNRHILEAVPGFEQAIQSYAIHVLSLTYQKVPRHILAEAINIEGLALDKFLEYHAANSGWVIEKGGQSQVIVLPRNEFNHPQLKKNTADTVPFEHLTRIFPVLS

SEQ ID NO: 455 - protein, 92 aa, Zea mays
  VARIANT 16: note = Ancestral polymorphism is R, Derived polymorphism is Q
  VARIANT 31: note = Ancestral polymorphism is P, Derived polymorphism is L
  VARIANT 56: note = Ancestral polymorphism is D, Derived polymorphism is N
MPLGLTLGSLGRAMRQKRPSSLDILSSKRAPRDYYKGKNCKPTGFHTRKGGYVVVDEKLPRFAVPDNDSFQVHQGPRSVDDILGLSNFSTDY

SEQ ID NO: 456 - protein, 151 aa, Zea mays
  VARIANT 15: note = Ancestral polymorphism is V, Derived polymorphism is A
MVELEVEVAFGVVSAMAIVAVAFLLRTCVRSAAPATAAARARREEEGTAVDVGADVEAGLDEAALKALPEVVYGEEKAERKTATTTAATGTTTCCAVCLGEYASGDVLRVLPECAHAFHQLCVDRWLRLRPTCPVCRSPPVPSPAATPTQL

SEQ ID NO: 457 - protein, 428 aa, Zea mays
  VARIANT 187..428: note = Derived polymorphism lacks residues 187 to 428
  VARIANT 39..428: note = Derived polymorphism lacks residues 39 to 428
  VARIANT 18..428: note = Derived polymorphism lacks residues 18 to 428
MPAPDGWTKKFTPQRGGRSEIVFVSPTGEEIKNKRQLSQYLKAHPGGPAASDFDWGTGDTPRRSARISEKVKVFDSPEGEKIPKRSRNSSGRKGRQGKKEAPETEEAKDAETGQDAPSEDGTKETDVEMKPAEEAKEAPTETDDAEKAADKADDTPAPAPMEEDEKETEKPAEAVVAPLAQSEEKKEDAKPDEPEAVAPAPVSNPTENSAPAPAEPAAVPAPVPETESVAEPAAVLAPAPETKPDAKPAAVPAPAPENKPDAEPAAAAAPVPDTKSVAEPAAAPAPDTKSVAEPAAAAPVPETKLVAESAADAVAAPAPETKSDAEPAAAPVPETKPVAESAADAVAAPAPETKSDAEPAAAADPAPEIKSDAAAADPAPGTKADAAATDAAPGAEPDAAPLENTAADKGGSEESSQPVNNVNNGHST

SEQ ID NO: 458 - protein, 87 aa, Zea mays
  VARIANT 11: note = Ancestral polymorphism is L, Derived polymorphism is R
  VARIANT 20: note = Ancestral polymorphism is H, Derived polymorphism is D
  VARIANT 23: note = Ancestral polymorphism is M, Derived polymorphism is T
  VARIANT 34: note = Ancestral polymorphism is S, Derived polymorphism is F
  VARIANT 40: note = Ancestral polymorphism is A, Derived polymorphism is V
  VARIANT 61: note = Ancestral polymorphism is L, Derived polymorphism is P
  VARIANT 67: note = Ancestral polymorphism is A, Derived polymorphism is T
  VARIANT 70: note = Ancestral polymorphism is I, Derived polymorphism is V
MGKLRGALSVLQSSTVHHEDSKMVNVIKGLLFISCDVPMAQLIVNLNASMPPSEKFIVHMLVHPRVAEMIRSKISEFRDQNIYEKPQ

SEQ ID NO: 459 - protein, 210 aa, Zea mays
  VARIANT 183: note = Ancestral polymorphism is M, Derived polymorphism is I
  VARIANT 144: note = Ancestral polymorphism is S, Derived polymorphism is P
MELLRTGKKKLPAADVVDKGALPWGPCSRDGVVLHPREPRGKNGAVAGWPWNGKCAYMLLVAVRLASSKLWDLFFVFITTPPWRARGGVESATTADMTLPSSCSLLRLISMLEFLKCSALGYSKEHCLSWIQGDAEALSFEDGSMDGYTIAFGIRNVTHIEKALSEAYRPVNLEPWQEKFAQMIQEAGFQRVEYENLLSGVVAIHSGLKL

SEQ ID NO: 460 - protein, 101 aa, Zea mays
  VARIANT 21: note = Ancestral polymorphism is A, Derived polymorphism is V
  VARIANT 27..101: note = Derived polymorphism lacks residues 27 to 101
  VARIANT 45: note = Ancestral polymorphism is D, Derived polymorphism is N
  VARIANT 49: note = Ancestral polymorphism is P, Derived polymorphism is L
  VARIANT 57: note = Ancestral polymorphism is R, Derived polymorphism is Q
  VARIANT 63: note = Ancestral polymorphism is A, Derived polymorphism is V
  VARIANT 72: note = Ancestral polymorphism is T, Derived polymorphism is M
  VARIANT 77..101: note = Derived polymorphism lacks residues 77 to 101
  VARIANT 82..101: note = Derived polymorphism lacks residues 82 to 101
MVLAAAEAPFCVPARGVLPLAYVGRAQGAPLGDAGSAAMEVALRDGVVPFRVEGEARTRWKVAGIVGVDQWTRLACQLRFFWPNDTVLPFRCSSKSKLLFF

SEQ ID NO: 461 - protein, 302 aa, Zea mays
  VARIANT 272: note = Ancestral polymorphism is F, Derived polymorphism is L
MCGGAILAELIPARVHRPLTAATLWAAALSGTTTVGKWKADAAAATDDDDDEEFEAEFQLFDDDDECEAEFQLLDDHQPSPAASPEASGCKRKPALAPPAGAPASTDPATPCSRKYRGVRYRRSGRWAAEIRDPRQGRRAWLGTYRTAEEAALAYDREARRIRGKSARLNFPLLIPHEGPGRHARTPVAIDLNLPPVSDGLGVPAPAGVGDDGTANADGDADMASTKTQSTLARVKELIAQGPHDERLAARIVPELMMHGSRDEAAALIAEFSRQMEEIAALRRDLETRERQLVQLVSLVLR

SEQ ID NO: 462 - protein, 223 aa, Zea mays
  VARIANT 4: note = Ancestral polymorphism is E, Derived polymorphism is D
  VARIANT 3: note = Ancestral polymorphism is A, Derived polymorphism is T
MAAEASMERARDGRRHEHQQKQQRRSHRRSASASVTSSTRQWASGSASASASASPSQAAAAAAQESERRLRRSPPVEARRERERRRAREQPRCGEVAGGTAAECAAVCCCFPCAVVELVVLAAVRVPAALCRRALRARARRRRAAKKKKEEAELLGASGAAASASPTAAAARDRNGDALDFCHWPARAEAGRDELAEAEAKVWASFQGAGFWRSPSQREERRC

SEQ ID NO: 463 - protein, 370 aa, Zea mays
  VARIANT 101: note = Ancestral polymorphism is G, Derived polymorphism is D
  VARIANT 73..370: note = Derived polymorphism lacks residues 73 to 370
MSSASCLVHPAPRFRVRLLPLPSSVAARPLLGFRPRCGAPAKGWALWHVSCFRNGQDGPTTSDEGDDFKYVAQSQSSGGAEVKKEEVSSLNGDQEQNLKDGDWFLQLQKAINENSLFVFQIKENLLGRIVKFQTERWIVPWTGQTIAQVMILWIATFWFVGSWIVPLLAHAAGFSKETLTHRGQALYSLLTDITEGLAGIAILHQCLGRFRPLPPGWFEFNLKGKWHLDVAFGCLLFPLVNLLSHINISLVPASPGPAVGVSSVEQSIVARDPVAMALYAVVVTVCAPIWEEIVFRGFLLPSLTRYMPLPWSILASAAAFALAHFNAQRVMPLVFLGVVMGGVFARSRNLLASMVLHSLWNGFVFLDLMK

SEQ ID NO: 464 - protein, 271 aa, Zea mays
  VARIANT 78..271: note = Derived polymorphism lacks residues 78 to 271
MCGGAILAELIPSAPARRGVTPGHGSGGKGRTAANDDDDFEAAFRDFDEDSEEEPVGAITKKAFGFAGTRRRRPSSPYYGVRRRPWGKWAAEVRDPVRGVRVWLGTFATAEAAARAYDHAARDLRGATARLNFPSNSKRRSAVAKAAPRVDEDEDEDENGGGGALPDRSCQGMSAVGLCVELGGASKRARTEPQEEAQGREKKVAPALAPSDDSADTLLMDAFMFGDPFSFFDGGLCYEPAVTMDCQLLGGDAVFCDDSVGLWSFDDSVCF

SEQ ID NO: 465 - protein, 207 aa, Zea mays
  VARIANT 113: note = Ancestral polymorphism is G, Derived polymorphism is D
  VARIANT 120: note = Ancestral polymorphism is D, Derived polymorphism is A
  VARIANT 146: note = Ancestral polymorphism is S, Derived polymorphism is F
  VARIANT 167: note = Ancestral polymorphism is P, Derived polymorphism is S
MRSSWRSESPVYFPAPPAAPGRDGGGCSILGGIGSTIAQGMEFGTGSAMAHRVVNGVMRPQTVQHEIVVSEAAAPAAPVMDGDACNIHSNAFQDQHLRKYVVVGASEVFTLIGQIEFFYDQASDAVRSICSGLSITSFALGNYVSSALVAVVARATARAGQVDGWIPDDINRAHLDYFFWLLAMLCVGNFGVYLLIARWYTYKKTVD

SEQ ID NO: 466 - protein, 129 aa, Zea mays
  VARIANT 101: note = Ancestral polymorphism is D, Derived polymorphism is H
  VARIANT 73..129: note = Derived polymorphism lacks residues 73 to 129
  VARIANT 44..129: note = Derived polymorphism lacks residues 44 to 129
MKVAEMVKKGKKSRKGRSNIGDAAHRDSPESIHYGGCYICIVIGNCEEGDMYVSVGQCFSYLETLQAACVSVRLLMALDYLHANHILHRDMKCSNIFIARDKSICLGDFGIANILASDDLASSDVAFEK

SEQ ID NO: 467 - protein, 766 aa, Zea mays
  VARIANT 90..766: note = Derived polymorphism lacks residues 90 to 766
MASHIVGYPRMGPKRELKFALESFWDGKSTAEDLEKVATDLRASIWKQMADAGIKYIPSNTFSYYDQVLDTTAMLGAVPERYSWTGGEIGFDTYFSMARGNATVPAMEMTKWFDTNYHFIVPELGPNTKFSYASHKAVNEYKEAKALGVDTVPVLVGPVSYLLLSKPAKGVEKGFPLLSLLSSILPVYKEVIAELKAAGASWIQFDEPTLVLDLDSDKLAAFSAAYAELESVLSGLNVLVETYFADVPAESYKTLTSLSSVTAYGFDLVRGTQTLGLVTSAGFPAGKYLFAGVVDGRNIWADDLATSLSTLQSLEAVVGKDKLVVSTSCSLMHTAVDLVNETKLDSEIKSWLAFAAQKVVEVDALAKALAGQKDEAYFAANAAAQASRKSSPRVTNEEVQKAAAALKGSDHRRGTNVSARLDAQQKKLNLPILPTTTIGSFPQTVELRRVRREYKAKKISEEEYVTAIKEEINKVVKLQEELDIDVLVHGEPERNDMVEYFGEQLSGFAFTANGWVQSYGSRCVKPPIIYGDVSRPNPMTVFWSKTAQSMTSRPMKGMLTGPVTILNWSFVRNDQPRFETCYQIALAIKKEVEDLEAGGIQVIQIDEAALREGLPLRKAEHAFYLDWAVHSFRITNCEIQDTTQIHTHMCYSNFNDIIHSIIDMDADVITIENSRSDEKLLSVFREGVKYGAGIGPGVYDIHSPRIPSAEEIADRIDKMLAVLDTNILWVNPDCGLKTRKYTEVKPALTNMVSAAKLIRTQLASAK

SEQ ID NO: 468 - protein, 543 aa, Zea mays
  VARIANT 297..543: note = Derived polymorphism lacks residues 297 to 543
MASLRQLHKCRRNAAATAAFLLTLLSVAVARDHRPGVGRSSEAELRAPAPAPAQAGRSCEAQLRALPDHAARCRYLSWASHPACAPRGYVHYLRLFYCAFGGAPWLGAAALALWLLLLFYLLGDTASQYFCAALQGLSAALRLPPAIAGVTLLSLGNGAPDVLSSVVAFAAADADAGDVGLSSVLGGALFVSTVVAGVVAIVASSSGTRGGPVEIERAGFVRDVCFLLVALCYLLAVLLTGSVTVWAAASFLSLYAAYVLLVWTSHCCAEDGTTKPAVDDVAAAGPDPDLAAPLLAEDPDEPRAPRPPRAAVAAVPAASPHDPGHRGAPVVQALRGGVRAPRPSPPGGDLVPLQPRRRPLRRGGRDGPRGGGRPRHVLLVPARGPLPAPPVARRRVPHVRALVLLAGAGAGGAAGLHRPDCRREGERAGRDRAGVGQLAGGPGGRRGHGHARRPRRGPDRGVGLLRGPRIQHGRGPGPVADAGGRGPVPAPVRDPGGRVGVPGGRIPCGRAGVGDRGAARARHAAGQGAWGGAAPHLPRLPRS

SEQ ID NO: 469 - protein, 617 aa, Zea mays
  VARIANT 33..617: note = Derived polymorphism lacks residues 33 to 617
MATSLAMDEYAEPDVSTTDPVDKKPPAFRGLKQYVRDLDANTLPPFLARLCAPDRPSSSYSEEEILCIFETAAEAHGRSIVPHIGQIVSAVVRIMASGSSTPSHCAGCSKVVCTLSRYCIDPLGREEEKSETMSSLCRPLSDCLMHANKSVSSGSALCIAALVQSNNWQFASNELVNDVCLKVSGALEEEPRCQTAAVHVRLVLALVKHSPLTLEPYGRTLIKSGLQVLDRSSTEASSSQMIMSSIQMIHSIMRSVNVRTISSEISSIIHALEHCQEDGFAPDICAAASQAAETAKLLLMRQEERGAHRNVSPLGNCSGGNSRKGSNSPVDRAGIRDSGSSGSPRETRSVRGFDGFNSPLQGGQQCTGVLGATRARRRLWSCGSEFSQGMSDDERFFRTWAPSDSSDLVKSSRRRSDVLARIGDPCPACLTPQAANQVCSRRQALSTPRKQLQSLAYCSDSERDGHRRLPPRSALTLFTQRPDHPSFQKNSGCEGRKGCCSSTQQRRNLQWSTRTGDSLAEDLKFATSSSSSSSRRCCSDSARAPPPPPCEERRCDDAAEHRPKVTGIAKRRETNRRRSTARFFICAMVVVFAAALLLACWEQDHHPSNELYFVVPT

SEQ ID NO: 470 - protein, 336 aa, Zea mays
  VARIANT 52: note = Ancestral polymorphism is R, Derived polymorphism is H
  VARIANT 251..336: note = Derived polymorphism lacks residues 251 to 336
  VARIANT 297: note = Ancestral polymorphism is L, Derived polymorphism is F
MATRHGRDVNLGRGDSNHHPMAATDFDPTSISTRLHCANVGCDGEIDVELKHAREAMAKKGQALHEERDMVKKVALATLDILSVGASRSGLSSSRATTAASHGLSQATVASSSPHSAILAPSPSNCRQRQRGRPRALRSPNRPPREPFGPLLHFVPLNLGWIKKLDQVCYCTRWIKNNNFWVCSSIMFDREVESCLKYIKAVPWNESEEEKLKHVFARCTFDESICKSVGSNIAHHMATHAAADGNFGGFRVWLKYVPGISFRTDNGPFKQLCEATGAIMMDCKKALAEKWVILIKLKNSYRRKGWRLLTGELVEQQPREGLALTYMIVESEFLLK

SEQ ID NO: 471 - protein, 172 aa, Zea mays
  VARIANT 62: note = Ancestral polymorphism is R, Derived polymorphism is M
  VARIANT 44: note = Ancestral polymorphism is Q, Derived polymorphism is H
MIPRAPGLFRLEEGVGARASTSAPAAMAAPAGDPQLVGLRLIIQPSPRKQQLPAVLRKSAVRIVNPATASAVKCHDDDDSGRRVFAGLEFLKRCSCCHRDLDATMDVFVYKGEQGFCSAECRCRHIAKEERREMEMLLRKRRDAFHRRHAAAAAPKMQASDRRITLQITAAR

SEQ ID NO: 472 - protein, 68 aa, Zea mays
  VARIANT 3: note = Ancestral polymorphism is F, Derived polymorphism is L
  VARIANT 17: note = Ancestral polymorphism is D, Derived polymorphism is V
  VARIANT 22: note = Ancestral polymorphism is P, Derived polymorphism is A
  VARIANT 44: note = Ancestral polymorphism is N, Derived polymorphism is T
  VARIANT 45: note = Ancestral polymorphism is V, Derived polymorphism is M
  VARIANT 57: note = Ancestral polymorphism is M, Derived polymorphism is T
MNLALCISKYMLSETLDYWRKAKHHVVIFTCRIECISSNMRMKNVLPLPEYFNLVDTETTLKMIERSR

SEQ ID NO: 473 - protein, 36 aa, Zea mays
  VARIANT 11: note = Ancestral polymorphism is P, Derived polymorphism is L
MVKVRDDVNLPIYQGENINDKTFDEKSHVLDPYKML

SEQ ID NO: 474 - protein, 498 aa, Zea mays
  VARIANT 411: note = Ancestral polymorphism is C, Derived polymorphism is R
  VARIANT 406: note = Ancestral polymorphism is C, Derived polymorphism is F
  VARIANT 405: note = Ancestral polymorphism is Y, Derived polymorphism is C
  VARIANT 38..498: note = Derived polymorphism lacks residues 38 to 498
MPSSTSASGAVGLGRRQPPNPIAAVGGLRRSDSSRWWWARLMEKNYSDAERFLARRPEERLINDYLLLESAARKVATGLAYLLLTWSTVVLLGGFVSVLKLIDFWCLAAISTSFAVNLADLYEYTTGYFLAAGNVYIGLRDDLPSSMCCRSVVWMLLLGVLITVYSVVLQVLTLAPLVAIALSSFRLRANNYGNVGNDAANSAKLKASLQIFYSLTLAQSNAFYLWKMMVVLEKCCVSTVSKKCRFGEWGIALVWAYLEETKTIPILERAPRGRNLVTFAVGLLGSESLHDRCSALRMLDTFVGDKVPVAPSLLLPCRGPLENLMEALEVGDCETRERAARIVAALAAGDHLRRIDQFPRALHHMASLLQASDYRFPTATTAATEEPRQAAAASISKRGGIGLLYFTILSRINLFNIFEKEKKDEDTLPPSGGGPKQLISQGLLIVERLALHRANRAHMCNNNVLLSKLTAPLCSSHAFFLDTTAGTAVQTTEWVLTC

SEQ ID NO: 475 - protein, 111 aa, Zea mays
  VARIANT 66: note = Ancestral polymorphism is A, Derived polymorphism is T
  VARIANT 49: note = Ancestral polymorphism is A, Derived polymorphism is S
  VARIANT 24: note = Ancestral polymorphism is R, Derived polymorphism is T
  VARIANT 23: note = Ancestral polymorphism is A, Derived polymorphism is E
MRQLIRRLSRVGDCSPPPSHSQETRKGEAHAGVPEGHVPVHVGGGADGAEERFLVRAELLGAPALADLLGRAAQEYGYRHQGPLRIPCPVAVFRRALASVAVAAAGDEEGD

SEQ ID NO: 476 - protein, 696 aa, Zea mays
  VARIANT 654..696: note = Derived polymorphism lacks residues 654 to 696
MPPWPHTDAELAHATVHVPRRRRDARVSPPSRAYVSMYLEQKRFRQHCRGAHRCESVLVPSPPGPDSTIHLCIPPKHYETVCTAPIKNSLVIMSCLTYCSNEDNIMVCFFRSLKADPHFIKSCSTMDTGCLSSMNITGASQTRSFAGQLPPQRCFASSHYTSFAVKKLVSRNKGRRSHRRHPALQVVCKDFPRPPLESTINYLEAGQLSSFFRNSERPSKPLQVVVAGAGLAGLSTAKYLADAGHKPILLEARDVLGGKVAAWKDEDGDWYETGLHIFFGAYPNIQNLFGELRIEDRLQWKEHSMIFAMPNKPGEFSRFDFPETLPAPINGIWAILRNNEMLTWPEKVKFAIGLLPAMVGGQPYVEAQDGLTVSEWMKKQGVPDRVNDEVFIAMSKALNFINPDELSMQCILIALNRFLQEKHGSKMAFLDGNPPERLCMPIVDHIRSRGGEVRLNSRIKKIELNPDGTVKHFALSDGTQITGDAYVCATPVDIFKLLVPQEWSEITYFKKLEKLVGVPVINVHIWFDRKLNNTYDHLLFSRSSLLSVYADMSVTCKEYYDPNRSMLELVFAPADEWIGRSDTEIIDATMEELAKLFPDEIAADQSKAKILKYHIVKTPRSVYKTVPNCEPCRPLQRSPIEGFYLAGDYTKQKYLASMEGAVLSGKLCAQSIVQDYSRLTLRSQKSLQSGEVPVPS

SEQ ID NO: 477 - protein, 90 aa, Zea mays
  VARIANT 3..90: note = Derived polymorphism lacks residues 3 to 90
  VARIANT 7: note = Ancestral polymorphism is S, Derived polymorphism is I
  VARIANT 15: note = Ancestral polymorphism is T, Derived polymorphism is I
  VARIANT 20: note = Ancestral polymorphism is P, Derived polymorphism is L
  VARIANT 34: note = Ancestral polymorphism is A, Derived polymorphism is V
  VARIANT 44: note = Ancestral polymorphism is V, Derived polymorphism is M
  VARIANT 62: note = Ancestral polymorphism is E, Derived polymorphism is K
MSQMLWSVVLKRTGTATRGPLRRRCRSMDDFAAARLATRVHDDVELARDHLHAVEVLLVLDEASKSWSQELPASHTATAGGRGGDASAGA

SEQ ID NO: 478 - protein, 171 aa, Zea mays
  VARIANT 14: note = Ancestral polymorphism is F, Derived polymorphism is L
  VARIANT 5: note = Ancestral polymorphism is S, Derived polymorphism is F
MTSSSVFFLLLACFATCAGAATFTVRNNCGFTVWPAGIPVGGGTQLNPGSTWTVNVQAGTSGGRIWGRTGCSFSGGRGRCATGDCGGAYSCSLSGQPPATLAEFTIGGGSNHDYYDISVIDGYNLPMDFSCSTGAALRCRDSGCPDAYHQPNDPKTRSCNGNSNYQVVFCP

SEQ ID NO: 479 - protein, 146 aa, Zea mays
  VARIANT 28: note = Ancestral polymorphism is A, Derived polymorphism is V
  VARIANT 60..146: note = Derived polymorphism lacks residues 60 to 146
  VARIANT 70..146: note = Derived polymorphism lacks residues 70 to 146
MENVALAIPQALQNYYAQLYGLTTLPSAAMAPYHQYLGYVAPSPPTPRVILPPPPPPAAQQVTAVQPLVQHPPPPVQQVTMQPLLQHPPPQIHAPFFSATSLPQHNFRLHPSPPQAMAVLPPNTTDVHVACLLANLCIFGTKGAQE

SEQ ID NO: 480 - protein, 177 aa, Zea mays
  VARIANT 57..177: note = Derived polymorphism lacks residues 57 to 177
  VARIANT 25: note = Ancestral polymorphism is A, Derived polymorphism is V
MASGAAASSALLLLVAALVATSARAATFTITNNCGSTVWPAATPVGGGTQLDPGQTWTVDVPAGTQSGRVWGRTGCSFNGGSGSCQTGDCGGALSCTLSGQPPMTLAEFTIGGGGSQDFYDISVIDGYNLAMLFSCSTGVTLNCGGPSCPDAYLFPSDNTKTHACSGNSNYQVTFCP

SEQ ID NO: 481 - protein, 1930 aa, Zea mays
  VARIANT 1302..1930: note = Derived polymorphism lacks residues 1302 to 1930
  VARIANT 1333..1930: note = Derived polymorphism lacks residues 1333 to 1930
  VARIANT 1350..1930: note = Derived polymorphism lacks residues 1350 to 1930
MAIHRSNLSRRFKISRIWHQSEQYRAKSFASSSPTSETTPLKVLTGLLRDAYSLKCLRELHAHLAVAGAIQDTFVVTGLVERYVYFGKAASAALLFAETYRSRPAVYSLNLAVRCFSDHGFHRELLHLYRELCCFGSDNFTFPPVIRACTAVSCLRLGREMHCRVLRTGHGGNVGVQTALLDLYAKAGQIDVSRRVFDCMVLRDLISWNAMVSGYSLNECFREAVEMLQEMQQGGMRPNASTFVGIVGMCGSVGDRDVGDSLHAFALKGGVINDESLTSALITMYAAFDDLSSSRMVFDLHPVKDLVSFNSMISAYMQHHIWKEAFEIFRLMHCVAVRPNLVTVVSVLPSCSDFFGINHGESVHGMIIKLGLAEHVSVASALVSMYSKLGKLDSSLLLFCCCTEKNNILWNSMISGYLVNNEWNMALDAFCKMQIAGVAPDATTIMNVISGCRYTKDLHMAKSIHAYAVRNKFESYHSVMNALLAMYADCRDISTSHTLFQKMEVRMLISWNTMISGFAEIGDSDTCLILFCQMFHEEVQFDLVTLIGLISSFSVPGDAIVGESVHSLAIKSGCNSDVSLTNALITMYANCGIVEAGQQLFDSCCSRNTITYNALMSGYRKNNISAKILPLFYQMVENDEKPNLVTLLNLLPVCQSQLQGKCIHSYAVRNFTRLETPLFTSAMGMYSRFNNIEYCSKIFSLIGARNLIVWNAFLSACVQCKQADMVVDCFKHMLFLNVRPDAVTMLALISACSQLGNAYFAACIMAVILQKGFSTNILVLNALIDTHSRCGSISLARELFDSSVEKDSVTWGAMINAYSMHGNGEAALDLFSMMIDSGVDPDDITFVSILSACAHNGLVEQGRTLFKSLQADYGITPRMEHYACMVDLLGRTGHLDEAYDVVRSMPFRPSDNLLESLLGACRFHAGKWSDCEQLRLDMEAKGLRKNVGALTVLLPILNLVFTVFSSVSIKFVELWLEKMPDKKIEGADSSHIVSSTKSLESSVGPNLIESTDGDYCNNLHKTAVANFVASMLQEHPMSLILAENKSNLQEISVEQKIPIFVSINLSPKVDGSELPCPIEVHDGITSSSSKTNEPMEAQDYSNTMKSNTASCMFEASKRQECPISLILADKKGSLQEVSVEQNVPCGDYVALSQKADGSELTSTREAPEGFLTSSSKVYVLKEAQDGSITTEASKVNVCAASHSMLRLIEGVQDEASCIDSDKVTCETPPAILKKLKEDKPLVVHRFHKHQMSLGDTHQKVPAPVSRSNTSKYLRMDKNIVDTTTPIESVKAVASKFGGSMNWKTRKTQTAQVSDRIVLELDKLKNEISECKHQAEAAEAAKLSVLKELERTKKLIDEMKHVLEREQAEEVDAKDDLELFQIILQAMEGVDCNDSVVVREKLNNIQERHKALDAKVISVKYVLGKVQEDYDSLLIGTDISINKAQAAFTMSKGAEKEVEELTIELQRLKEVFDLANAKFQDVEERKNTLMARDEDRLAWEEDLRQSDKELNQISMDLCSFQELQSKHDTSATMLLNLKNEVANYLEAKRIEEAREQESGTHKPVQEVIIMLKSELVEQRKSIARVTDELCVLKATAELLKSQLKKEKAALAAAQQMEVMASMSTQSLKMDIKLSQQELEALHAKAKECRDRSGKALQDASHEADEAKVIATKAQGELKKTEEEVAQAKAALSTVESKLEAVLRDIQAAKASERLALDTLTTTTLEEHSKVGARYSETVTLDLDEYTSLVQRSRQAEEAAHEKTTAASTAEVEAAKESAARTISRLNEILQALEEQKQALAAATERAGRASEGKLAMEQELRQRREEENGKRRRMASEAPKPVTGPRSAAEIAGRVDMTLTCTGKGDSSCPAASVHPVSDASGTGTGRSSPSDAALPVPVPAKTKKAKKLPFFTRVVMFLGGRRRRRLRAAR

SEQ ID NO: 482 - protein, 177 aa, Zea mays; identical to SEQ ID NO: 480
  VARIANT 138: note = Ancestral polymorphism is T, Derived polymorphism is I
  VARIANT 25: note = Ancestral polymorphism is A, Derived polymorphism is V
  VARIANT 23: note = Ancestral polymorphism is A, Derived polymorphism is V

SEQ ID NO: 483 - protein, 174 aa, Zea mays
  VARIANT 58: note = Ancestral polymorphism is T, Derived polymorphism is N
MAAASSSSVLLLLLAAALAGMSANAATFTITNNCGFTVWPAATPVGGGTQLNPGGTWTVNVPAGTSSGRVWGRTGCSFNGNSGSCQTGDCGGALACTLSGQPPLTLAEFTIGGSQDFYDISVIDGYNLAMAFSCSTGVRLVCTDPGCPDAYHNPPDMKTHACGGNSNYQVTFCP

SEQ ID NO: 484 - protein, 593 aa, Zea mays
  VARIANT 287: note = Ancestral polymorphism is E, Derived polymorphism is V
MGVTTAGEAVCKSPARASVIVRLNAAFLAFFLFAYVALLLHPKYSGLLDRGATSLVRCTFRDSCPPPSPSNQQLSRKLGGVAANKVAEEERIVNAGRAAAMFDELRGRLRMGLVNIGRDELLALGVEGDAVRVDFERVSDAFRWSDLFPEWIDEEEDDEGPSCPELPMPDWARYGGDVDVVVASLPCNRSAPGWNRDVFRLQVHLVAAQVAARKGRRDGAGAVRVVLRSQCEPMMDLFRCDEEVGREGDWYMYKVDVPRLEEKLRLPVGSCNLAMPLWGSGGRGIHEVLNATSWSGGRRPRREAYATVLHSSDTYLCGAIVLAQSIRRAGSTRDLVLLHDHTVSRPALRALSAAGWTPRRIKRIRNPRAARGTYNEYNYSKFRLWQLADYDRVVFVDADILVLRDLDALFAFPQLAAVGNDGSLFNSGVMVIEPSACTFDALMRGRRTVRSYNGGDQGFLNEVFVWWHRLPRRVNYLKNFWANTTGERALKERLFRADPPEVWSVHYLGMKPWTCYRDYDCNWNVADQRVYASDEAHARWWQVYDQMGDHMRGPCRLSERRKVEIAWDRHVAEELGYTDQHWKINITDPRKWD

SEQ ID NO: 485 - protein, 158 aa, Zea mays
  VARIANT 101: note = Ancestral polymorphism is H, Derived polymorphism is R
  VARIANT 100: note = Ancestral polymorphism is N, Derived polymorphism is K
MERQLANLERYPSAGHESPLCCYSDYSFRGTGSIRSHELQRESQLKGLTSLSFFVNQYRVSIFSINFSSFYRILGSPFKLPTARFVSALQVCCNCDVILNRGTSVKSFYDLMRKLLDFDEPKTLAPTCLFVGGTKYMVIQGEPRVVIRGKKVQWEHIF

SEQ ID NO: 486 - protein, 306 aa, Zea mays
  VARIANT 211: note = Ancestral polymorphism is Y, Derived polymorphism is C
  VARIANT 7: note = Ancestral polymorphism is K, Derived polymorphism is E
MEDDEEKPSQRITNKEEDEEDDDLVFPGFRFHPTDLELVGFYLKRKVEKKGFRIDIIREIDIYKHDPWDLPNEARHVVQGAGGDKDDWYFFCLRGRKYRNSIRPNRVTGSGFWKATGIDKPIHDGAGERVVGLKKSLVYYRGSAGRGNKTDWMMHEFRLPSAELVELHDAGIWTICRIFKRNTSYTRRCQQQKQEYGSKRSQQQEQELQYYYDYYRYHHHHHQHHYFHSSEAVYAAAEHHRQPSFLLRGFHGSSSSSAETTTTSGFVGAHPLLPPSTTSTLGWSDAASLRDSGISTWDELGRILEI

SEQ ID NO: 487 - protein, 1183 aa, Zea mays
  VARIANT 509..1183: note = Derived polymorphism lacks residues 509 to 1183
MLRRVLLLRHFQHHRHRLRLLSTTPTPHASPSTSASSLPIAATPAAPHHLAPHRGGARRLAPLLAFSSLSLAAAGAVYLTTDNLEDTLQRSRDSAGRVVERMQHTWTAARVLWKSLLSVLSSANHEVRSGFELRVAALLADIAAASAARRTAIVSAGGGAVLDWLLESVVRGATQAEAARALAHLLADPWVAPAVLGRPHAVPCLLHFIFSFQPTRGKKKSSFDGLDHSKGRSMLVAALMDIITSNCDNADYSSFKPLLPADADTRDIATAIEVIEQGGMHFDDHEDNSSNDGDSGLKGIGIKVLGGTTVLGFSRGNNSLELDNSDYDTMDVSYDSSRSVVEQSTAESPLLRKLSSSAVPGLWDDLQREHVAVPFATWALANWAIASDLNRTLVQELDSDGHAVATALKAAERTVKWHGTLVARALLEDQNLALAPSVPDWCSSLLSTASQATANDDMPLGQLSLSTFLLSMMRCNESKFVIRQKGLHPLRSIAKKIENQNGQNSMKESIASALSLLYAGEVPLSLEESQRWSGILLRWLFDKSVSNKTHLTAMKILSCILEDYGPASVPISQGWLALVLSEILGDNKAQGSKGTTQPEPEKVKNPVDYHNASTATQVLNQLGSAVVKLASTQSNCEPGSDDKDKGPLSDFLSLEPFATVLKNMNKKNLPKFDAADSASATLKGIKALAELCSEDGACQKRIADLGALPLLRHILLGDDYEKLAAIEAYDASRTREVQDKNVAPNVSSTDATTDPSSVRVPPAAHIRRHAGRLLTILSLLPNSKKEIISDAVWCKWLEDCASGRIPCNDIKLKSYCRLTLLNILCSESPNTRKASDEYPDSESEYKRNCPQFGDALFLLNPELPLEVHVDNSGFGILRVSRDNCKEDGGIGGSGSETVNSVDDAEAASKSVPLMDVVFVHGLRGGPFNSWRIADDKSSTTKAGLVESIDEDAGKEGTCWPREWLAADFPQARFFTVKYKTNLTQWTGASLPLQEVSSMLLRKLVAAGIGSRPVIFVTHSMGGLVVKQLLYQAKLNNYDKFLNNTIGLVFYSCPHFGSKLADMPWRMGLVFRPAPSIGELRSGSPRLVELNDFVRQRHNKGFLDVLSFSETQVTPIVEGYGGWALRMEIVPIESAYPGFGELVVLPSTDHINSCKPVNKNDPSYAETLAFLEKNFKLCLERAES

SEQ ID NO: 488 - protein, 155 aa, Zea mays
  VARIANT 46: note = Ancestral polymorphism is Q, Derived polymorphism is E
  VARIANT 45: note = Ancestral polymorphism is T, Derived polymorphism is M
MAASDVEYRCFVGGLAWATDDHSLHNAFSTYGEVLESKIILDRETQRSRGFGFVTFSTEEAMRNAIEGMNGKELDGRNITVNEAQSRGGRGGGGGGYGGGRGGGGYGGGGRRDGGGGYGGGGGYGGGGGYGGGGGGYGGGNRGGGYGNSDGNWRN

SEQ ID NO: 489 - protein, 182 aa, Zea mays
  VARIANT 15..182: note = Derived polymorphism lacks residues 15 to 182
  VARIANT 17: note = Ancestral polymorphism is S, Derived polymorphism is L
  VARIANT 27: note = Ancestral polymorphism is L, Derived polymorphism is M
  VARIANT 37: note = Ancestral polymorphism is T, Derived polymorphism is A
  VARIANT 38: note = Ancestral polymorphism is S, Derived polymorphism is L
  VARIANT 65..182: note = Derived polymorphism lacks residues 65 to 182
  VARIANT 69: note = Ancestral polymorphism is H, Derived polymorphism is Y
  VARIANT 125: note = Ancestral polymorphism is D, Derived polymorphism is N
  VARIANT 135: note = Ancestral polymorphism is P, Derived polymorphism is S
MEVEGQGFTNGHANWTSAMSSFMLSYLSNVVSSGERTSSGFKKVHYNSCAKAINEKFQIALNGEQIKNHLKTWSRRFAKINRIRKVSGKGWDEDSFTITMDEEHYNGYVKVLFLLPTIWDTDVPDDLFDSLINLPGFEQTHISLYFNYLVAHPHIARAFNKLPFDHKLIWARNFVSEKFLGV

SEQ ID NO: 490 - protein, 372 aa, Zea mays
  VARIANT 205..372: note = Derived polymorphism lacks residues 205 to 372
  VARIANT 185..372: note = Derived polymorphism lacks residues 185 to 372
  VARIANT 163..372: note = Derived polymorphism lacks residues 163 to 372
  VARIANT 154: note = Ancestral polymorphism is R, Derived polymorphism is T
  VARIANT 143..372: note = Derived polymorphism lacks residues 143 to 372
  VARIANT 11: note = Ancestral polymorphism is S, Derived polymorphism is I
MYDFLNIQLESDLNLKRRTSLVIWSWRWPFHSWLPALIRVVAISVSSILSLNLLYFKKPDLEKTTETEQGVAQAILRGNIDFKREPAAASPPTTLFASSPTAPPPASPSRYRRAAGTLSLSARKFLGNHLTTAPGISVSPSEENMRIINRYIYRRKKQRSGHWYYFRSYWFVWRKKIERDVSQGQKAEIEKVKKRREERAIEKTQHEEEMTLLARERACAEFQDWEKKEEEFHFDQSKVRSEIRLREGRTKPIDVLQKNLNFLDEFDIELNEPYLVFKVSIICSSLSKYDKRYSSEPIPQQTDNQFEEEDGSFSPQLMHGNEDEDAIDPEEDKDELVEFYVRAKSSTEIFFHLDKLSSLCRPPCVSYPKRGH

SEQ ID NO: 491 - protein, 243 aa, Zea mays
  VARIANT 1: note = Ancestral polymorphism is V, Derived polymorphism is M
  VARIANT 7: note = Ancestral polymorphism is G, Derived polymorphism is V
  VARIANT 24..243: note = Derived polymorphism lacks residues 24 to 243
  VARIANT 27: note = Ancestral polymorphism is S, Derived polymorphism is L
  VARIANT 38..243: note = Derived polymorphism lacks residues 38 to 243
  VARIANT 60: note = Ancestral polymorphism is T, Derived polymorphism is N
  VARIANT 194..243: note = Derived polymorphism lacks residues 194 to 243
MKDLRSGVKELKTLLDSFEKKNKKLLSNLANKKPSGQWEEIKKIPLLTASNFEEICGEKTLISKKTLIRGQNYNSRNVVSYALLDKDKQSAFLSSFDKSGYRSSDKLLIAYKEPIIIMLLLFRTEGRFGCNVSHVNTYSGIAGKSMDKFGALISSFRYPGPRASGLRAPLKDVKNTLSVRCMFNQILLDVWLSQGIQSSLIILGGSLRSRMWWSTCHQESILTKHPLLSRMVSCLCVHHLGHP

SEQ ID NO: 492 - protein, 431 aa, Zea mays
  VARIANT 251: note = Ancestral polymorphism is R, Derived polymorphism is S
MDSDQDSLYEWFVLAPSLSDDDERAIALSSGCTTPNSSRVVSGTDSGSDPEPDHAAGSSMSKLFLPYAAADDPDDAEGVYALSDAEDTDATPPPSSPLPRPLSGLFHHTMDGDVAYAAFDPVHPTAAPLRGGGGHHDAKQPVPDPTFSAFFDEPVVALASTRGLLCLRGAYSAAYYVANPATLARERLPAPERDHRAQGDPAVVIVFDLDPRDADPERADGSGKGFYRHYHIVVAFPLAEGIYAFESFSSRAWAWRFGRGVGSAEAVLPSSGVGALGCAFWRTTMGPFLCYNPFARRAELVPAPVEVMQWPYWELGEMEGTLCATCMDARVEVVVVLRLNFARRATSGAISWTLAGYFEGGCLRGRQDVTLLRSQGKAEVVMWDPSSETVVAMDLEGRTTRTIRFIPGSDYCDDFIPYVSTFTAVSGFGFH

SEQ ID NO: 493 - protein, 188 aa, Zea mays
  VARIANT 46: note = Ancestral polymorphism is G, Derived polymorphism is V
  VARIANT 42..188: note = Derived polymorphism lacks residues 42 to 188
MLFGKPGKSGLMALNLDFDQVKEFIKERLGIERGWATLSASQSVGGIEIKENWDKVKTIFLPTEKPTTSDSCAPLIATHPLEAHRKFGDFIKGVFAVFHGFGKYFSFLEMNPFAMVNGEPYPLDIRGELDDTTAFKNFKKWGGIEFPLPFGRVLSPTESFIHELDEKVLISGLYFYLSFFPRGLSPIK

SEQ ID NO: 494 - protein, 269 aa, Zea mays
  VARIANT 76: note = Ancestral polymorphism is H, Derived polymorphism is Y
  VARIANT 48: note = Ancestral polymorphism is N, Derived polymorphism is I
MPRREVSLPDAFNLVLGKDRDNWPPAAGLLVAAYYGDIRRLKAQRALIDKVTPLSMALKHSYVSCLKLLVQRNLIHICNAGNTKYDAIQECSYDSTRLPIELAAEYGTWEDVELLFPVTSKIPTVADWSVNGVISNVHMEVTQLEDDEIVNKKKSELKRQGADAFSKEDYLNASVFYTQALKVDQFDATLFSNRSLCWLRLGDGKKALLDAIECKHLRPNWGKAYYRQGAALMSLEDYSSAYDAFSHGLELDPESEEMEKMLWEAMDLK

SEQ ID NO: 495 - protein, 528 aa, Zea mays
  VARIANT 448: note = Ancestral polymorphism is R, Derived polymorphism is W
  VARIANT 492: note = Ancestral polymorphism is C, Derived polymorphism is Y
MAPPSHFYNNNGAPQDAASYLHAGPGNAPPQDSCLLDADEFRRQGHQVIDFIADYYGRMDDYPVHPSVNPGFLRRQLPDKAPSRPESSDAFGAALRDVRDLILPGMTHWQSARHFAHFPASSSTVGALGEALTAGINSVPFTWAASPAATELEMVVVDWLGKALHLPESLMFCGGGGGTLLGTTCEAILCALVAARDRKLADIGSGRIGDLVVYCSDQTHFAFRKAAHIAGIHRDNCREIATYRDDMFALSPAELQATMQADVDAGLVPLFLCATVGTTQTTAVDPIRGLCAVAATHGVWVHVDAAYAGSALVCPEFRHLIDGAEAVDSFSMNAHKWLLANNDCCALWVKKPALLVAALGTEQEYILKDAAAEGHDVVDYKDWSVTLTRRFRALKLWLVLRCYGVEGLRDHIRAHVRMAASFEDMVKADPRFQVMAKRQFALVCFRLRAPEEMGGPKAANALNRRLLEEVNAACSGPYMSSANVGGVYMLRCAIGSTLTEERHVREAWTVVQNVASSLLAKMEMHEDY

SEQ ID NO: 496 - protein, 226 aa, Zea mays
  VARIANT 198: note = Ancestral polymorphism is G, Derived polymorphism is E
  VARIANT 104: note = Ancestral polymorphism is G, Derived polymorphism is E
  VARIANT 98: note = Ancestral polymorphism is H, Derived polymorphism is R
  VARIANT 84: note = Ancestral polymorphism is G, Derived polymorphism is V
MTERPERHKERGPIPYSPQVARGPRGRTQAEASLATKAAMATGWLAGSLPLRSASTAPSAARAQPLPSAAAPRRIPARLSVATGGGEQQLVTAQEPAHAEPDYGVVSIHHVGILCENLERSLAFYKDLLGLRVNPARPNDKLPYRGAWLWVGSEMIHLMELPNPDPLTGRPEHGGRDRHTCIAIRDVLKLKEVFDEAGISYTLSKSGRPAIFARDPDGNALEFTQV

SEQ ID NO: 497 - protein, 398 aa, Zea mays
  VARIANT 275: note = Ancestral polymorphism is D, Derived polymorphism is E
  VARIANT 179: note = Ancestral polymorphism is P, Derived polymorphism is L
  VARIANT 60: note = Ancestral polymorphism is S, Derived polymorphism is F
MLIGMPQAAAAVVHGKDPSTVRPAAALPLKLLRPLLLVAVLGTGFLAAVALLVGGPAYSSALPRPPVALPPAPPSGGGKQPLERWARAPASAWHNMTDDELLWAASWRPSVRRYPYRRTPKVAFMFLTRGPLPLAPLWERFFAGAGGGDAGLFSVYVHATPGYRPDFAPASAFYRRQVPSQVAEWGEPSMFDAERRLLANALLDPGNERFVLLSESCVPLYGFPAVYSYLTRSRESFVGAFDDPGPGGRGRYQGGLAPEVVREQFRKGAQWFELERALAVDVVADGRYYPKFREHCRPPCYADEHYLPTALSILAPARIANRSVTWVDWSRGGAHPATFGEADVGEAFLRRLTAPGKDQGNCTYNGQPAQVCFLFARKLAPGTLQPLLRLAPKLLGYG

SEQ ID NO: 498 - protein, 403 aa, Zea mays
  VARIANT 271..403: note = Derived polymorphism lacks residues 271 to 403
  VARIANT 57..403: note = Derived polymorphism lacks residues 57 to 403
MAVVDAMALSTPTPARAEQPDITRCHQGGEVREGDLVQFNYVCRRANNYFVHSTVDQFNGESRPVTLALGGEEVTSFTPEFVYPPEMIPLWYKHVVMHRDLKPENFLFANKKESAVLKAIDFGLSVFFIPETEQGVAQAIIRSVIDFKRDPWPRVSNNAKDLVRGMLNPDQKRRLTAHQVLGHPWLQNIKKAPNVNLGETVKARLQQFSVMNKFKKHALRVIAEHLWVEEAADIKDMFEKMDLNKDQMLSFEELKLGLHKFGQQMPDADVQTLMEAADADGNGSLNYGEFVTLFVHLRKIGNDEHLHKAFAYFDRNQSDYIEIDELRESLADDLGQNREEIINAIIRDVDTDKDGKISYDEFATMMKAGTDGRKASRQYSRERFTSLSLKLQKDGSLQMTITR

SEQ ID NO: 499 - protein, 600 aa, Zea mays
  VARIANT 257..600: note = Derived polymorphism lacks residues 257 to 600
MSDVAALPETVAEGKMTTTMNDAWDYKGRPAVRASSGGWSSAAMILVVELNERLTTLGVGVNLVTYLIGTMHLGGAASANAVTNFLGASFMLCLLGGFVADTYLGRYLTIAIFTAVQAAGMCVLTVSTAAPGLRPPACADPTGPSRRSSCVEPSGTQLGVLYLGLYLTALGTGGLKSSVSGFGSDQFDESDDGERRSMARFFGWFFFFISIGSLLAVTVLVYVQDHLGRRWGYGACVAAILAGLLLFVTGTSRYRFKKLVGSPLTQIAAVTAAAWRKRALPLPPDPDMLYDVQDAVAAGEDVKGKQKMPRTKQCRFLERAAIVEEAEGSAAGETNKWAACTLTDVEEVKQVVRMLPTWATTIPFWTVYAQMTTFSVSQAQAMDRRLGSGAFEVPAGSLTVFLVGSILLTVPVYDRLVVPLARRFTANPQGLSPLQRISVGLLLSVLAMVAAALTERARRSASLAGATPSVFLLVPQFFLVGVGEAFAYVGQLDFFLRECPRGMKTMSTGLFLSTLSLGFFFSTAIVSAVHAVTTSGGRRPWLTDDLDQGSLHKFYWLLAAISAVDLLAFVAVARGYVYKEKRLAAEAGIVHDDDVLVHAT

SEQ ID NO: 500 - protein, 297 aa, Zea mays
  VARIANT 57: note = Ancestral polymorphism is S, Derived polymorphism is F
  VARIANT 88: note = Ancestral polymorphism is R, Derived polymorphism is C
  VARIANT 96: note = Ancestral polymorphism is T, Derived polymorphism is I
MAFSSSLAPFFPPSGTFRAHPARRLRADAPGRFVASCLPPPDVVVTREQGKNARLISALEKHNVHPLELPLIKHVEGPDTDRLLDVLRNDKFDWIIVTSPEAAAVFLQGWKAAGSPKVRVAVVGEGTARVFHEVSESDDQSLELAFSPSKALGKVLASELPRSNRNSCKVLYPASAKAGHEIEDVLSERGFDVTRLNTYTTVPVEDVDPLTLNLAISAPVVALASPSALRAWLNLISKSDNWNNSVACIGETTASAAKKLGLKSIYYPTTPGLEGWVESILEALRVHRTASKEAPKR

SEQ ID NO: 501 - protein, 273 aa, Zea mays
  VARIANT 183: note = Ancestral polymorphism is S, Derived polymorphism is I
  VARIANT 212: note = Ancestral polymorphism is S, Derived polymorphism is Y
  VARIANT 226: note = Ancestral polymorphism is S, Derived polymorphism is L
MATTTSCCTAASTSRRRLSDLLQEQQEPLLLLHLLLQADHDDDDGATPAPAAAARSLLRGTTRLARRWADDVLAGCFPRRQRLRRLLPRPGRDDAASTCAHAQPADDGAVGCGRPPQLSPVSVLDLLSHDVPAHPGDDDGKPSTPGNSPSPPSTHDHDHDHDRDLPGKTHTVEGKRRRFQTKSAALFASACREWESESESVAAPLSLAADSSWAPSLQVERDLCGSPRRDCWRRLVVAGEQEARLVARSVEAMIFEEVRWEAVRDMLSLPQRR

SEQ ID NO: 502 - protein, 165 aa, Zea mays
  VARIANT 82: note = Ancestral polymorphism is R, Derived polymorphism is L
  VARIANT 55: note = Ancestral polymorphism is A, Derived polymorphism is P
MGQQEEVAAVQKPPAAAVVFTWEPVVTVTAKRPEGGVGDTTAVITPAGSPTTKAARRLAVPPPPGRAAARSLSSRAGGRAVRPEDDPFLAAYLACTKSGSRGGGGGGDAGGTGTGTGTGAPRQRQGWSRFAWARLGLSCKSSAGAVERSMVKLAKRPEAVDPRDA

SEQ ID NO: 503 - protein, 138 aa, Zea mays
  VARIANT 4: note = Ancestral polymorphism is R, Derived polymorphism is H
MGHRHVFLVSLALLVLVATTHTGGHATQAATDGVVVGVGSSSMVAGRSMVGSTPPNCEGRCGWWCVGRSCGAVLVPVEPPPHQPHNTQSRRHGSGGTGDDSTASAAAAVRQRRLSPYDDADYSNYKPVTWTCKCVGTS

SEQ ID NO: 504 - protein, 128 aa, Zea mays
  VARIANT 12: note = Ancestral polymorphism is G, Derived polymorphism is V
MGHRRLFVLSLGLAHLLLIATAHAGGGHARGAATDDAVAHQGMSMVGSRPPSCAGRCWWCGARRCEAVQVPITPQQQDKSRRHGKSGGGGGGSIPSSTRDGGRGGASSSYDDRSNYKPLSWRCRCGGG

SEQ ID NO: 505 - protein, 1003 aa, Zea mays
  VARIANT 59..1003: note = Derived polymorphism lacks residues 59 to 1003
MVSTLCSPPPLPCFLLFAIVLSFASGDDGGRAAALELDTQAAYLAKMKEEFPGPGMSRWWDFTSPAPDYCSFRGVACDPSGNVTGIDVTSWRLVGRLPPGVCAALPALRELRMACNDVRGGFPLGVLNCTSLEVLNLSFSGVSGAVPRDLSPLRALRVLDLSNNLFTGAFPTSVANVTSLEVVNLNENPGFDVWRPAESLFLPLRRVRVLILSTTSMRGGVPAWFGNMTSLTDLELSGNFLTGRIPESLARLTNLRFLELYYNELEGGIPAELANLTQLTDIDLSENRLTGPIPESLCALRGLRVLQLYTNRLTGPIPAVLGNSTQLRILSLYRNQLTGGIPADLGRYSDLNVIEVSENQLTGPLPPYACANGHLQYILVLSNLLTGPIPPAYAECTPLLRFRVSNNHLEGDVPPGIFGLPHASILDLSYNHFTGAVAATVAGAANLTSLFASNNRMSGELPPEIAGAWGLVKVDLSNNLIAGPIPESVGLLSRLNQLSLQGNLLNGSIPETLAGLRTLNVLNLSDNALSGEIPESLCKLLPNSLDFSSNNLSGPVPLQLIKEGLLESVAGNPGLCVAFRLNLTDPALPLCPRPSLRRGLAGDVWVVGVCALACAVATLALARRWVLRARRYAGQDKGLASSSPASSESYDVTSFHKLSFDQHEILEALIDKNIVGHGGSGTVYKIELSGGELVAVKKLWVSSKRRLRGPSSKQVDWAAVTSTTTNSGDSDGGWLGDRELRTEVETLGSIRHKNIVKLYCCYSGADCNLLVYEYMPNGNLWEALHGCYLLLDWPTRHRVALGVAQGLAYLHHDLLFPIVHRDIKSSNILLDADFEPKVADFGIAKVLQARGRGGADRDASTTTIAGTYGYLAPEYAYSSKATTKCDVYSFGVVLMELATGRKPIEPEFGDTRDIVHWVSGKVASGAGAEADALDKRLAWSPYKEEMLQALRVAVRCTCSMPGLRPTMADVVQMLAEAGPPAGRTTKDDSKVLVADHHHHAPAP

SEQ ID NO: 506 - protein, 171 aa, Zea mays
  VARIANT 81: note = Ancestral polymorphism is I, Derived polymorphism is V
  VARIANT 79: note = Ancestral polymorphism is Q, Derived polymorphism is E
  VARIANT 33: note = Ancestral polymorphism is A, Derived polymorphism is V
MTSSSSPSRKALSKIACNRLQKELAEWQQNPPVGFKHKVSDNLQRWVIEVTGAAGTLYAGEAYQLQVDFPEHYPMEAPQVIFLNPAPMHPHIYSNGHICLDILYDSWSPAMTVSSVCISILSMLSSSPAKRTMTAMLGTAATGGRQRRLDGGSMTTRCNDLCGIACQPSVL

SEQ ID NO: 507 - protein, 180 aa, Zea mays
  VARIANT 26: note = Ancestral polymorphism is G, Derived polymorphism is R
  VARIANT 72: note = Ancestral polymorphism is T, Derived polymorphism is I
  VARIANT 104..180: note = Derived polymorphism lacks residues 104 to 180
MESCHREENFWYKCKNSVSTCLVDFGKQLNGRHFSQLCFVKGDSRKSLEADAYASYMKGALFSEQDKNIDAIIINFKNTRAIYEEPRKYGSIENELLCYQCIEEVEPANDLLNEDECASRPHVSLTQAMSSMDFKDYSMAHNLIGCCLQLYMNQKEVVDTLSLQAKNAGVTIGAFSLLPV

SEQ ID NO: 508 - protein, 73 aa, Zea mays
  VARIANT 2: note = Ancestral polymorphism is R, Derived polymorphism is Q
  VARIANT 12: note = Ancestral polymorphism is R, Derived polymorphism is W
  VARIANT 19: note = Ancestral polymorphism is E, Derived polymorphism is K
  VARIANT 22: note = Ancestral polymorphism is G, Derived polymorphism is W
MRVASILSFTFREAVEDVEYQGYLIPKGWKVLPLFRNSHHNPDHFPCPDKFDPSRFEVAPKPNTFMPFMPKCF

SEQ ID NO: 509 - protein, 510 aa, Zea mays
  VARIANT 287..510: note = Derived polymorphism lacks residues 287 to 510
  VARIANT 288: note = Ancestral polymorphism is L, Derived polymorphism is R
  VARIANT 292..510: note = Derived polymorphism lacks residues 292 to 510
  VARIANT 296..510: note = Ancestral polymorphism lacks residues 296 to 510
  VARIANT 302: note = Ancestral polymorphism is T, Derived polymorphism is A
  VARIANT 303: note = Ancestral polymorphism is P, Derived polymorphism is T
  VARIANT 309..510: note = Derived polymorphism lacks residues 309 to 510
MPPWPPCLQPTLTTARRATVFSRTRCLSSTPASPTYEQGQHEEEPSLVVVGGGAAGVYASIRAKTLAPHLNVAVVEKGRFLSKVKISGGGRCNVTNGHHLEPMGLARNYPRGNKELRGSFFTAHGPQDTMRWFTDHGVKLKTEDDGRVFPVTDNSASVVDCLLNEARRLGVSLQAGKTVSSASVAQDGKFVLKVEKRTADLVDYINANYILVATGSSQHGYSIAAQLGHSIIAPVPSLFTFKIADKRLADLAGVTFPIVKAKLKLDGVQKSVPELTQVNMPFLFSNWRALREVVNWLYTSLATSDLSLQTGPMLVTHWGLSGPVVLRLSAWGARELHQCNYQGNLMVDFVPDIHIEDVKRVLFHYKDQHAKHKVSNTFPTEFGLVKRFWRFLLEQESLNGDTHWASMPNNHLNAVAFRLKQWTFEVVGKGQFKDEFVTAGGVPITEISLGTMESKKQPNLFFAGEVLNVDGVTGGFNFQNAWTGGYIAGTSIGTLASTSNLPEQQSCFQL

SEQ ID NO: 510 - protein, 352 aa, Zea mays
  VARIANT 251..352: note = Derived polymorphism lacks residues 251 to 352
  VARIANT 239..352: note = Derived polymorphism lacks residues 239 to 352
  VARIANT 111: note = Ancestral polymorphism is A, Derived polymorphism is T
MPTPCPRLAVPSTSPSSRVVADKGSDEVVFKAMGRAINKTVMVVELIKDRTITAHEPVILEFKIISLCRLETTRHVSMITITLSKKELDTSSIGNLIRNQYPLYYCMQAITKSGFVEPTPIQSQGWPTTLKGRDLIGIAQTGSGKTLSYLLPRVVHVGAQLRLGVEIVIATPGRLIDMMEAGHTNLRRVTYLVLDEADRMLDMGFEPQIRKIVAQIRPDRQTLYWSATWPREVEALARQFLQNPYKVHDLCCYCYFLVIIGSPELKANHSIQQIVEVISDHEKYPRMDGWPALSIHGDKAQAERDYVLAEFKSGKSPIMAATGAIMSKVDNFPFGLPHLSVSIGSVTQAVQL

SEQ ID NO: 511 - protein, 170 aa, Zea mays
  VARIANT 149: note = Ancestral polymorphism is G, Derived polymorphism is A
  VARIANT 117: note = Ancestral polymorphism is K, Derived polymorphism is M
MDHRQPPPNKTAELDPVLHSIGFQIEEVSPSQVTGRLPVTPRCCQPFQVLHGGVSALVAEGLASMGAHMASGFRRVAGVSLTINHFRSAKVGDVVLVRAAPLHVGRSTQVWDVKLWKEDQQGKKGSQISESRVTLLCNLPVPDILKHAGDALKKYADAPAAQKPTATSRL

SEQ ID NO: 512 - protein, 529 aa, Zea mays
  VARIANT 16: note = Ancestral polymorphism is S, Derived polymorphism is G
MAMMDKWTGLGSALASMLFLWSMVQNHLPAAFGYRLSTWGNKLASLFSPYLEITISEYGAERFRRSDFFLAAEAYLSDACSRRARKLRADLGKDSKNLQVSVDDNDEVTDAFSGATIWWYASKQLARSQVISFYPGEDERRFYRVVFHRRHRDLVVDEYLPHVLEEGRAVTVRNRQRRLFTNNPSGSWNSYRGKSVWSHVPFEHPATFDTLAMDPDDKEDILDELRAFRDAKAYYTKVGKPWKRGYLLYGPPGTGKSTMIAAMANFLDYDVYDLELTAVKNNTELRKLFIETTGKSIIVIEDIDCSIDLTGKRKDDKKRASAEADDKPKTPTDPDKDEGSKVTLSGLLNFIDGLWSACGGERIIIFTTNHKDKLDPALIRRGRMDRHIEMSYCRFRTFKVLAKNYLDVEEPHELFGQIEKLLEETDMSPADVAENLMPMSKKKKRRDANACLESLVEALKQAKEDAAAAAAAKALADARAAKEEAEEAKEKEAKEKDEATNSKGAADPAGKDTKMSNGDVTANKEGDDE

SEQ ID NO: 513 - protein, 181 aa, Zea mays
  VARIANT 115: note = Ancestral polymorphism is G, Derived polymorphism is V
MACCSSSSLSLSLVLLVVILALTPAEASRAMPTTTTTTAIGGTTTNSNDSQQKHGQRAAASGVNADQKTFLPGYVGGVGGFAGAGAGLGGIGGVAGGIGGGVGGLGGVVGGGLGGFGPLGGAGGGSGLGGGSGLGGLGGLGGGGGLGGGGGLGGGSGSGLGGSGGLGGGSGLGGGGGCLHP

SEQ ID NO: 514 - protein, 291 aa, Zea mays
  VARIANT 79: note = Ancestral polymorphism is S, Derived polymorphism is T
  VARIANT 64: note = Ancestral polymorphism is S, Derived polymorphism is L
  VARIANT 60: note = Ancestral polymorphism is R, Derived polymorphism is G
  VARIANT 54: note = Ancestral polymorphism is A, Derived polymorphism is T
MASQGVVGGGGGGGGGGRHRFFKVLLPGSFEISLSLPPKFAAGLGVLCPAWRAAAKLRDRTGRSWDVELRRDAGHHRVSFTGGGWRGFVSANALSAGQLLVFEHRGCLDFAVDRFDASGCCCDDDQDGGGVVVAEHMATTTTTGTEATADKESGCSGQEAAAAVKRRRRSPLSTTTTVCGGDDNDETLCRRIERAYQLRFLDLSKDFCDRVGWSSSRQVVLCAAGDSGKRWQVSVKVSAKSGMMCAGWAEFAQDNGLTVSDACEFVPPPLHAHGSGSDVLQVHLVRGGGTS

SEQ ID NO: 515 - protein, 76 aa, Zea mays
  VARIANT 11: note = Ancestral polymorphism is G, Derived polymorphism is C
  VARIANT 23: note = Ancestral polymorphism is K, Derived polymorphism is N
  VARIANT 28: note = Ancestral polymorphism is K, Derived polymorphism is N
  VARIANT 31: note = Ancestral polymorphism is P, Derived polymorphism is L
  VARIANT 45: note = Ancestral polymorphism is M, Derived polymorphism is T
  VARIANT 55: note = Ancestral polymorphism is P, Derived polymorphism is L
MLKFMRHVGSGSCRNLKAVEKIKVAREKYSPVTKGSNVWDVFTRMVVAVICEIMPATHNVRLLKLYTSAIKMPQSS

SEQ ID NO: 516 - protein, 125 aa, Zea mays
  VARIANT 22..125: note = Derived polymorphism lacks residues 22 to 125
  VARIANT 65: note = Ancestral polymorphism is I, Derived polymorphism is T
MAGMEELLTLLFNALLLVFVVKLLLALFHTKIIVILLYILVLLFAMLLSGRFPDCLRLIDLLDWIGSERSRKWGKMRSKKRKGSAAARERAKEREGSSFALPAKPSPVLEGRRRPFVAQHSTATV

SEQ ID NO: 517 - protein, 224 aa, Zea mays
  VARIANT 209: note = Ancestral polymorphism is A, Derived polymorphism is V
  VARIANT 199..224: note = Derived polymorphism lacks residues 199 to 224
  VARIANT 196..224: note = Derived polymorphism lacks residues 196 to 224
  VARIANT 183: note = Ancestral polymorphism is P, Derived polymorphism is L
  VARIANT 178: note = Ancestral polymorphism is G, Derived polymorphism is D
  VARIANT 176: note = Ancestral polymorphism is T, Derived polymorphism is M
  VARIANT 175: note = Ancestral polymorphism is V, Derived polymorphism is I
  VARIANT 171: note = Ancestral polymorphism is R, Derived polymorphism is H
  VARIANT 169: note = Ancestral polymorphism is G, Derived polymorphism is S
  VARIANT 167: note = Ancestral polymorphism is V, Derived polymorphism is I
  VARIANT 107: note = Ancestral polymorphism is C, Derived polymorphism is R
  VARIANT 73: note = Ancestral polymorphism is A, Derived polymorphism is P
  VARIANT 67: note = Ancestral polymorphism is C, Derived polymorphism is Y
  VARIANT 64: note = Ancestral polymorphism is A, Derived polymorphism is T
  VARIANT 63: note = Ancestral polymorphism is H, Derived polymorphism is R
  VARIANT 60: note = Ancestral polymorphism is A, Derived polymorphism is T
  VARIANT 58: note = Ancestral polymorphism is A, Derived polymorphism is T
  VARIANT 32: note = Ancestral polymorphism is T, Derived polymorphism is M
  VARIANT 27: note = Ancestral polymorphism is G, Derived polymorphism is S
  VARIANT 17: note = Ancestral polymorphism is T, Derived polymorphism is A
  VARIANT 16: note = Ancestral polymorphism is T, Derived polymorphism is A
MNHGAKVFMVQLQANATHVFVKPSDSGTLMLMPLSLYLTSADFEVASPGHRSVVGFSAIADAHAGRCKIFDDAASPNNEMLMTHDGRGYIYFLLLSQPGVSSNHSCCYTLKWNFLLLSLQSELCNIIELTYDHCGLWFALEFMCCSCLMNLLQKNKGDNERLWAAGIAGKRKKVIMSGKPKRPPSAFFVFMSEFRQEYQVQHPGNKSIVVVSKTAGEKWHAKSD

SEQ ID NO: 518 - protein, 1050 aa, Zea mays
  VARIANT 666..1050: note = Derived polymorphism lacks residues 666 to 1050
  VARIANT 981..1050: note = Derived polymorphism lacks residues 981 to 1050
MATLSWWMEWSVENVREAFFSYFGENQHVRLPSPSDVLFKATFSLPIDGSFFNMQKYKLPQSRIYASYFSGDMSSCLSSVDESRNTLQKYIGAEKSCLPCPRLIFGCPVKLVLVGHVLVFFLDCSDNNDGVDSVRNITDGKLVDICRLVFVEFDRQADGVLEPFQAKHVLTGINLECLAAILQKKESHYDLDVYAYVIRQVYWVSFKDYTGKVGAADTDGVDTAYRLVADHMRMIAVTNAPGSQLGLGNEGREYFLKCADKQAVKYGYQVLKINEEDYDIYHFYLLLCASLLKVKITFKMKPAQDIDSMTGLVLASLSCNFYSDVVDAILLNEPDLCTELEKEIIDRIVKDEVMIYKKTKAELRNQEQPFDMGKKKKRNKNVPAVVWYPTRVIEFLGRRTPIILKEKDTRCSLVAICFTLTSWSLLEMPRTEFIHFLFLCHCRQRSPAWRENNPRFRYQESVGEPSHPSCPEASFVWQYTNAGMQLYICKCFENECPLTQKLSYCPLILQLEQNLELSEFNKQVLGVLPKLTCSLYFDVTFSSSCGLEKTFETALFGFLGVPLRHGWMLSWTPRYVEAPTPNFRIILLSMNQFDPKTNSGPQKHGRYEDDMFYTALAFSKTGSEKELDSTSCATISTFLQGPQLTRYGFSSLHNDLRALQPTVLIWNENLITISKFEDKIYVLLNDLSLLRTETDAVWERLTQANGDGVFVDCNFVPTDSKIQSVLPLTKTERKKRIKEKMDLKKKEKDSNKDKDDEDTKDKDDGKEEDSNEDRDDEETEEKDDGNVAPQTYFLQGRHINLNAMFYSQGDISFEPHETVVSMEYLLGLVLALLGGSVKMQDYSDERKSQILNVVKSLAGGFDMDVIFTRTDGFTMTPEWLLLDCLDLNLRHGWIAARDLLTGPEVSFESLTLASNEPGFPHAEEIKNFLRGPQLTPIGLVSLQEDFVENVPCILFWNKHYHTIVMINGVLNSLVTDSNYLETRVVWQTLDGVCYSVFFIISLCDCELMVILSFGLSVAWPRSAGLSSCSLISFNIFFIAQLLCRRVCFEA

SEQ ID NO: 519 - protein, 1093 aa, Zea mays
  VARIANT 1059..1093: note = Derived polymorphism lacks residues 1059 to 1093
  VARIANT 1009..1093: note = Derived polymorphism lacks residues 1009 to 1093
  VARIANT 986: note = Ancestral polymorphism is D, Derived polymorphism is V
  VARIANT 875..1093: note = Derived polymorphism lacks residues 875 to 1093
  VARIANT 622..1093: note = Derived polymorphism lacks residues 622 to 1093
MATLSWWMEWSVENVREAFFSYFGENQHVRLPSTPGFSEFGSYHLAGFHTKAQYNQVPLLHTCLHRFKGTLGGRERHRTCFSLRCIIASGDEDLIDRFRIDATFHRFTEILGSWSHGYYFKEEAIGLLFSLLTEKYKLPQSRIYASYFSGDMSSCLSSDDESRNTLQKYIGAERILPSMSKVDFWMPGETGPCGPCIGFFLDCSDNNDGVDSVRNITDGKLVEICRLVFVEFDRQADGVLEPFQAKHVLTGINLECLAAILQKKESHYDLDVYAYVIRQVYWDYTGKVGAADTDGVDTAYRLVADHMRMIAVTNAPGSQLGLGNEGREYFLKCADKQAVKYGYQVLKINEEDYDIYHFYLLLCTSLLKVKITFKMKPAQDIDSMTGLVLASLSCNFYSDVVDAILLNEPDLCTELEREIIDRIVKDEVMIYKKTKAELRNQEQPFDMGKKKKRNKNVPAVVWYPTRVIEFLGRRTPIILKEKDTRCSLVAICFTLTSWSLLEMPRTEFIHFLFLCHCRQRSPAWRENNPRFRYQESVGEPSHPSFPEASFVWQYTNAGMQLYICKCFENECPLTQKLSYCPLILQLEQNLELSEFNKQVLGVLPKLTCSLYFDVTFSSSCGLEKTFETALFGFLGVPLRHGWLVDPQDAELDSSIRGSSYSKLSYNLAIYESIRPKTNSGPQKHGRYEDDMFYSALAFSKTGSEKELDSTSCATISTFLQGPQLTRYGFSSLHNDLRALQPTVLIWNENLITISKFEDKIYVLLNDLSLLRTETDAVWERLTQANGDGVFVDCNFVPTDSKIQSVLPLTKTERKKRIKEKMDLKKKEKDSNKDKDDEDTKDKDDGKEEDSNEDRDDEETEEKDDGNAAPQTYFLQGRHINLNARPINFLGLSTHVIHQINDGPCALIAVYKGDISFEPHETVVSMEYLLGLVLALLGGSVKMQDYSDERKSQILNVVKSLAGGFDMDVIFTRTDGFTMTPEWLLLDCLDLNLRHGWIAARDLLTGPEVSFESLTLASNEPGFPHAEEIKNFLRGPQLTPIGLVSLQEDFVENVPCILFWNKHYHTIVMINGVLNSLVTDSNFLYMKRGSKRPR

SEQ ID NO: 520 - protein, 155 aa, Zea mays
  VARIANT 20: note = Ancestral polymorphism is T, Derived polymorphism is I
  VARIANT 63: note = Ancestral polymorphism is R, Derived polymorphism is I
  VARIANT 94..155: note = Derived polymorphism lacks residues 94 to 155
  VARIANT 134..155: note = Derived polymorphism lacks residues 134 to 155
MKQRFGTNERTSPKSDVLQTFAAPRQQEEKKDLERKGEGNDGSSCSDGVGHEQVVGALGCSHRREPCVRVDGGGGRERDKVGGGGLEVGAAGQWHVDLEFLAPTADSELLAPAAVAQCIRVAVGESGHGRDRSQDAKASSASRRIAPLMMNDIGG

SEQ ID NO: 521 - protein, 964 aa, Zea mays
  VARIANT 594..964: note = Derived polymorphism lacks residues 594 to 964
MATLSWLMEWSVENVCEAFFSYFGENQHVRLPSTPVIPVDDPKVPLLHTCLHRFKGTLGGRERHRTCFSPRCIIASGDEDLIDRFRIDATFHRLTEILGSWSHGYYFKEEAIGLLFSLLTEATFSLPIDGSFFNMQKYKLPQSRIYASYFSGDMSSCLSLDDESRNTLQKYIGAERILPSMSKVDFWMADETGPCGPCIGFFHDCSDNNDGVDSVRNITNAKLVEICRLVFVEFDRQADGVLEPFQAKHVLTRINLECLAAILQKKESHYDLDVYAYVIRQVYSRTGKGFKDYTGKVGAVDTNGVDTTYRLVADHMRMIAVTNAPGSQLGLGNEGREYFLKCADKQAVKYGYQVLKINEEDYDIEIIDRIVKDEVMIYKKTKAELWNHEQPFDTRKKKKRNKNVPAVVWYPTRIIEFLGPRTPIILKEKDTRCSLVAICFTLTSWSLLEMPRTEFIHFLFLCHCRQRSPAWREKNPRFRYQESVGEPSHPSCPEAPFVWQYTNAGMQLYICKCFENECPLTLKLSYCPLILQLEQNLELSEFNKQVLGVLPKLTCSLYFDVTFSSSCGLEKTFETALFGFLGVPLRHGWLVDPQDAVLDSSIHRSSYSKLSYNLAIFESIRPKTNSGPQKHGATISTFLQGPQLTRYGFSSLHNDLIALQPTVLIWNENLITISKFEDKIYVLLNDLSLFKTKTDAVWERLTHDMPDIDLADAIRLSGGQMVMEFLLIVTLCLQILRFNQYWQCSIAQGDISFEPHETVVSMEYLLGLVLALLGGSVKMQDYSDERKSQILDVVKSLAGGFDMDVIFTRTDGFTMTQEWLLLDCLDLNLRHGWIAARDLLTGPEVSFESLTLASNEPGFPHAEEIKNFLRGPQLTPIGLVSLQEDFVENVPCILFWNKHYHTIVMINGVLNSLVTDSNYLETRIVWQTLDGVNGDGVYLDNNFTPVYVGLDAATSVYVMWPKIN

SEQ ID NO: 522 - protein, 122 aa, Zea mays
  VARIANT 6: note = Ancestral polymorphism is A, Derived polymorphism is V
  VARIANT 33..122: note = Derived polymorphism lacks residues 33 to 122
  VARIANT 92..122: note = Derived polymorphism lacks residues 92 to 122
MSCMNVDEEKVLRKKVIGGWDPTCTKRSFFPFWRSVLGARGNVRVYPSYAAPDENMVLDVELLRKRMSNWSSPMNHVELIGKIPQLTSTQQSRRYSTTAFKALVKVKECMSRKVCHGFSFSF

SEQ ID NO: 523 - protein, 383 aa, Zea mays
  VARIANT 9: note = Ancestral polymorphism is A, Derived polymorphism is V
  VARIANT 34: note = Ancestral polymorphism is A, Derived polymorphism is V
  VARIANT 35: note = Ancestral polymorphism is R, Derived polymorphism is H
  VARIANT 44: note = Ancestral polymorphism is R, Derived polymorphism is C
  VARIANT 49: note = Ancestral polymorphism is V, Derived polymorphism is L
  VARIANT 72: note = Ancestral polymorphism is A, Derived polymorphism is T
  VARIANT 93: note = Ancestral polymorphism is G, Derived polymorphism is R
  VARIANT 95..383: note = Derived polymorphism lacks residues 95 to 383
  VARIANT 112: note = Ancestral polymorphism is P, Derived polymorphism is L
  VARIANT 301: note = Ancestral polymorphism is S, Derived polymorphism is P
MGFLDFPFAAVPDSADARRFPRHQEVLRYIQAFARRFHLDGLIRLRTEVLAVSKDNDEGSSGGWRVRWRRNAAGDESEQEQEEVFDAVVVCNGHYTEPRTAAADIPGLDAWPPGKQMHSHSYRVPAPFADQVVVIIGASNSGADISREIAGVAREVHMADRSAPTATCHTLPGYRNLWLRSMVERADQDGTTVVFRDGSSVRADVVMHCTGYTYSFPFLPTTAAPAGDGAVVSVDDNRVHPLYKHVFVPQLAPRLAFVGLPFKVIPFPMFQIQASWVAGALSGRIQLPSEEMMEDVSALYSELETVGWPVRYTHCMKHSQFEYDEWLAEQCGGGHAGRVEEWRKDMFDAAKRKKVQCPETYRDEWDDHHLLERAYQDFNNYSS

SEQ ID NO: 524 - protein, 239 aa, Zea mays
  VARIANT 36..239: note = Derived polymorphism lacks residues 36 to 239
MRRSEGDFVRSSPYRRARRSGPALVTAAAIEDAVDCGSSSVSGTGVWKRAPAGEKVPSLLNLAPLRGQVLGCGDEAVAATRQQTWWFRPSIRLDGACSGASEGPVKLGLSDLGATILNLDDDASDLGGSDVYWYSLFPFSGACWVCRGMPVLSGLLFLASSARLRWRWCRGITSSDLFLAPVTFCSGINGEVAEILLGVFGWRLIVLTGVFWPFARRLCDICDVVVVVCVGRRCAQIQD

SEQ ID NO: 525 - protein, 466 aa, Zea mays
  VARIANT 358: note = Ancestral polymorphism is G, Derived polymorphism is D
MARRLLLLLLPIILTSSATASKNKSSSLLPLPDGPDPCSGRRIHIRWLPARFNTHLLLYCATAFPLADPDSKSTPACASLANHGLGPRTHNGTRSWYRTDARLLEPFFHRRLLERACLVARPAQADAVFLPYYAALDALPYVLHPDLLNSSALHGLPLARYLARNQPRVLARRHGHDHFFLLAGTAWDYSQPHDAEPRMYGTTSLLRLPELANFTVLTLESRTWPWQEHAIPHPTSFHPSSLPRLRSWTARARRSRRTALMLYAGGVSRPSRPNIRGAILAECANRTSSKSNNVCIVVDCSAAACALNPVAYMRPMLRANFCLQPPGDSPSRRSTFDAIVAGCVPVFFEHAAARAHYGWHLPRGRYDQFSVTIPKDSVVMGDVRITDVLAAVPADEVARMRERLLEIAPRVVYRRHGSAADLRESTKDAVDLAVEGVLRRIRRRVSALEDGHPDAIYELEDDDGAH

SEQ ID NO: 526 - protein, 406 aa, Zea mays
  VARIANT 17..406: note = Derived polymorphism lacks residues 17 to 406
  VARIANT 19: note = Ancestral polymorphism is R, Derived polymorphism is I
  VARIANT 41..406: note = Derived polymorphism lacks residues 41 to 406
MRSTRDETLSASSLVFQNIARVQIAYLVSFFSSYLLTTCSQGSSAEAACSAAALFLLYCTSLYCCSSSTTTFSSCSCYLSTSFSPAPSAAAPDTKDEPLQDKTVEESTDVVTGNISGFPASQFDHSAWAYKGAMVRNMPDDPSQSQHLVQEDLVDVFDILDDLKNDPVQRDLLKEVEKHDVKNVSTFGSTERSIPLSQGFTMPRYVVPDDTDIQYTPPQPRATRSQAQPLKSSLRTNETRQIRKGQKKLKKSPKKVSQDVELDDNGFPIIDFAALDRFDPPPHLAVDVESYGGPAASVAAKQAALRMVAEILEKRIAHPQLTYFTYVEKFLPEDDPEDVIALEYNLIGSKQIYEACADGEMRSNDQVYYYTICIANEDKLFRTEAADYRIFLPTNLSVSSSIFDFY

SEQ ID NO: 527 - protein, 224 aa, Zea mays
  VARIANT 45: note = Ancestral polymorphism is V, Derived polymorphism is G
  VARIANT 53: note = Ancestral polymorphism is E, Derived polymorphism is G
  VARIANT 111..224: note = Derived polymorphism lacks residues 111 to 224
  VARIANT 125..224: note = Derived polymorphism lacks residues 125 to 224
MGMPPGSASPSIMGPIMYLNPISSVTSAAMTTTKEPSDNSDPVGGRLYAISSEGATVEGRQQHRRFGFYNYCLKCHKGLMSFRFSIGRPILPHQPKGCRCTSCKDLMSTEQLYGCLISYCSINCWMKGEGGEFAEVQVAETLLTTDFECSTYVVCLTCSNTFSSSENSVCQKQTTLDIMMGNKNVQKQDIARNDQELKTTLTGFKNLENSTAPYEIQKSNQKSG

SEQ ID NO: 528 - protein, 275 aa, Zea mays
  VARIANT 129: note = Ancestral polymorphism is A, Derived polymorphism is T
  VARIANT 121: note = Ancestral polymorphism is D, Derived polymorphism is G
  VARIANT 103: note = Ancestral polymorphism is T, Derived polymorphism is M
  VARIANT 88: note = Ancestral polymorphism is R, Derived polymorphism is C
  VARIANT 70: note = Ancestral polymorphism is R, Derived polymorphism is C
  VARIANT 62: note = Ancestral polymorphism is R, Derived polymorphism is C
  VARIANT 57: note = Ancestral polymorphism is G, Derived polymorphism is D
  VARIANT 54: note = Ancestral polymorphism is G, Derived polymorphism is R
  VARIANT 52: note = Ancestral polymorphism is G, Derived polymorphism is S
  VARIANT 38: note = Ancestral polymorphism is Y, Derived polymorphism is H
  VARIANT 32: note = Ancestral polymorphism is P, Derived polymorphism is Q
  VARIANT 29..275: note = Derived polymorphism lacks residues 29 to 275
MTAPPTSSSTAPPTAGTSRSRPPGAVGAQRPPRRPGGYGEWGLDPILWKPIGPGHAGYVFLRHVSNRLLRANRSRYTSYGAINRGGLRGLLLLHQEPMVLQRTIWYVQADNLGNFNLNPNGWPSFEFHAQVKVRLLEEDNNAGKFGFYSYCLKCHKVAKEEHLRHQDVIIPFAWHKGKLVAWVIGKETWSSSFHDIQGLMSFRSSIDRSFLLHQPKDCRCTSCKDLMSTKQLYGCLISYYSINCWLHLHLSYAAGTKFSDTYFLASHVTKYVSNQ

SEQ ID NO: 529 - protein, 129 aa, Zea mays
  VARIANT 17..129: note = Derived polymorphism lacks residues 17 to 129
  VARIANT 21: note = Ancestral polymorphism is D, Derived polymorphism is N
  VARIANT 30: note = Ancestral polymorphism is G, Derived polymorphism is S
  VARIANT 34: note = Ancestral polymorphism is I, Derived polymorphism is F
  VARIANT 90: note = Ancestral polymorphism is H, Derived polymorphism is R
  VARIANT 99: note = Ancestral polymorphism is R, Derived polymorphism is Q
  VARIANT 104: note = Ancestral polymorphism is A, Derived polymorphism is T
  VARIANT 108: note = Ancestral polymorphism is S, Derived polymorphism is C
MLRFLKARKFDFEKAAQMWANMLQWRKEFGTDTIFEDFEFHELEEVLQYYPHGYHGVDKEGRPVYIELLGKVEPNKLIQITTVERYIKYHVHEFERAFREQFPACSISAKRHRYYNDDIGCPRCGLQKL

SEQ ID NO: 530 - protein, 209 aa, Zea mays
  VARIANT 7: note = Ancestral polymorphism is T, Derived polymorphism is N
  VARIANT 32..209: note = Derived polymorphism lacks residues 32 to 209
  VARIANT 97: note = Ancestral polymorphism is P, Derived polymorphism is L
  VARIANT 108: note = Ancestral polymorphism is R, Derived polymorphism is C
MTMIEKTGRGVVVYLRGHEGRGIGLGHKLQAYNLQDDGRDTVEANLELGLPADSREYGIGAQILRHLGARTMRLMTNNPAKYTGLKGYGLSVLGRVPLLTPITTENRRYMETKRLKMGHVYGSRSSNHANGSGLADVIGRSSAVSSPPDLRRPPVAVAAERRPASMSATSQQTQGQASWHRIAADHADRSLSVAPMMYQDPLSMIDDYR

SEQ ID NO: 531 - protein, 178 aa, Zea mays
  VARIANT 108: note = Ancestral polymorphism is G, Derived polymorphism is D
MAASRSALITLLVLVSSVAAASATTFTVGDSSGWSRSVNYDNWASGKTFTDGDQLVFNFATGNHDVVEVDKSGYDGCSTTNAANTIQNGPATVNLTSGTHYYICGISGHCSGGMKLAVTVGSGSGSGSGSPTPGGGSPSTPTPTTPSAPAPDTPAGASVRLTAGPALAVAATVLVALF

SEQ ID NO: 532 - protein, 275 aa, Zea mays
  VARIANT 95: note = Ancestral polymorphism is G, Derived polymorphism is S
MALALPLARLVPACQCQPWPHLRFRKRHVSFAAHASSRAAFAACAAAPALQVQAPEAEAEAETVEQVGPKTRLVAQNIPWDCTADEMRALFESHGSVVGVELSMYSANKNRGLAFVTMGSEEEALAALTHLNSTILNDRKIKVDFARPRKKQPKQPAVVSDDTEKYVVFVGNLTWRVRNRHLRELFASAPGVVSAEVIFHTTTPRRSAGYAFVSFSSKESAGAAISAFNGKILMGRPINVMFKDENGEKNEPSSVPKKAEVEPSDDQSDKLSMNC

SEQ ID NO: 533 - protein, 200 aa, Zea mays
  VARIANT 42: note = Ancestral polymorphism is G, Derived polymorphism is S
MQPIGPTPAPAAQQDPRRVLFLLKGENPPTVDGTDLGDIDSGWVILKNSDVVSADLAAAAVCGGQRLGSSTIPSWARWVLGGVVYTLVPFYNRVRHLEDETVGFVENAVEVVEHLAEVTEKLAANVAKQLPEDGSLQKAVEEVEHIAEVVDDDAEKVEAVTEKIDKVSDEIDAAVEPVIAELEKELDQSTTSDDGVDTKN

SEQ ID NO: 534 - protein, 216 aa, Zea mays
  VARIANT 177: note = Ancestral polymorphism is Q, Derived polymorphism is L
  VARIANT 126..216: note = Derived polymorphism lacks residues 126 to 216
  VARIANT 121: note = Ancestral polymorphism is P, Derived polymorphism is L
  VARIANT 98: note = Ancestral polymorphism is H, Derived polymorphism is Q
  VARIANT 94: note = Ancestral polymorphism is Q, Derived polymorphism is H
MALEAVVFSEGLFGCWTMAAPAENVSGGGMDLEGGTTAALMMQGANNAAGTDFVAHHQIAAAAEIPSPLPLPAAARRKRRRTRNAKNRQEVESQRMTHIAVERNRRKQMNEYLAVLRSLMPPSYAQRGDQASIIGGAINYAKELEQLLQPSAVADIEVTMVESHANLKVLSRRRPRQVLRMVAGLQGHRLAVLHLNVTSAGPMALYSLSLKVRYSC

SEQ ID NO: 535 - protein, 262 aa, Zea mays
  VARIANT 1: note = Ancestral polymorphism is M, Derived polymorphism is T
  VARIANT 118: note = Ancestral polymorphism is L, Derived polymorphism is P
MALPPHIMALSKVQRLYDACDVVFSSPPVAPTLGDITWLQNILDGVEAADVGIDDGEKPTSSSSSSDDDLLLPAPAFTRITYVHIHQCDDFSIGVFCFPAGATLPLHDHPEMVVLSKLLYGSVRVRSYDWVAAPPDNSPSPPRRRKRGLARVVAADVVRRAPCPASVLFPRSGGNLHAFTAVTPCAILDVLTPPYSEDHGRPSTYFTDVPVPSLPGFAVLEETDLPEGFTVAGAPYLGPQLTVDTEDDDDDNYDSYDDELVV

SEQ ID NO: 536 - protein, 825 aa, Zea mays
  VARIANT 597..825: note = Derived polymorphism lacks residues 597 to 825
MLAARTPVSLSLHHRIVAGGHRGRCVGGSQRRRGGAPCRQFTQALQSLWRHSPPIPPPAPPAAGAATSGEAEPSRQPPVLENAAFEEYYKVQQIVREEEWDAFMSVLRKPLPATFRINACCQFYKDICSKLENEFRRSLESEVSDMHGEDAITPLPWYPCSLAWHLNFSRKELRKNQALESFHEFLKHESEVGNITRQEAVSMVPPLFLNVQPDHHILDMCAAPGSKTFQLLEMIHQSKELGLLPGALVIANDLNMRRCDLLIHNTKRMCTANLIVTNHGAENFPYCSLAKDCSGSYKDPCKLQKLEFDRILCDVPCSGDGTIRKGHDMWRKWNSGMGNQLHLLQVNIAMRGIALLKVGGRMVYSTCSLNPVENEAVIAELLRRSGNSVELLDVSSELPELVRRPGLSTWKVQDRESWFQSHDEVPHNRKNVVFPSMFPASNSTEESHTVCGDVEVNINNMNSFSRNINIEETSKLNQDMDGVSVSPTKILECTSNIVSSKFPLHRCMRIVPHDQNSGAFFIAVLHKLSPLNGSQIKDTKIQHRLGTDRTIQFQKEPKPETRPYETTLTRRQHNVSEVDDTEVLGRGQKLGTDSQTSKDKNSSEVEIVSILAESGDRMELQKQSRWEGVDPVLVLNDEAVIKSIQSFFGIKESFPLEGHLVTRSPDNARRIYYVSKSVKEILELNSKVGGQLKIASLGVKMFERHRSKDPCPCAYRLSYDGLSLVLPSISKRILYASALEFHRLVQYRSISFAHFTDTRFGEQAASLTPGCCVVVLLEGNRRVDSICKDPSTIAVVCWRGKGTINVMVSPSDRKDLLERMAYRFG

SEQ ID NO: 537 - protein, 319 aa, Zea mays
  VARIANT 86: note = Ancestral polymorphism is R, Derived polymorphism is H
MAEEPPPPPLARKSAPAQPWSHVETTHLIDAYEERWTALRRGQLKAHQWEEVAAEVAARCAATPGVVAQRKTGTQCRHKLEKLRKRYRTEGARPVTSLWPYFRRMDRLERGPLAVASSAYPAATGSPPAADGDEEGEEEEEEVEEEEEEEDVQEENEEEEELAPRNNNTRSINGIIREFGTGLAPRHPQLQLHPPPPSITPSIAPPRKRVAYEAFQAKAAAAAVKAKDDEEEAMEMARRRGSSGRPVAQLSAVLRDFGEGVMRLERRRMEVQWEIERGWQEADARHARMLQDAQRQLRDTVAGACALPPKKARRDHGDS

SEQ ID NO: 538 - protein, 338 aa, Zea mays
  VARIANT 63: note = Ancestral polymorphism is R, Derived polymorphism is G
  VARIANT 138: note = Ancestral polymorphism is I, Derived polymorphism is N
  VARIANT 140: note = Ancestral polymorphism is V, Derived polymorphism is D
  VARIANT 141..338: note = Derived polymorphism lacks residues 141 to 338
  VARIANT 172: note = Ancestral polymorphism is P, Derived polymorphism is L
MAMPSGWRGILGFHYGIVQAPLGPDISGPELVAAVANAGAIGLLRLPDWPAPDHVRELIRKTRSLTSKPFGAAIVLAFPHEENLRVVLEEKLAVLQVYWGDFPNHRVQEAHRAGVKVLHQVGSLEEAAKAKEAGVDGIIVQGREAGGHVIGQEGLFPLLPRVVDLVSDSSIPVIAAGGIVDGRGYVAALALGAQGVCLGTRFVATEESFAHPIYKQKLIEMSHTDYTNIFGRARWPDAPQRVLETPFYDEWKNNFPDQETEEDQPIIGHSIIHGVHKDIRRFAGTVPNATATGDIDIMAMYSGQGVGLITEIIPAAQVVKSLVAEAKEVIREKLSGYQ

SEQ ID NO: 539 - protein, 264 aa, Zea mays
  VARIANT 107: note = Ancestral polymorphism is A, Derived polymorphism is V
MHLNSYTECLRMPYKKLCLRSSENFALLVIAIGSAECAHSSSQQQQADPSFQDIPTQSWYPPSVVGSSSRPSTPTSSSASLHQRASDSPQSSSRGQPSPAEAAGIIARLKDKSIEELQRLLKDREAYNAFFNSLDQVKTQNNVRDELKKETLQLARENLEKEQRILELRNQCTIIRTTELAAAQDRLTDLERQKDDIMRSYSPAALLNKLQTSMAKLDEESEELHQKFLEKDIDLPTFVQKYKKLRTAYHKQALLHLAGQTSLR

SEQ ID NO: 540 - protein, 314 aa, Zea mays
  VARIANT 64: note = Ancestral polymorphism is D, Derived polymorphism is G
MGRSPCCDENGLKKGPWTQEEDEKLLHYIQKNGHGSWRTLPRLAGLNRCGKSCRLRWTNYLRPDIKRGKFSREEEQTILHLHSVLGNKWSAIATHLPGRTDNEIKNFWNTHLRKRLIQMGFDPMTHRPRTDFFAALPQLIALAALRGQLPADPDPPQQAGTTAAALAGLIGALCSPQLTLLDTTTTTTAAAAPPVVSSSSADDDAAHQYYLPRTTFPDAPGSGEAAHQRQQQAAGLISYGRRPDDDDGGDVDVFACYGAGGGGSSLPPLTDLSDDAATLLQVDTASSQFGSGGSIPLLPWPEFFPDDPFITDFL

SEQ ID NO: 541 - protein, 289 aa, Zea mays
  VARIANT 21: note = Ancestral polymorphism is T, Derived polymorphism is A
MASSSIHIHHPRLAGDEIHRTLEASYSPSASYCSDDAFVPVFRPDPSAPSVSASASADRVRSLFRSVDVALFRDTLFAPGRGGDGDGDDLGFTDADAEAAEYDGDLTSIFWDCLQIEDADDPLAASPAEEFEWEEVASPSGAAGEAPEPEWEVLADVPPAAAEEGFVYTSHHRGRDEEEEEAAAYEVLVAGGEGLFLKTKPPAARSAVEALPSAVVAAGQEGQGDECAVCKDGVAVGQRVKRLPCSHRYHDGCIVPWLQVRNSCPLCRFELPTDDPEYESWKAGRTDAA

SEQ ID NO: 542 - protein, 138 aa, Zea mays
  VARIANT 42: note = Ancestral polymorphism is V, Derived polymorphism is A
  VARIANT 14: note = Ancestral polymorphism is C, Derived polymorphism is S
  VARIANT 11: note = Ancestral polymorphism is T, Derived polymorphism is N
  VARIANT 1: note = Ancestral polymorphism is M, Derived polymorphism is I
MIFLVAIGSDTGVCMTKYELLKDCLGSIAQSGTSKFLKALKVHHHTFLYNCIYEYGIWKTKTLGADNGLIGQFGVGFYSAFLVAGKVVVSTKSPKSDKQYVWEAVADSSSYVIKEETDPKKMLIRGTQITLFVRPDEY

SEQ ID NO: 543 - protein, 257 aa, Zea mays
  VARIANT 111..257: note = Derived polymorphism lacks residues 111 to 257
  VARIANT 76: note = Ancestral polymorphism is S, Derived polymorphism is L
MATPIRPAAAAPPAPARPPQPMPPPPPPHHDTTLTLSLALPPPPPPSPFARARGVAPRPAPRPPDVVVARPAAVRSSPPAGGTPPCSECGKRFSSWKALFGHMRCHPERQWRGMTPPPHFWHQFTVQERETATSLLMLRGDRPAGAAGSRGRKSTLGAAGTSASSSLPRCECDDHKCSVCVRGGFATGRALGGHKRCHWEKTEGAPPAVATCSGDGFSASSSQAAPATTLDLNLPLLPRKSDQDGSLDATLDLKLGF

SEQ ID NO: 544 - protein, 295 aa, Zea mays
  VARIANT 195..295: note = Derived polymorphism lacks residues 195 to 295
  VARIANT 226..295: note = Derived polymorphism lacks residues 226 to 295
MVGNSVMWQHLEVEDLLLYHKEKILLYYKEKIHESGRAFVLREVHHEECARRLNEKYGANFTWKQTYNKYHKLKGEWKVIMEAKSARGAGFDDVQKKITYDEIEVVKMKAKGDKKAKYYNVPIPLYDEMEFVFTGKHATGEFSVIEAPFDRSGRQEDDAVGNVNLDQEPADLNGDSSQHDFDTLAESDSPNPVGSKRRHEEKEKEKEKEWKWARQGVPIFMQALSEAVSFTHGGTDPYEGIYKAIEDMDEYPLPARLDLLTYLAQNRHIASMLKGRQEETFKQWVARWVAGHYPL

SEQ ID NO: 545 - protein, 596 aa, Zea mays
  VARIANT 142..596: note = Derived polymorphism lacks residues 142 to 596
MDPAGDPAFHRNEAISAVQDVDQYYGDDDDFDDLYNDVNVGDGFLHASHQAPPPRPPTQQAPPPQQLHPPPQQQPPPPPQQQPPAHTLPPPPPHVPPPPQQVRIPGVAVPAPGIPPGQTNLHPPPQPLAAPAPPPAQHHQIQQGDGFHRSGGNFAGGPIVVGNGGAAGGGDGPGGTTLFVGELHWWTTDADLESELIKYGSVKEVRFFDEKASGKSKGYCQVDFYDPGAAAACKEAMNGHTFNGRPCVVAFATPNSVRRMGEAQVKNQQAMAAQTSNMQPKGGRGGGGAAGPQVGGNYGGGRGGAVGSGAGGGAGGGGGNWGRGGGGMGNRGPVGNMRNRMGPAGGGRGIMGNGGMVAPPPPMMPPGGMLGQGFDPAGYGAMGRMGGGFGGFPGGPGAMPFPGLMQPFPPVVAPHVNPAFFGRAGMGAGGMWPDPNMGAWGGEEQSSYGDDAASDQQYGEGGSHGKERPPEREWSGVPERRREREKDAPPAQEWPERRHRDERDMDRERNRDYDRDRERDRDRERDRDRDRERERERDRDRERERHKDDRDRYGDNHRHRDRDSERNEDWDRGRSSGIRSRSREADHSKRRRMTPQ

SEQ ID NO: 546 - protein, 72 aa, Zea mays
  VARIANT 2: note = Ancestral polymorphism is A, Derived polymorphism is V
MARACVFLVVLLLAAIAVAPFAGAARVDVVEGRSMASADAPEAAADAPAPSPDSASSPDSSSEAPSSSSSSD

SEQ ID NO: 547 - protein, 431 aa, Zea mays
  VARIANT 3: note = Ancestral polymorphism is T, Derived polymorphism is I
  VARIANT 7: note = Ancestral polymorphism is T, Derived polymorphism is I
MATTTTTILLLLLVAATAVSAADLSVYHNVHPPSPSPLESIIALARADDARLLFLSSKAASSGGVTSAPVASGQTPPSYVVRAGLGTPVQQLLLALDTSADATWSHCAPCDTCPAGSRFIPASSSSYASLPCASDWCPLFEGQPCPANQDASAPLPACAFSKPFADTSFQASLGSDTLRLGKDAIAGYAFGCVGAVAGPTTNLPKQGLLGLGRGPMSLLSQTGSRYNGVFSYCLPSYRSYYFSGSLRLGAAGQPRNVRYTPLLTNPHRPSLYYVNVTGLSVGRTWVKVPAGSFAFDPATGAGTVIDSGTVITRWTAPVYAALREEFRRQVAAPSGYTSLGAFDTCFNTDEVAAGGAPPVTLHMDGGVDLTLPMENTLIHSSATPLACLAMAEAPQNVNAVVNVVANLQQQNVRVVVDVAGSRVGFAREPCN

SEQ ID NO: 548 - protein, 755 aa, Zea mays
  VARIANT 171..755: note = Derived polymorphism lacks residues 171 to 755
MEPVEPQQQVELNRLNASSRPGTNGGKKEEEVDDCPIEEVRLTVPITDDPALPALTFRTWFLGLLSCALLAFSNQFFGYRQNPLYISSLSVQIVVLPLGKLMAACLPTKAVRVMGRSFSLNPGPFNLKEHVLITIFANTGSNSVYAVGIITIVKAFYHREIHPLAAMLLTQTTQLMGYGWAGLFRKFLVDSPYMWWPANLVQVSLFRALHERETRRPRGGTTRLQFFLTVLATSFAYYIVPNYLFPTISTVSVACLVWRRSVTAQQIGSGVYGLGVGAFGLDWATVAGFLGTPLSTPAFAIANIMAGFFLIVYVIVPFAYWSDAYGARRFPIISSHVFMANGSRYDVNRVLGAGTFQFSQAGYDGAGQIHLSIFFAFSYGLSFATLAATLSHVALYHGRSIWEQTRATVRAAGGDVHARLMRRNYAAVPQWWFQVLLLLVLGLSLFTCEGFGRQLQLPYWGVLLAAGLAFFFTLPIGIITATTNQQPGLNVVTELIIGYLYPGRPLANVAFKTYGYISMSQAIMFLQDFKLGHYMKIPPRSMFAVQLVGTVLASSVYFATSWWLLESVPGICDPARLPEGSPWTCPGDDVFFNASIIWGVVGPLRMFGRLGLYAKMNYFFLAGALAPVPFWALARAFPDSAWAPWLRLVNMPVLLGATGMMPPARSVNYLMWGAVGLAFNYVVYRRYKAWWARHNYVLSAGLDAGVAFMGILSYAVLQSRGVNGIDWWGLQVDDHCALARCPTAPGVRAPGCPVH

SEQ ID NO: 549 - protein, 179 aa, Zea mays
  VARIANT 134: note = Ancestral polymorphism is I, Derived polymorphism is T
  VARIANT 107: note = Ancestral polymorphism is P, Derived polymorphism is L
  VARIANT 83: note = Ancestral polymorphism is G, Derived polymorphism is W
  VARIANT 57: note = Ancestral polymorphism is Y, Derived polymorphism is C
  VARIANT 15..179: note = Derived polymorphism lacks residues 15 to 179
  VARIANT 6: note = Ancestral polymorphism is G, Derived polymorphism is S
MIDLASSKVEIKKAEPKKSSNAPPPPPLYGRNARLAYDSGSRDHPSANNYGGMPNAYANYRGGGFGPYRSDTGFGGRLGNYGGTGDFGSTYGRYYAGLGGYGATTVLSFDYHNRFGLYGGGFGGAYAGADLVATGVVAVMRASVPLVILGLVVMLMKALVALVILALVSPPMVVHMIIH

SEQ ID NO: 550 - protein, 177 aa, Zea mays
  VARIANT 74: note = Ancestral polymorphism is S, Derived polymorphism is Y
  VARIANT 49: note = Ancestral polymorphism is A, Derived polymorphism is V
  VARIANT 45: note = Ancestral polymorphism is G, Derived polymorphism is D
MPLPAPFRVFSPPTSAAASPAGAQRALLYGRRAPFAGALLFFSIGAVSAAVAFRTGARGLSSTRMESASTTVPSIVVYVTVPNREAGKKLSQSIISEKLAACVNIVPGIESVYWWEGKVQSDAEELLIIKTRESLLDALTAHVKANHEYDVPEVIALPITGGNTKYLEWIKNSTRDK

SEQ ID NO: 551 - protein, 310 aa, Zea mays
  VARIANT 37: note = Ancestral polymorphism is N, Derived polymorphism is K
  VARIANT 143: note = Ancestral polymorphism is A, Derived polymorphism is V
  VARIANT 212: note = Ancestral polymorphism is R, Derived polymorphism is C
  VARIANT 213: note = Ancestral polymorphism is V, Derived polymorphism is M
  VARIANT 216: note = Ancestral polymorphism is R, Derived polymorphism is S
  VARIANT 218: note = Ancestral polymorphism is A, Derived polymorphism is T
MDSCMQALRHRHPSRQRLSDAHEPQPAATVLWWLKLKSVLTKVTAKPQSRRQSASSMNEITWPCARCVPSKQAVSANCNALAPCRCLCRYGDDAGARPLERRLHVVDEVVAEDATVLHRRLLRQGPTHARKDVHLASLRARLAQQGKAGVALRLLLAAALAGFLLVFAARTLVTSPVPSSPSCLLEPQPLVHYATSNATPQQTAEEIRVALRVLQRRTPCNFLVFGLGLDSPMWAALNHGGRTVFLEEDAAWIGSVRGRHPALESHHVAYDTALADADALLGLRTHPACVAQPDRRGVRRERREPRRVCE

SEQ ID NO: 552 - protein, 1069 aa, Zea mays
  VARIANT 726..1069: note = Derived polymorphism lacks residues 726 to 1069
  VARIANT 862..1069: note = Derived polymorphism lacks residues 862 to 1069
  VARIANT 873..1069: note = Derived polymorphism lacks residues 873 to 1069
  VARIANT 938..1069: note = Derived polymorphism lacks residues 938 to 1069
  VARIANT 944..1069: note = Derived polymorphism lacks residues 944 to 1069
  VARIANT 955..1069: note = Derived polymorphism lacks residues 955 to 1069
MRLSVRVIEARNLRAMDSNGFSDPYVKLQLGKQRFKTKVIKMNLNPTWDQEFSFLVGDIKDVLKLDVYDEDILQMDDFLGHLRVPLEDVLSADDLSLGTRWYQLLPKGKTNKTVDCGEICVSISLESSGASRSWSEDLGDEITDIQRDYSLSSQNTAPSISFAYRETEICEEDDEYSVTSEIHAEDRSSEVTDRNQAAAEDKPNGNSSADLNGTETSSGETDKSDKLSFVDRVYQIFAKKNGDTMPTSSGSSEALEEVQEEASGCELLVSQIDNVCPETPFSELLRSLELRHEGVDMPVNLQGILVNQSYLASPSDLNNLLFSPDSDFKQTMVELQGCTDFKTEPWRLDNGGESLKRVVTYTTAPSKLVKAVHATEEQSYLKADGKEYAVLLSVSTPDVPCGTYFRTEILFRIMPGPELDSQQQTSHLVISWRMNFLQSTMIKSMIENGARQGLEQNYAQFSDLLSQKIKPIDVEGSGSDKEQVLASLQGGEESDWKIAFLYFCNFGVLSSFFVSLYIILHVLRVNPSAVQGLEFPGLDLPDSLSEIIMGGLLFLQVQRILKNITCFLQAREQKGGDHGMKAKGDGWLLTVALIDGIKLAPVDATGLSDPYVVFTCNGKTRTSSIKFQTLEPQWNEIFEFDAMDDPPSVMSVHVYDFDGPFDEVTSLGHAEINFVKSNLSELADVWIPLKGNLAQSWQSKLHLRIFLNNSKGTGMVTEYLSKMEKEVGKKMTLRSPRTNTAFQELFSLPAEEFLISSFTCYLKRKLPTQGQVFLSPRTIGFYSSMFGRKTKFYFLWEDIEDIQGIPQSISSWSPSIIITLHKGRGMDTKHGAKSMDNGKLKFCLQSFASFSVANRTIMALWKARSLSTELKVQLAEEQSQINTLQSEDSGVFVGIEDAKSLQMTEVFSSTISTNMASLMEVFAGGSLEMKVMDKVGCQKYSATQWESDKPNEYQRQIHYKFSKKLSPVGGEVTGTQQKSLMPNKKGWVIEEVMELQGVLLGDFFTLHIKYQVEDLAPKQRASNVQVSLGIEWSKSTRHQKRIEKNVLSSSSARLKEMFNLASRELSHAR

SEQ ID NO: 553 - protein, 146 aa, Zea mays
  VARIANT 59: note = Ancestral polymorphism is V, Derived polymorphism is D
MGISSMPAPEDSLLGFVLYNTAASVAILAGLVRAALLFLGLAAAAEDEEPRQQAEAVTVTAVGPSLADRFRSRFRPSRYGRRRGGDCRVCLVRFETESVVQRLPCGHLFHRACLETWIDYDHATCPLCRHRLLPPAAAADEVPRIA

SEQ ID NO: 554 - protein, 269 aa, Zea mays
  VARIANT 239: note = Ancestral polymorphism is G, Derived polymorphism is C
  VARIANT 237: note = Ancestral polymorphism is G, Derived polymorphism is R
  VARIANT 208: note = Ancestral polymorphism is Q, Derived polymorphism is L
  VARIANT 206: note = Ancestral polymorphism is P, Derived polymorphism is L
  VARIANT 186..269: note = Derived polymorphism lacks residues 186 to 269
  VARIANT 180: note = Ancestral polymorphism is A, Derived polymorphism is V
  VARIANT 108: note = Ancestral polymorphism is I, Derived polymorphism is T
MGAPYHLQSPRTIITKVMSMKQLPPALPQLPPPPVDQSEVTEQTPVLPRSQPVDPPTITRQPQAPRQPARAPSKVILQPRQRTSPAMWCAAIACFAFSILLIVAGVVTLVVFLAVKPRPPSFDAANAILNSVYVDSPAPYFNNDMTLVANISNPNREIDLVFRSATVELFFQDRPMAVQALPPFAQRRGQSQLLNMHLLSSRVLLPPQVAVKMVDQVRSNRVVYTIRGAFKVEARFRFGHYSYWMYTVCQLELTAPPSGVLVARRCTTK

SEQ ID NO: 555 - protein, 775 aa, Zea mays
  VARIANT 234..775: note = Derived polymorphism lacks residues 234 to 775
MEHRAAAPDVIVQVNSAAVAAVDERISTCQITEEEGGIVGHEQVPVGCLARRTFSQSYRTRPRNPLEFTGWQLALLAYQSLGVVYGDIGTSPLYTFSSFALPDPGTADILGILSLILWTLTLVSLVKYVFIVLHADDHGEGGTFALYSLLRQHVNFSGKSVPVPVTRLASDANLRFHSRKSSQQPRMLEFLEGSAMAQAVITYLVLVGTCMVMGDGALTPSISGIHFIVVVIGSLLYFNKSCQQFKGSSQDLLASNKGKQQQQQQRIIIHVLFISGHVVLLCVVILVILFLFQQYGTSKVGFTFSPIMLVWFALIASTGLYNIIKHYPPVLKAISPHYIYLFFARNKRAGWEQFGTVVLCITGAEAMFADLGHFNKKSIQMAYSCLVYPSLILAYAGQAAFLIKNPSKLSTTFYSSVPEPLFWPVFVVATLAAIVASQALISASFSIVRQSVALGCFPRVTMKHTSKKYEGRVYSPEINYFLMVACILITVGFKGGPEIGQAYGVAVIWVMLITTHLITVVMVIIWQLHSAIAWSFYVIFAAIEGLMTISLLYKIAQGGWVPFAITAFFLIITLSWTYGRSKKQEYEVSNLMDRQEFIKTVNTSNRVPGICIFCTDLMNGIPPIVRHYVEHMGCLRELMVFVTVRHLPVTSVLPEERFLFDRLEPFGVYRCIVQYGYMDTQNMEDDEYVVSIVASLKEIAQSGAEILMMDSALANGTTFVLGRVILNMSPQRNNCFKRFVINNLYRFLQKNFRSNISSLKIAPSKTLQVGMQYEI

SEQ ID NO: 556 - protein, 107 aa, Zea mays
  VARIANT 63: note = Ancestral polymorphism is T, Derived polymorphism is I
  VARIANT 78: note = Ancestral polymorphism is R, Derived polymorphism is S
MFQRKNTKTTKKGEETMEARIKDITCSRGLFEAELGVPGGAEQIMSQLKNKKTTKKGEETTVTKIKDITCSPKTKMIRHGQSLFLDQTKVSKAVGFCYDDTCGSDQL

SEQ ID NO: 557 - protein, 804 aa, Zea mays
  VARIANT 564: note = Ancestral polymorphism is Y, Derived polymorphism is N
  VARIANT 604..804: note = Derived polymorphism lacks residues 604 to 804
MTVGAGIAVQDGSLLALGAKVLREVRGNVLVTPAAGGGLTNGAFLGVRSAPAASRSIFPVGKLRDQRFVCTFRFKMWWMTQRMGSAGRDIPSETQFLLVEVSGGGEQPAVVYTVFLPVLEGSFRAVLQGNADDELEICLESGDPDVESFQGSHLVFVGAGSDPFEVITSSVKAVERHLQTFSHREKKKMPDILNWFGWCTWDAFYTNVTAQGVKQGLQSLEKGGVSPRFVIIDDGWQSVAMDPVGIACLSDNSANFANRLTHIRENHKFQKNGREGHREDDPAKGLAHVVNEIKGKHQLKYVYVWHAITGYWGGVRPGAAGMEHYGSKMQRPVPSPGVQKNERCEALDSMTANGLGLVNLDRAFSFYDELHSSKRSAVIRASDDFWPRDPASHTIHVASVAYNTVFLGEFMQPDWDMFHSVHPMAEYHAAARAVGGCAIYVSDKPGSHDFNLLKKLVLPDGSILRAKLPGRPTRDCLFSDPARDGKSVLKIWNLNEHSGVVGAFNCQGAGWCRVAKKNLIHDQQPGTVSGVIRAQDVEHLARVADHGWNGDVVVYSHVGGEVVYLPKNALLPVTLRSREYECSQDMEPERTLRHRWRLQLSRHWLVPGSQEVPHPRPPAQNGEVVYLPKNTLLPVTLRSREYEVFTVVPLKHLPNGVSFAEIGLLGMFNSSGAVRELRFSGEVVYLPKNALLPVTLRSREYEVFTVVPLKHLPNDASFAAIGLLGMFNSGGAVRELRFSGEDADVELRVRGSGTVGAYSSTKPTCVAVDSKAVGFSYDGTSGLISFELGIPDQEMYLWTVTVGY

SEQ ID NO: 558 - protein, 103 aa, Zea mays
  VARIANT 52..103: note = Derived polymorphism lacks residues 52 to 103
  VARIANT 49: note = Ancestral polymorphism is R, Derived polymorphism is W
  VARIANT 36: note = Ancestral polymorphism is S, Derived polymorphism is F
MNAEEASARESSDESSLSARSSVPSARASCSSRDQSVERLLEADAALAWKKCVEKSVLAPRTLPGNRSSGTARSWSWSWSRVLVLEHCTRSKSAWLVKSPSPK

SEQ ID NO: 559 - protein, 194 aa, Zea mays
  VARIANT 2: note = Ancestral polymorphism is G, Derived polymorphism is D
  VARIANT 14: note = Ancestral polymorphism is R, Derived polymorphism is G
MGSRVAAALIRRGRYLASSLLTPRLPRSALAPAPPHRVGSASSSCGGGGGGSCLLPPRSGPAGAFSYASRFGNFHAFRSLAPKAMFGQCTRRMSTTATALNSTVASGAANSGFKLLVTKGAHVQKAVGIWLFGCAAWVFSLVILGGITRLTRSGLSMTDWKFTGEIPPMTDEAWQLEFEKYKQSPEYKRQGCNR

SEQ ID NO: 560 - protein, 200 aa, Zea mays
  VARIANT 31: note = Ancestral polymorphism is G, Derived polymorphism is R
MEPKSTTPPPPPVMGAPIAYPPPPGAAYPAGPYVHAPAAALYPPPPLPPAPPSSQQGAAAAHQQQLFWAEQYREIEATTDFKNHNLPLARIKKIMKADEDVRMIAAEAPVVFSRACEMFILELTHRGWAHAEENKRRTLQKSDIAAAVARTEVFDFLVDIVPRDEAKDADSAAMGAAGIPHPAAGLPAADPMGYYYVQPQ

SEQ ID NO: 561 - protein, 234 aa, Zea mays
  VARIANT 152: note = Ancestral polymorphism is A, Derived polymorphism is T
  VARIANT 80: note = Ancestral polymorphism is A, Derived polymorphism is T
  VARIANT 76: note = Ancestral polymorphism is R, Derived polymorphism is L
MAEPAKNEAHVVEIPVAVDGGEASGGEEAFLDKAAAAGEGHPLGEIAASEGHLLLLKLWQREEDRLGRRACALEARMDAARRDAFYLCAAFLAFHGLSLALLFAASVVAAAATSPSAACRRWWAPSSLSLAASLALAAAVQLRVGAYWRAAARLRRDRGDARALARAVQELRLKGAAFDLSKEPQYGVTRAKCASVEGAGLWAPLRWFRQNVVTACLLAVAAAALPSGKFILCA

SEQ ID NO: 562 - protein, 484 aa, Zea mays
  VARIANT 17: note = Ancestral polymorphism is A, Derived polymorphism is S
  VARIANT 312: note = Ancestral polymorphism is G, Derived polymorphism is D
MARFASAVLFAAVLLMAGRLTHAGPSTAEVLWRRAVLPGSAVPNAVLRLLRPYSHFVSEANAEDTGRSNAPFNYQNYKRSSATATSPPGDRSEAGLAGGSGARDDTPFSYSYRAPSQQGVPASGGARDDTPFSYSYRAPSQQEVPASGGARDDTPFSYSYRAPSQQEVPASGGARDDTPFSYSYRAPSQGVPASGVSRDDTTFSYDDYKARSQAVAGSGPRDDQFSYDYSAYEAPIEHHHSEVRATARSGGVGTPTPHTAVFFHEEAVRVGERLPLHFQAAAPAALGFLPRRAADSIPFTTAALPAVLALFGVAPSSSRAAAMAETLRTCERPPPAGEAGARFCATSLEALVERAVAALGTRDIRAVTSALPRAGLPPQAYAVRAVRRVGGGPSFVACHDEAYPYTVYRCHDTGPARAYLVEMEGARGGGAITVATVCHTDTSRWNPEHVSFKLLGTKPGGAPVCHLMPYGHIIWAKNVKPSPA

SEQ ID NO: 563 - protein, 450 aa, Zea mays
  VARIANT 135..450: note = Ancestral polymorphism lacks residues 135 to 450
MSQRDGDLAAGAHPEEGDRHAVRMDGSDDELDQPTSKATEHITAMDVRKGKDMQGIPWNVMPTTRDKYRQSRLQGYANFENVPNSGRLSEKACHSYAFQIRMHACRERPTLLRVSAQHEVGETDHPSFPGEPWFSLRNLVWATTRHDVYLMSNFSVLHWSAMTYKKQEVINLQGHVTPCEKHHRNHYEGFYQTPVSTLAVKHNLLVTGGFHGEIICKFLDRQGVSYCCKTTNDDDGITNSLEIFEKPSGSLHFLASNNDCGLRDFDMEKFRICNHFHFAWPVNHTSLSPDGKLAAIVGDSPDGLLIDANSGKTVHKLHGHLDYSFASAWNPDGRTFATGNQDKTCRVWDVRNLSRSVVVLGGNIGAVRSIRYTPDGKFMAMTEPADFIHIFDVESGYSRKQELDFFGEIAGISFSPDTEALFVGVHDRFFNCCLLQFSRRRFYSYLDSTL

SEQ ID NO: 564 - protein, 645 aa, Zea mays
  VARIANT 435..645: note = Derived polymorphism lacks residues 435 to 645
  VARIANT 247: note = Ancestral polymorphism is I, Derived polymorphism is M
  VARIANT 120: note = Ancestral polymorphism is P, Derived polymorphism is S
  VARIANT 110: note = Ancestral polymorphism is R, Derived polymorphism is W
MQLPPQGLEEAATFFTTVAAVRGSVRERDVPESAAAKMSVSHAEDIEISLCDGNSEDERRRRKIGSLRRKAIHALKKRGRRRVDFRFPPAAISIEDVRDAEEERAVASFRDRLAAHGFLPDKHDDYHMMLRFLKARKFEADKAMQMWSEMLKWRKEFGTDTILEDFDFAELDDVLRYYPQGYHGVDREGRPVYIERLGKVDPNKLMQITSVDRYIKYHVQEFERAFRERFPACTLAAKRHIDSTTTILDVQGVGFKNFSKTARELVHRMQKIDSDYYPETLHQMFVVNAGSGFKWIWNSVKGFLDPKTSSKIHVLGSNYQSRLLEVMDSSELPEFLGGSCTCSDKGGCLGSNKGPWNDPYILKLIHNLEAGCAREIKPVSEGEERNSSSFRLEQMKWQGLLSDTSNAESGSDVDDFGASFVHKVSDYGCLTPVHEEVKGTDRVTYFSYDDQSHPDMAPESYHGARRATGMEHHKPMADFSQYSANRRPGDSALNVNGTAAQSGWENVVKLVVTTLVKLFYFIRLFLSTAERRLESIHRPAPPAAPAAAEEPRPRAISDEEVCACLQRLDNLESMCSHLAAKPPQIPEDKELILLSSFERIRSVEADLERTKRVLNATVVKQKALVETLESVQESSSRVKKRMFCS

SEQ ID NO: 565 - protein, 459 aa, Zea mays
  VARIANT 98: note = Ancestral polymorphism is V, Derived polymorphism is A
  VARIANT 166: note = Ancestral polymorphism is R, Derived polymorphism is K
  VARIANT 192: note = Ancestral polymorphism is C, Derived polymorphism is R
  VARIANT 193: note = Ancestral polymorphism is P, Derived polymorphism is L
  VARIANT 251: note = Ancestral polymorphism is A, Derived polymorphism is T
  VARIANT 258: note = Ancestral polymorphism is M, Derived polymorphism is T
  VARIANT 300: note = Ancestral polymorphism is P, Derived polymorphism is L
MLSLGALRKLCAAFDAVALTVIAAGLSRPPSGRHPFSSAHAHSSHPADFPTIAACRAAISASKGDRRRRPGVGQPSSSPSPSLAAAAAKEEQEQPVLVRIKHERDPERLYQLFRANAHNRLLVENRFAFEDAVARLAGARRNDLVEEILEQHKALPQGRREGFVVRIIGLYGKAGMPGHALRTFQEMGMYGCPRTAKSLNATMKVLLRARMFDEALSLFEEGPEKYDVEVDDISCNTVVKMFCDMGDLRAAYQVMQGMERAGVRPDVITYTTLMAAFYKCGRREVGDGLWNLMRLRGCVPTLATYNVRIQFLVNRGRGWQANELARKMYVAGIKPDEITYNLIIKGFFMMGEHEMAKTVFGAMHGRGCKPNSKVYQTMVHYLCERRDFDLAFRLCKDSMEKNWFPSVDTINQLLKGLMAISKDRNGKEIMKLVTGRKPSYSDGEMRVFKDILSHRKTGR

SEQ ID NO: 566 - protein, 332 aa, Zea mays
  VARIANT 250: note = Ancestral polymorphism is M, Derived polymorphism is L
  VARIANT 249: note = Ancestral polymorphism is A, Derived polymorphism is V
  VARIANT 183: note = Ancestral polymorphism is P, Derived polymorphism is L
  VARIANT 174: note = Ancestral polymorphism is S, Derived polymorphism is N
  VARIANT 138: note = Ancestral polymorphism is M, Derived polymorphism is I
MSAPSDAAVAAAAPASTTTAAASSGGLTFKLHPLVIVNVSDHHTRVKAQAACSGDSSSPSSSAPGAGQPPRVFGCVIGVQRGRTVEIFNSFELVLDPVSGTLDRAFLDKKQELYKKVFPDFYVLGWYSTGSDVHDTDMLIHKSLMDINESPVYLLLNPTINLSQKDLPVTIYESELHVIDGIPQLIFVRSNYTIETVEAERISVDHVAHLKPSDGGSAATQLAAHLTGIHSAIKMLNSRVRVIHQYLVAMQKGDIPLDNSLLRQVSSLVRRLPAMESQKFQDDFLMEYNDTLLMTYLAMVTKCSSTMNELVEKINTSYERTTSRRGGRGAFM

SEQ ID NO: 567 - protein, 633 aa, Zea mays
  VARIANT 165: note = Ancestral polymorphism is E, Derived polymorphism is K
MGKRPRTTLRRTPARGLPKSKRADELPSMPDSDNDEIDAFHKQRDMIPFDANDVRESEDDDVEQPVFDLKGVSDSESDDSKGELSGDMAEADYEGWDKGYISKLKRAQRAVKQIAGGDDSMDEQEDETQENVWGRGKNAYYAPGEQSGDDEVDYEEAQRIQKNKEKRLSMKDFGLEDGESDEEGNATKVSNHESKMKEDFAVLSGDEKMDVLYSSAPELVSLLSELKDAHEELRAIGQLTSEVTSCLGKDKMQPFEVKKACLLAHCQAITFYLLMKSEGLSVQDHPVISRLIETKNMVEKIKQITLNPVSQKGCADDHSMHCGTIQTDKIVSLDKQEGKFSNVLALDKVKQGAEVSESRKSEPCNNDYHEVNEQKNKDERMGLHSLEMLKVRANLEERLKKKGLYNLTRSKPEKSSKTRTTSDKSGLQTLDDFDDEVLKNNQMMKPSKLVAAAAKSNKSMFVSGDDDLPKRDNIGERRRKHELRVLSRVGANSAEDHELPDGDASEEEDHHELPEGGDESEDDIHRDVKRKRTEKLSTKNALYSPTPGVEHLEEETEGDGKRTISYQILKNRGLTRSRNKKKKNPRKNYRDKHKNKLVKRKGQVRDIKKQSGPYGGETSGINPNVSRSVRFKS

SEQ ID NO: 568 - protein, 740 aa, Zea mays
  VARIANT 661..740: note = Derived polymorphism lacks residues 661 to 740
MALRHLVTGQNNCVPDGASSSNPLNALANAFLGQSSKAQSIKELPGSVNVPSTSDFSVSAPLSNIPGSENEFKQDQRPLARGADFIRGGPANDWIESFRPPRVPQLGVEAQFPDFEQIYNNAGTTFQFQPPLDGPPQRVLSGVLHSFLTSGPAGVPFQPLPVPAALGLSESDKQCIRDRSCIMARHIFSDQPEEYIQSQVNTLLHSLDIDNRMRGPMHGQYPELQEYWKQSQSSTRPAPMHNAADKWITEFGKQNNNPENWANSFEQQYGPNGWASEFEQHQSQMAMRQMGGANMANLAAMEQSRVLAQTLASNNDPKFQNSKFFQFVSKMSRGELIIEDNQVKEGSASQSSGWADEFQTPYIANANSWADQFAHEELSQGADKWVSEFSSQPNHGALNENWVDEFSKLNVTDEWAEEFSGGGFGESSADPWVDEFQEHLSSFKQSPGASRGVYVFSENNPYVGHPNPMQEGQELFRKGLLSEAVLALEAEVLKNPDNTEGWRLLGVTHAENDDDQQAIAAMMRALEANPTNLEVLLALGVSHTNAMDAELEQGEALRYLYRWLQNQPKYGGLVPLQSTDSPYGPDVVRLFNEAAQMSPEDADVHIVLGVLYNLSREYDKAIASFKTALQLKPQDYSLWNKLGATQANSIQSADAILAYQQALDLKPNYVRAWANMGISYANQGLYEDSIRYYVRAVAMNPKADNAWQYLRISLSNASRADMIAACDARNLDALQKEFPL

SEQ ID NO: 569 - protein, 545 aa, Zea mays
  VARIANT 85..545: note = Derived polymorphism lacks residues 85 to 545
  VARIANT 78..545: note = Derived polymorphism lacks residues 78 to 545
  VARIANT 28..545: note = Derived polymorphism lacks residues 28 to 545
MGSCLSSEAPAAGDGPAAWRKRRHGSREGAAAGAGAAGGGGKKLPGGAGEMTEDELARVPGRLCGKGASAVACLHTQQGRKGTNQDAMVVWESFNSSDSIFCGVFDGHGPYGHFVAKKVRDSLPVKLRTQWQTSANGGSSPHQNGSINSEETGSIVDDEWGDGDDTEKLPEMFLPLKQSYLKAFKLMDKELKLHPTVDCFCSGSTAVTLVKQGLDLVIGNLGDSRAIMGTRDASNNLTALQLTVDLKPNLPSMFNSYFDHFIDPEGRLNLHICSFFPLCPRGEAARIQQCKGRVFALQDEPEVARVWLPNNDSPGLAMARAFGDFCLKDYGLISVPEISYRRLTEKDEFIILATDGVWDVLSNKEAVDIVASAPSRATAARALVDCAVRSWRLKFPTSKSDDCAVVCLFLGHEKSADSVQGSEPNVETAEPTVEVSSSTQDSSAGVDEDIADAGMHVSSAVHISEATLQHSTTLREVDEIVPVDEPTASKEPGRCGSARSLADCISTNEEEEWSALEGVTRVNSLLNLPRLLSGDKRSTSWRKRR

SEQ ID NO: 570 - protein, 421 aa, Zea mays
  VARIANT 300: note = Ancestral polymorphism is P, Derived polymorphism is L
  VARIANT 352: note = Ancestral polymorphism is A, Derived polymorphism is G
MVPPPRPPGGGIDKYDFYYWLGCQILALGNSIKLKLVEAIQDGDVRRLKGLVNSMKKKTREKLSDMNVDRMGLLQLAVHLGKLEVCRYFVEDLGFDVERGGSCDGVTPLGGASLFGEVACARFLLDHGADPNKMDSHCYVALHNAAKNGNGEIIRLLVSRGARVDIAAPHGTPLHIAASYGNTGAVKILLEHHADPNSISEVSGSPLVSALQPNKLVNESDSLESVKLLIKAGADVNSASPNTPLVVATVNGLTDCIKYLLEAGADANIPSNQSGQRPIQIASRLGRRDHVEILFPFTSPLRTMSDWSVEGIIAHEKSRSSLSKAIGLDSFDATLYSNRSLCYLKIGEAQKALLDAETCINNRPDWVKGYYRKGAALMLLKEHKRALDAFLDGLKVDPTSAEMEKAMRAALEAVKMESVAV

SEQ ID NO: 571 - protein, 123 aa, Zea mays
  VARIANT 86: note = Ancestral polymorphism is R, Derived polymorphism is Q
  VARIANT 97: note = Ancestral polymorphism is C, Derived polymorphism is S
  VARIANT 119: note = Ancestral polymorphism is L, Derived polymorphism is S
MHQGNYADAITCYTEVHRIDPTAADALVNRGNKFKEIDRVNEAIQDYVQAATIRPNMPEAHANLASAYKDSGLVETAIISYKQALRLRPDFPEATSCILYSVSVTRKTEMACFEMLKKLLEGK

SEQ ID NO: 572 - protein, 1328 aa, Zea mays
  VARIANT 702: note = Ancestral polymorphism is I, Derived polymorphism is T
MDGNRIARFSVTWRGSQLDVDADPSCTVKEFGQLLQDLTSVRPETLKLIVPRSTNKGSKLIMPFSDAHSRLTLNGVGISEGKPIRMMGVYDDEIEEVSDNGKRPDQRIIGFDEEEQRLRQRSLGRPQISLKLPQGQYIFCDFRTLHLPGIEHKWRVGIMTEMAPVGYVGISPKCILGFNKNMGEEISLRLRTDDLKGFRKYESIKKTLLHELAHMVHSEHDANFFALNKQLNEEAASMDWTKSTGHMLSGRKIFDSYEEEFVLEPEITVAGHRLGGESSSLASARALSGAAAYQRFLNASANVDHASGTKIEYSSDDVPRGFVHETVKVEPDPDYAMHVDSAAGLSFAGQHTIGYSDPNPDDVGKQSFDRCLEPDPDDSSNANNLNQELRFDVRHLSEPDPDDGSNEVLEHGNTMEMDSELTNHITVVKYELDPADSSNANQELIIDGKHGEEPDPDDTCQDVLKSGNGTEMITEQSGNSMVLKAEPDPDDHVGDSNINELQRVEEPVRALCSRLQKSIKMLRLQATPVEAESAIQTLFKIIKNVIEHPNDIKYKRLRKSNPHFQRSLANYKAAMEVLELIGFCEDVISDEVGRAETYLVLKRNDPGLLWLAKSSLESTMHTLAIAALHLLQLLATIPTLSSQDTEAIPGCTSRCHNISIPYPFGIGDERCYLHEGFKLACKTEEQPPVLYMNSAGYRVVKIKLNPRVVYLDTRFHQLLGKSSYGESWNLSLDNSLYRLSAAQNVFVALGCGFRFSVSLPGAGANASASTCDSSCQHGYPKVPTDGTCSGTGCCYTEVSQDSNSYAIKLVPHDEAAANSTMPGARGPFNATYIVEKGEYWKRTGFAVPLQQYAAAPESVPPVPTHTVVYWMFGNSSCAEARSSNASGCLSDESECHDEPPRGYRCQCGQGYVGNPYMPNGCQGLIIAIGLGSGIAILLFVFAIVVIRRKVKARKARITKEFFFKQNRGLLLQQLVDRDIAERMIFRLEELERATNSFDETRKLGGGGHGTVYKGILSDQRVVAIKKSRHAVKREIDDFINEVAILSQVNHRNVVNLFGCCLETEVPLLVYEFISNGTLHEHLHVSAPQSLSWKERKRIALEIARSLAYLHSSASMSIIHRDIKTANILLDDRLVAKVADFGASRGIPIYETSVTTTIQGTFGYLDPEYYQTGRLTEKSDVYSFGVILVELLMRRKPSSYVSPEGSNLVSHFSSAVSEDKLREVLDSQVIEEAEEEETREMAAIAVTCLNSKGEDRPSMRQVEMRLQALQSPADSTGRNQNQRIEEGAAGPNGRRPVQGGDSSYAGDHSNLSRPYSMEQEFWSSMSFPR

SEQ ID NO: 573 - protein, 149 aa, Zea mays
  VARIANT 48: note = Ancestral polymorphism is A, Derived polymorphism is E
MVPSCLHLQDQGQSGERVALAAAAAGADARQLTLEEMLYPPPSWETAAEAATPSRRSSPKVCPVNLADFFSDEEGADSGTGSGGGYSAPGVNESASVSVVSRASLRGLHSVSRRVSFRSPDESDVFIIPARGHSDDDDEWSSDGEPSRT

SEQ ID NO: 574 - protein, 206 aa, Zea mays
  VARIANT 81: note = Ancestral polymorphism is D, Derived polymorphism is Y
  VARIANT 144: note = Ancestral polymorphism is W, Derived polymorphism is R
  VARIANT 174: note = Ancestral polymorphism is R, Derived polymorphism is W
MAHPASASNARLTTTILFMSLLLVLATASLGCPCPCSYTCENELNWRVYLKQVVGTGPSHNQEVIFRPQHANPFGQTVVQDWTLVDAPAQGAKVVGHAQGVHVLSDLANVGWFVSLNLNMVFQGDRFSGSTLPVMGVLPPEGEWAVVGGTGELALARGTIKHRIAGSAPETNFRQLDIHAFYANGSASCVVGSAAVIAEKGSAHAK

SEQ ID NO: 575 - protein, 200 aa, Zea mays
  VARIANT 6: note = Ancestral polymorphism is S, Derived polymorphism is N
  VARIANT 33: note = Ancestral polymorphism is P, Derived polymorphism is S
  VARIANT 102: note = Ancestral polymorphism is M, Derived polymorphism is I
  VARIANT 127: note = Ancestral polymorphism is T, Derived polymorphism is I
  VARIANT 171..200: note = Derived polymorphism lacks residues 171 to 200
MAHPASHARLTTTILFMSHLLVLATASLGYPCPCPYTCENELNWRLYLKQVAGAGPDHNQEVIFRPQHASPFGVTAVQDWTLLDAPAPGAKVLGHAQGVHIMSDLASVGWFVSLNMVFQGDRFSGSTLQVMGVIPPEGEWAVVGGTGELALARGTIKHRIVGGAPETNFRQLDIHAFYANGSASCVVGTSLHSCSKLPAV

SEQ ID NO: 576 - protein, 403 aa, Zea mays
  VARIANT 79: note = Ancestral polymorphism is T, Derived polymorphism is I
  VARIANT 105: note = Ancestral polymorphism is R, Derived polymorphism is G
  VARIANT 107: note = Ancestral polymorphism is L, Derived polymorphism is V
  VARIANT 109: note = Ancestral polymorphism is F, Derived polymorphism is L
  VARIANT 326: note = Ancestral polymorphism is R, Derived polymorphism is S
MADYVYGPGRTHLFVPGPVNIPDPVIRAMNRQNEDYRSPAVPALTKVLLEDVKKIFKTTTGTPFMIPTTGTGAWESALTNTLSPGDRVVSFLIGQFSLLWIDQQRRLGFDVDAVESEWGQGADLAALERRLREDAPRHAIKAVAIVHNETATGVTNDLAAVRALLDKHAHPALLLVDGVSSICALDFRMDEWGVDVALTGSQKALSMPTGMGIVCASPRALEASKTARSVRVFFDWKDYLRFYDMGTYWPYTPSIQLLYGLRTALDLIFEEGLDNVVRRHNRLGTATRLAVEAWGLSNCCQKEEWFSDTVTAAVVPPNIDSAEVVRHAWKRYNLSLGLGLNKVAGKVFRIGHLGNLNELQLLGCLSGVEMVLKDVGYPVKLGSGVAAAAAYLSNSTPLIPSRI

SEQ ID NO: 577 - protein, 842 aa, Zea mays
  VARIANT 358..842: note = Derived polymorphism lacks residues 358 to 842
  VARIANT 247: note = Ancestral polymorphism is T, Derived polymorphism is K
  VARIANT 152: note = Ancestral polymorphism is D, Derived polymorphism is Y
  VARIANT 130: note = Ancestral polymorphism is W, Derived polymorphism is C
  VARIANT 51: note = Ancestral polymorphism is P, Derived polymorphism is L
MCSTAVLLVRTGVVLVCLAALARAPSKVHAAAGTGDGLLAIPTNASLSHCPSWCGDVQISYPFGIGPGCFRQGFELTCDHTAPSPRLFFVSGNSSIQVTSVHIGISRVRVSAVGFNVTMSAGVDTYTQSWKAPPGVISYGSNYLFTVGCGVYVYVFGDNMTDIIGYCTSICTDNREIMERANTPYSACTGLGCCMIPIRGGQGITLKLGRLNSTIPHFGEALSRVKIIVSQYYEFVADDVYTSWVNTSNVDDMLFYIAIMDQPSCASAQSQENKNTYACSSESICDDDLPPVVSQGGYNCFCPGRQIEGVNPYIEDGCIAYYNPEAPSIRNCMRLCGNISVPFPFGIEEGCYANDNLRLNCTSNGTLILDRGYAQYHVTNLSLDDGLLMVTNMLNATSFNNMERVVITNYDGYYHNNFQPTYMAVVDGIVIGLVCGLGSISFALGAIVLTGKWKKGIQRRIRREYFKKNQGLLLEQLISNENATNKTKIFTLDELEEATNKFDATRVLGHGGHGTVYKGILCDQRVVAIKKSKIVEQIEIDQFINEVAILSQIIHRNVVKLFGCCLEDEVPLLVYEFISNGTLYDILHENIATKCLLSWDDRIRIATEASGALAYLHSAAAIPIFHRDVKSSNILLDDNFTVKVSDFGASRSLSLDETHVVTIVQGTFGYLDPEYYHTGSLTEKSDVYSFGVILVELLTRKKPIFINESGAKQNLSHYFIEGLQEGTLMEIIDSQVVEEADQEEINEISSLIEACLRSKGGHRPSMKEVDMRLQCLRTKRLRNKTHLLIEKGGEMEPLLCAEAQHPHERINPIYNEERLTIPMMSGCYSLEQELAAASSMIR

SEQ ID NO: 578 - protein, 96 aa, Zea mays
  VARIANT 84: note = Ancestral polymorphism is I, Derived polymorphism is N
  VARIANT 83: note = Ancestral polymorphism is L, Derived polymorphism is P
  VARIANT 73: note = Ancestral polymorphism is V, Derived polymorphism is A
  VARIANT 60: note = Ancestral polymorphism is L, Derived polymorphism is P
  VARIANT 58: note = Ancestral polymorphism is A, Derived polymorphism is G
  VARIANT 44: note = Ancestral polymorphism is F, Derived polymorphism is S
MAIMAKIGFFDAANHPLLEDTNRPTHKGFLDELLNNISTTNTDFDIKASGGYDDELIARLLKLGHCKDTEIAVKTVKTLKLVPIPCYKIHIFYELL

SEQ ID NO: 579 - protein, 834 aa, Zea mays
  VARIANT 238: note = Ancestral polymorphism is D, Derived polymorphism is Y
  VARIANT 164: note = Ancestral polymorphism is T, Derived polymorphism is I
  VARIANT 155..834: note = Derived polymorphism lacks residues 155 to 834
  VARIANT 100: note = Ancestral polymorphism is S, Derived polymorphism is Y
  VARIANT 24: note = Ancestral polymorphism is A, Derived polymorphism is V
MCSTAVLLVRTCVVLVCLAALARAPAKVHAASGTGDGLLAIPTNASLSHCPSWCGDVQISYPFGIGPGCFRQGFELTCDQTAPSPRLFFVSRNSSIQVTSLYVGSSVVLASAVGFNVTMSAGVDTYTKSWEAPTATGVSFYADHNFLYTVGCGVYVYVFGDNMTDIIGYCTSICTDNREIMESVGACEGLGCCSILMRGGQGFTLKLGRLNSTIPQFGEALSSVKIIFSEYYEFVTDDVYASWVNTSNVHGIVLDIAITDQPSCASARSQENKDTYACTSESICDDVQGGYSCVCPGQIEGNPYIKDGCIAYYNPEAPSIRNCTRLCGNISVPFPFGIEEGCYANDNLRLNCTINDTTLILDRGYAQYCVTNLSLDDGLLMVTNMLNATSFNNMERVVITNYDGYYQNGFYSTDEDVVDGIVIGLVCGLGSISFALGAIVLTGKWKKGIQRRIRREYFKKNQGLLLEQLISNENATNKTKIFTLDELEEATNKFDATRVLGHGGHGTVYKGILADQRVVAIKKSKIVEQIEIDQFINEVAILSQIIHRNVVKLFGCCLEDEVPLLVYEFISNGTLYDILHENIATKCLFSWDDRIRIATEASGALAYLHSAAAIPIFHRDVKSSNILLDDNFTVKVSDFGASRSLSLDETHVVTIVQGTFGYLDPEYYYTGSLTEKSDVYSFGVILVELLTRKKPIFINESSAKQNLSHYFIEGLQEGALMEIIDSQVVEEADQEEINDISSLIETCLRSKGGHRPSMKEVDMRLQCLRTKRLRNKTHLLIEKGGEMEPLLCVEAQHPHERINPIYNEEHLTIPMMSGCYSLEQELAAASSMVR

SEQ ID NO: 580 - protein, 166 aa, Zea mays
  VARIANT 4: note = Ancestral polymorphism is E, Derived polymorphism is V
  VARIANT 16: note = Ancestral polymorphism is E, Derived polymorphism is D
  VARIANT 27: note = Ancestral polymorphism is G, Derived polymorphism is D
  VARIANT 38: note = Ancestral polymorphism is G, Derived polymorphism is D
  VARIANT 48: note = Ancestral polymorphism is E, Derived polymorphism is D
  VARIANT 54: note = Ancestral polymorphism is V, Derived polymorphism is M
  VARIANT 63: note = Ancestral polymorphism is E, Derived polymorphism is K
  VARIANT 86: note = Ancestral polymorphism is G, Derived polymorphism is D
  VARIANT 102: note = Ancestral polymorphism is V, Derived polymorphism is A
  VARIANT 105: note = Ancestral polymorphism is A, Derived polymorphism is G
  VARIANT 116: note = Ancestral polymorphism is Q, Derived polymorphism is H
MSVEILDGSTVRSFVEDERAFNSSVDGRFAALDADHDGLLTYAEMAGDLMSLRVLERHFGVDKAAVAPEELGALYRGLFARFDRDGSGMVDQHEFRAEMKEVMLAVANGLGFLPVQMVVEEGSFLKVAVDRELGQLAKAALNEAHSRARNTTSIHTIRERARKFRA

SEQ ID NO: 581 - protein, 382 aa, Zea mays
  VARIANT 52: note = Ancestral polymorphism is E, Derived polymorphism is V
  VARIANT 72: note = Ancestral polymorphism is P, Derived polymorphism is A
  VARIANT 79: note = Ancestral polymorphism is I, Derived polymorphism is N
  VARIANT 95: note = Ancestral polymorphism is A, Derived polymorphism is T
  VARIANT 244: note = Ancestral polymorphism is R, Derived polymorphism is I
  VARIANT 252..382: note = Derived polymorphism lacks residues 252 to 382
  VARIANT 292..382: note = Derived polymorphism lacks residues 292 to 382
  VARIANT 293: note = Ancestral polymorphism is Y, Derived polymorphism is H
  VARIANT 323..382: note = Derived polymorphism lacks residues 323 to 382
  VARIANT 325..382: note = Derived polymorphism lacks residues 325 to 382
  VARIANT 326: note = Ancestral polymorphism is I, Derived polymorphism is K
  VARIANT 339: note = Ancestral polymorphism is D, Derived polymorphism is G
MGANIDNAVNDGSGPPLFKICGQVHHRIGSLLPQEGSTPQFLQLYIYDIVNEVENRLRCLNPTKDPIQNIDPLIVQELIKMLDEHNPFAKKFRMARDRLSDYEDEDFIIRIVGAREGDPVQYNLPTTDELAMLVCGDISLETFKRDIIIQKHNRDLKRISSLHPAYMALQYPLLFPFGERGFQIGVPYVGMQNAERSARSHMTMHDFFSYRFHYKKNEPNPFLCYGLLSSQAKVDARATIDENRLQYILQNQNNLRTESIQGISDAVGRGCIDGEEMGLRVVLPASHIGGRRYMFQNYHDRLAICQVYGPPDFFVTFTCNPNWPEILESMFEPGQKASDRSDIIVRVFHLKLNDLLNDIRSGDIFGRKWQVLSHYFSPCKLQ

SEQ ID NO: 582 - protein, 389 aa, Zea mays
  VARIANT 57: note = Ancestral polymorphism is H, Derived polymorphism is P
  VARIANT 85: note = Ancestral polymorphism is W, Derived polymorphism is C
  VARIANT 143..389: note = Derived polymorphism lacks residues 143 to 389
  VARIANT 187: note = Ancestral polymorphism is R, Derived polymorphism is Q
MINEVSEINPIQLSGKSSIYRNVFIKNLSNDIIKVTLWGNQALKFSYEAIYDQKIQHVVVVLFVGCLPKEYKGSVYLSGGAACHWYFNPSINEAQPYYQRDIFHVSKNYTIHNENVTIKLPPLTNEQAAFVSPPETQHKDLKELLESEPLTLPEEGFKCTVTITRLLDDQPWWYKACNTCPNKPSMRSSVSSCPTCGSTDAIIRYKLNFMATDDTAEMLMFCFDNVAKRIIGKTCTSLLTSVTDASNIRPDLAAIVSLKFTFVVVYNLMSFQNQEKELLIKSVIASHGRDLSLPSTKLSIPMHPSTPTKLLSRTRQAISPSTALSNLSTSISLEQHSSFEAGDSLEDQNPQSFESPPKRTKHKSLRFDCGEDATNKDQCMIISLISCTV

SEQ ID NO: 583 - protein, 218 aa, Zea mays
  VARIANT 18: note = Ancestral polymorphism is D, Derived polymorphism is N
  VARIANT 23: note = Ancestral polymorphism is R, Derived polymorphism is W
  VARIANT 56..218: note = Derived polymorphism lacks residues 56 to 218
  VARIANT 107: note = Ancestral polymorphism is L, Derived polymorphism is H
  VARIANT 137: note = Ancestral polymorphism is E, Derived polymorphism is V
  VARIANT 138: note = Ancestral polymorphism is T, Derived polymorphism is I
  VARIANT 140: note = Ancestral polymorphism is P, Derived polymorphism is L
  VARIANT 142: note = Ancestral polymorphism is R, Derived polymorphism is H
  VARIANT 143: note = Ancestral polymorphism is I, Derived polymorphism is K
MGTQALMLNTRWKVFRGDSSRQRDLMFSIVKPSMIQLRGNQMATSPLCSASPRLLRALGQPPRDVHSPRTVVVAAGTRVSRVEARASLVLALASHALSASQRRFAEHTDEASKYAFPSGRFEPRTLEEALMSVPDLETVLFRILKCEAEYEIREVEIWVHFNGSSQSFNVLASYLFDKNTASEQMEMTTPIFTRKGELNSQSMDMTTPVITKKVTSLS

SEQ ID NO: 584 - protein, 62 aa, Zea mays
  VARIANT 35: note = Ancestral polymorphism is T, Derived polymorphism is M
  VARIANT 30: note = Ancestral polymorphism is E, Derived polymorphism is K
  VARIANT 23: note = Ancestral polymorphism is G, Derived polymorphism is D
MAAALCLQRQSLAANPFLFSAHGLRYRKLEVILTTNIDGLDGIDNHEPIKTKDKKFYERSEH

SEQ ID NO: 585 - protein, 140 aa, Zea mays
  VARIANT 4: note = Ancestral polymorphism is E, Derived polymorphism is V
  VARIANT 12: note = Ancestral polymorphism is R, Derived polymorphism is W
  VARIANT 16: note = Ancestral polymorphism is E, Derived polymorphism is K
  VARIANT 30: note = Ancestral polymorphism is A, Derived polymorphism is V
  VARIANT 37: note = Ancestral polymorphism is D, Derived polymorphism is N
  VARIANT 38: note = Ancestral polymorphism is G, Derived polymorphism is S
  VARIANT 40: note = Ancestral polymorphism is L, Derived polymorphism is P
  VARIANT 42: note = Ancestral polymorphism is Y, Derived polymorphism is N
  VARIANT 46: note = Ancestral polymorphism is A, Derived polymorphism is T
  VARIANT 47: note = Ancestral polymorphism is G, Derived polymorphism is R
  VARIANT 49: note = Ancestral polymorphism is L, Derived polymorphism is V
  VARIANT 53: note = Ancestral polymorphism is R, Derived polymorphism is H
  VARIANT 57: note = Ancestral polymorphism is K, Derived polymorphism is R
  VARIANT 60: note = Ancestral polymorphism is G, Derived polymorphism is D
  VARIANT 68: note = Ancestral polymorphism is P, Derived polymorphism is S
  VARIANT 69: note = Ancestral polymorphism is E, Derived polymorphism is K
  VARIANT 73: note = Ancestral polymorphism is A, Derived polymorphism is S
  VARIANT 76: note = Ancestral polymorphism is R, Derived polymorphism is C
  VARIANT 80: note = Ancestral polymorphism is A, Derived polymorphism is T
  VARIANT 81: note = Ancestral polymorphism is R, Derived polymorphism is Q
  VARIANT 84: note = Ancestral polymorphism is R, Derived polymorphism is K
  VARIANT 111: note = Ancestral polymorphism is G, Derived polymorphism is D
  VARIANT 116: note = Ancestral polymorphism is Q, Derived polymorphism is H
  VARIANT 123: note = Ancestral polymorphism is S, Derived polymorphism is N
  VARIANT 128: note = Ancestral polymorphism is A, Derived polymorphism is T
MSVEILDGSTVRSFVEDERAFNSSVDGRFAALDADHDGLLTYAEMAGELMSLRVLERHFGVDEAAVAPEELGALYRGLFARFDRDGSGKVDRHEFRAEMKEVMLAVANGLGFLPVQMVVEEGSFLKVAVDRELGELAKAA

SEQ ID NO: 586 - protein, 846 aa, Zea mays
  VARIANT 535..846: note = Derived polymorphism lacks residues 535 to 846
MSWLWFKPKYNDIKKKAQFHSSLVQKLALEKEMEGHVGCVNAIAWNSSGSLLVSGSDDTRINLWNYNNRELVHDIDTGHSANIFCTKFVPETCDEVVVSGAGDAEVRVFNMSRLSGRRPREISMEPTMVYQCHSKRVKKLAVELGNPNVVWSASEDGTLRQHDFRECSSCPRAGSANQECHNVLFFENFLELDLRCGAKKSLADLPKHPLALKSCDISSVCPHQIIVGGSDAFARLYDRRMLPPLSSCQTKTKPPPCVKMFCPLHLANMAQQSSEAQLKRRPRQAQYCSLSEQRTEQPKYQSNCRLKRSSSRSLNSKQRSGRLLTYSAAEQTTEEDGSTLEGASADYSRRAMEGRSCCSSRGPPKHNMEASEEGGDDGEGVAALGKSAHATLHIVLKKTYLHLTHVAFSPNGKEVLLSYSGEHVYLFDVDPDNLSSVRYTADYVREQLFVPPFHKVPAKEHAKEKKTSVNTAPRNLSRVDMCKKFMQVATRSLEIGKNLMHGIEACSEVLESTEPDIDDDMRHGFLCTRAALYLKRKWKNDVYMAIRDCNRARKIDATSYQAHLHMAEALLQLGRLKEASEYAEAANRLLPPHSELEKNRMDQNGNSKADTHGKLRSLSEILFRPDVGGSSEEGREDSDYDDEMELDYETSVSGDESRENDQDILRGRLSYRFHQREDQTNEHTGENGSIEFAQNDDFAFQSDVAIDMKQRYVAHCNVGTDIKQASFLGEQGEFIASGSDDGRWFIWEKRTGRLIKMLAGDGAVVNCIQSHPFDCAVATSGIDNTIKLWTPDANATSMVAGPELDVLSAIENNQRTLCRKRQIVLFFRKRVIVGRMISSKLQAAYV

SEQ ID NO: 587 - protein, 790 aa, Zea mays
  VARIANT 38..790: note = Derived polymorphism lacks residues 38 to 790
  VARIANT 19: note = Ancestral polymorphism is H, Derived polymorphism is Y
MALLKKTHPSITLPIFLLHFCAITFGATDTISRTQPLSGDITIVSKEGNFELGFFSPGNNGNFYVGIWFRTISKRTVIWVANRDIPVSNASSPELAITMDGNLVLNSLGAPIWSSNSTRKSSRSSTAVLLDSGNLILRDQYNSSDIFWQSFDHPTDTVVSGQWFGIDKITYEYQDSVSWKNQEDPAPGPFSYHADLVTMSQYVSIWNHSEVYWQSGNWTGKAFTSIPGMPLKSDYIYDFVNNSRELKFRWTTKDVSVITRVILSNNGQLQRLTWSNDSEEWITGWYFPAALCDVYSVCGPFGVCRTGSDEQCFCLPGFRPASSRSWRLGAWSQGCVRQTDIQCAESNISSAIKESDAFLKITNIKFSQNPVKLKVQSMEGCRSICLSNCSCTAYAHKQDCNIWNSELWDLKQLPNGNTDGSDMYIRLAASDHVVQDSEKKAHHLRLIVLFAVLGSIFMALCALSITVKMFQRTSSRKAFSDNYSLVVYDYSFLRHCTKNFSDRVGQGSFGSVFKGLLPDSKPIAVKKLQGMKQGEKQFHTEVRALGKIHHNNLVHLIGFCLRGAERMLVYDFMVNGSLDAHLFKDEKILDWNTRFLIILGVAKGLQYLHDECQECIIHCDIKPENVLLDVNFSPKLADFGLAKLMERHFSRALTTMRGTAGYLAPEWIGGLPITPKADVYSYGMMLFEIISGRRNSELMESGAIRYFPVWAAIRISEGDISEILDPRLSAVNFQELERACKVACWCIQDNEAHRPTMRQIVQILQDIQDVSAAPVPVFLKQLVDGEYISS

SEQ ID NO: 588 - protein, 390 aa, Zea mays
  VARIANT 3: note = Ancestral polymorphism is D, Derived polymorphism is V
  VARIANT 52: note = Ancestral polymorphism is V, Derived polymorphism is L
  VARIANT 53: note = Ancestral polymorphism is K, Derived polymorphism is N
  VARIANT 54: note = Ancestral polymorphism is K, Derived polymorphism is T
  VARIANT 105: note = Ancestral polymorphism is R, Derived polymorphism is G
  VARIANT 107: note = Ancestral polymorphism is L, Derived polymorphism is V
  VARIANT 132: note = Ancestral polymorphism is R, Derived polymorphism is H
  VARIANT 314: note = Ancestral polymorphism is H, Derived polymorphism is N
MVDYVYGPGRTHLFVPGPVNIPDPVIRAMNRQNEDYRSPAVPALTKVLLEDVKKIFKTTTGTPLMIPTTGTGAWESALINTLSSGDRVVSFLIGQFSLLWIDQQRRLGFDVDAVESEWGQGADLAALERRLRDDAPRHAIKAVAIVHNETATGVTNDLAAVRALLDKHAHPALLLVDGVSSICALDFRMDEWGVDVALTGSQKALSMPTGMGIVCASPRALEASKTARFYDMGTYWPYTPSIQLLYGLRTALDLIFEEGLDNVVRRHNRLGTATRLAVEAWGLSNCCQKEEWFSDIVTAVVVPPNIDSAEVVRHAWKRYNLSLGLGLNKVAGKVFRIGHLGNLNELQLLGCLSGVEMVLKDVGYPVKLGSGVAAAAAYLSNSTPLIPSRI

SEQ ID NO: 589 - protein, 110 aa, Zea mays
  VARIANT 90: note = Ancestral polymorphism is E, Derived polymorphism is D
  VARIANT 34: note = Ancestral polymorphism is A, Derived polymorphism is T
  VARIANT 31: note = Ancestral polymorphism is A, Derived polymorphism is T
  VARIANT 29: note = Ancestral polymorphism is F, Derived polymorphism is V
  VARIANT 12: note = Ancestral polymorphism is R, Derived polymorphism is W
MSVEILDGSTVRSFVEDERAFNSSVDGRFAALDADHDGLLTYAEMAGELMSLRVLERHFGADEAALYRGLFARFDRDGSGMVDRHEFRADMKEVMLGVATASASSPCRWS

SEQ ID NO: 590 - protein, 307 aa, Zea mays
  VARIANT 5..307: note = Derived polymorphism lacks residues 5 to 307
MSAKQRILIFGIVIGLVCGLGSISFALGAIVLTGKWKKGIQRRIRREYFKKNQGLLLEQLISNENATNKTKIFTLDELEEATNKFDATRVLGHGGHGTVYKGILSDQRVVAIKKSKIVEQIEIDQFIDEVAILSQIIHRNVVKLFGCCLEDEVPLLVYEFISNGTLYDILHENIATKCLLSWDDRIRIATEASGALAYLHSAAAIPIFHRDVKSSNILLDDNFTVKVSDFGASRSLSLDETHVVTIVQGTFGYLDPEYYYTGSLTEKSDVYSFGVILVELLTRKKPIFINESGAKQNLSHYFIEGLQ

SEQ ID NO: 591 - protein, 142 aa, Zea mays
  VARIANT 17: note = Ancestral polymorphism is D, Derived polymorphism is N
  VARIANT 24: note = Ancestral polymorphism is E, Derived polymorphism is K
  VARIANT 48: note = Ancestral polymorphism is P, Derived polymorphism is A
  VARIANT 53: note = Ancestral polymorphism is A, Derived polymorphism is V
  VARIANT 93: note = Ancestral polymorphism is N, Derived polymorphism is K
MELFARAKVVRLRSHHNKFLYVDKDEVRVTQDRDGSSANARWTFEAAPHSAGAVRLRSRYGRYLTASGESFLLGMTGRKARLRTKAGHFLRANGGLPPWRNSVTHDVPHRTATQDWVLWDVELFEAPLDEKEILLRYSSALV

SEQ ID NO: 592 - protein, 531 aa, Zea mays
  VARIANT 100..531: note = Derived polymorphism lacks residues 100 to 531
  VARIANT 51: note = Ancestral polymorphism is P, Derived polymorphism is L
MCSTAVLLVRTCVVLVCLAALARAPAKVHAAAGTGDGLLAIPTNASLSHCPSRCGDVQISYPFGIGPGCFRQGFELSCDRTTPSPRLFFVSGNSSIQVTSLYVRNSVVWVSAVGFNVTMSAGVDTYTKSWEAPTATGVCFYPDYNNLYTVGCGVYVYVFGDNMTDIIGSCTSICTDNREIMESANTGSGACEGLGCCSIPIRGGQGFTLKLGRLNSTIPQFGEALSNVKIIFSQNYDFVTDDVYASWVVNTSNVHAMLLNIAITDQPSCASAQSQENKDTYACSSESICYDYLPPSVSQRGYTCFCPGQIEGNPYIEDGCIAYYNPEAPNRNCMRLCGNISVPFPFGIQEGCYANDNLRLDCTSNDTLILDRGYAQYRVTNLSLDDGLLMVTNMLNDTSSNNVGRIIITSNNDKYQEVMDGNYDFSQEDVAIKWVISNITCQKAMQNNATYACVSDNSICKDVMRGNIRDGYRCKCSDGFQGNPYLHNNCTGYIPLSLCKLISARFLVSLTIIYLVRVLINMLKFDFSHTI

SEQ ID NO: 593 - protein, 107 aa, Zea mays
  VARIANT 11: note = Ancestral polymorphism is C, Derived polymorphism is Y
  VARIANT 12: note = Ancestral polymorphism is S, Derived polymorphism is F
  VARIANT 72..107: note = Derived polymorphism lacks residues 72 to 107
  VARIANT 73..107: note = Derived polymorphism lacks residues 73 to 107
  VARIANT 80: note = Ancestral polymorphism is P, Derived polymorphism is L
MALGNLSSGRCSRTTRWAEFDRLSSHGRVATLAGSQYTLNLTYDMGTVRVKSGWSGPKISSSVYSTRPVAVYEVSQMLLPVQIFKATPRWRRPLPLSPPRTPRRQGL

SEQ ID NO: 594 - protein, 139 aa, Zea mays
  VARIANT 87: note = Ancestral polymorphism is L, Derived polymorphism is S
MARGEMGRETVAACRSAKTMWEAIAARLQERGYRRTAEQCKCNWKNLVNCYKRECQEIDQLYFFNQEGIKNWKFHVRFRLTLLLGWSGGGSNFKLWERNFCDEDLAIFYDGGRLGIEGVNGDACGFDQFNLGKRYCFLS

SEQ ID NO: 595 - protein, 156 aa, Zea mays
  VARIANT 17: note = Ancestral polymorphism is R, Derived polymorphism is Q
  VARIANT 28..156: note = Derived polymorphism lacks residues 28 to 156
  VARIANT 72..156: note = Derived polymorphism lacks residues 72 to 156
  VARIANT 113..156: note = Derived polymorphism lacks residues 113 to 156
  VARIANT 123: note = Ancestral polymorphism is I, Derived polymorphism is S
  VARIANT 124: note = Ancestral polymorphism is T, Derived polymorphism is I
  VARIANT 133..156: note = Derived polymorphism lacks residues 133 to 156
MARSSFKLEHPFGSSLRFLIPPSSSGLQLRVGRDMAYDCWSCDLLCAASSPDLYRINLEQEVTSLQFDEDQGYFMAVGTSTGKISIYDLRMSSPLRDKDHMYGSPILNIKWHQTLNSTEPKLITADKHIVRIWDPNTLPHMLPSENAFSAAVSALE

SEQ ID NO: 596 - protein, 749 aa, Zea mays
  VARIANT 24: note = Ancestral polymorphism is A, Derived polymorphism is V
MCSTAVLLVRTCVVLVCLAALARAPAKVHAAAGTGDGLLAIPTNASLSHCPSWCGNVQISYPFGIGPGCFRQGFELSCDRTTPSPRLFFVSGNSSIRVTSLHVRGNWVMASAVGYNVTMSAGVDTYTKSWEAPTATGVSFYPDYNNLYTVGCGVYVYVFGDNMTDIIGSCTSICTDNREIMESANTGSGACEGLGCCSIPIRGGQGFTLKLGRLNSTIPQFGEALSNVKIIFSQNYDFVTDDVYASWVVNTSNVHGMLLNIAITDQPSCASAQSQENKDTYACTYYNPEAPNRNCMRLCGNINVPFPFGIEEGCSANDNLRLNCTSNDTLILDRGYTQYRVTNLSLDDGLLMVTNMLNDTSSNNMERVVLVNYDGYNQNGFYSTDFYSTDEDVVDDIDECLIPNKCNGICHNVDGGFNCTSCPHGKEYDPKKKKCVMSAKQRILIFGIVIGLVCGLGSISFALGAIILTGKWKKGIQRRIRREYFKKNQGLLLEQLISNENATTKTKIFTLDELEEATNKFDATRVLGHGGHGTVYKGILSDQRVVAIKKSKIVEQIEIDQFINEVAILSQIIHRNVVKLFGCCLEDEVPLLVYEFISNGTLYDILHENIATKCLLSWDDRIRIATEASGALAYLHSAAAIPIFHRDVKSSNILLDDNFTVKVSDFGASRSLSLDETHVVTIVQGTFGYLDPEYYYTGSLTEKSDVYSFGVILVELLTRKKPIFINELGAKQNLSHYFIEGYRKGLSWK

SEQ ID NO: 597 - protein, 96 aa, Zea mays
  VARIANT 10: note = Ancestral polymorphism is V, Derived polymorphism is L
  VARIANT 20: note = Ancestral polymorphism is A, Derived polymorphism is T
  VARIANT 21: note = Ancestral polymorphism is A, Derived polymorphism is V
  VARIANT 28: note = Ancestral polymorphism is G, Derived polymorphism is R
  VARIANT 42: note = Ancestral polymorphism is G, Derived polymorphism is D
MAGELMSLRVLERHFGVDEAAVAPEELGALYHGLFARFDRDGSGKVDRHEFRAEMKEVMLAVANGLGFLPVQMVVEEGSFLKVVVDRELGQLAKAA

SEQ ID NO: 598 - protein, 128 aa, Zea mays
  VARIANT 84: note = Ancestral polymorphism is A, Derived polymorphism is T
  VARIANT 111..128: note = Derived polymorphism lacks residues 111 to 128
MPRYLFAAVAAAVAVRIESDRFGHLSMALSASSKVEPMSQKLDLRSDYTELTPPIRLKIFGLSSLERAESTLQNNYQEYVKLKARVEVLQQSQRNLLGEDLAALSPSELDQLENQVDKTLKQIRSRKV

SEQ ID NO: 599 - protein, 557 aa, Zea mays
  VARIANT 483..557: note = Derived polymorphism lacks residues 483 to 557
  VARIANT 454..557: note = Derived polymorphism lacks residues 454 to 557
  VARIANT 403: note = Ancestral polymorphism is C, Derived polymorphism is Y
  VARIANT 319: note = Ancestral polymorphism is T, Derived polymorphism is I
  VARIANT 267: note = Ancestral polymorphism is S, Derived polymorphism is L
  VARIANT 248..557: note = Derived polymorphism lacks residues 248 to 557
  VARIANT 240: note = Ancestral polymorphism is P, Derived polymorphism is S
  VARIANT 211..557: note = Derived polymorphism lacks residues 211 to 557
  VARIANT 139: note = Ancestral polymorphism is K, Derived polymorphism is M
  VARIANT 137: note = Ancestral polymorphism is Y, Derived polymorphism is H
  VARIANT 131: note = Ancestral polymorphism is G, Derived polymorphism is S
  VARIANT 82: note = Ancestral polymorphism is F, Derived polymorphism is L
MTSKTSGSITTSLSTMGKLSSVGSNFMASAGSRSTSGGFDEGAKYFDGQILKAPNLHTFTFIELKTATKNFRPDSVLGEGGFGRVYKGWVDEKTMAPTRNGTDMVVAVKKLNSESMQGFEEWQMQYMIVDGVSSSWYIKFDTFTPAAERGLPVTRVISRMTLQQILARAVGYDAILNGSHVVNFTDDGSKVTAILEDDRIFELPYWRTVEYLKVRKTLFGHSDATYSGYTCYTGIADFVPPDIDTVGESANEYTDDEDASWKVRRASSKCLSAIIVSRPEMLVKMFLEACPKLIERFREREENVKMDIFNTFIELLRQTGNVTKGQGDIDESRKILHLDCMFCLSVSCPHASFCFAFQPSLVAEARGPKVVKSINRQLREKSIKTKVGTFSVLKELVVVLPDCLADHFGSLVPGIEKALNDKSSTSNLKIEALVLTRLVMASHSPSVFHPYIKWMNMPDLLEVIDFKDTFLDANHVQQSFPDYQVTFINSDGTKNLHPSPPFKIRLSKKMRESSHALPGNMNSNLTVKSRNNMDDGEPQKEKLIVETYIPADPGPYP

SEQ ID NO: 600 - protein, 109 aa, Zea mays
  VARIANT 19: note = Ancestral polymorphism is V, Derived polymorphism is G
MADYVYGPGRTHLFMPGPVNIPDPVIRAMNGQNEDYRSPAVPALTKVLLEDVKKIFKTTTGTPFMIPTTGMGAWESALTNTLSRATGSCPSSSGSSACCESTSSGLLSG

SEQ ID NO: 601 - protein, 215 aa, Zea mays
  VARIANT 54: note = Ancestral polymorphism is F, Derived polymorphism is L
  VARIANT 56: note = Ancestral polymorphism is D, Derived polymorphism is N
  VARIANT 64: note = Ancestral polymorphism is T, Derived polymorphism is M
  VARIANT 78: note = Ancestral polymorphism is D, Derived polymorphism is H
  VARIANT 124: note = Ancestral polymorphism is A, Derived polymorphism is V
  VARIANT 138: note = Ancestral polymorphism is R, Derived polymorphism is S
  VARIANT 141: note = Ancestral polymorphism is W, Derived polymorphism is L
  VARIANT 187: note = Ancestral polymorphism is V, Derived polymorphism is M
MDEWGVDVALTGSQKALSMPTGMGIVCASPRALEASKTARSVRVFFDWKDYLRFYDMGTYWPYTPSIQLLYGLRTALDLIFEEGLDNVVRRHNRLGTATRLAVEAWGLSNCCQKEEWFSDTVTAVVVPPNIDSAEVVRHAWKRYNLSLGLGLNKVAGKVFRIGHLGNLNELQLLGCLSGVEMVLKDVGYPVKLGSGVAAAAAYLSNSTPLIPSRI

SEQ ID NO: 602 - protein, 137 aa, Zea mays
  VARIANT 96: note = Ancestral polymorphism is R, Derived polymorphism is H
  VARIANT 93: note = Ancestral polymorphism is H, Derived polymorphism is Y
  VARIANT 91: note = Ancestral polymorphism is D, Derived polymorphism is H
  VARIANT 86: note = Ancestral polymorphism is G, Derived polymorphism is S
  VARIANT 81: note = Ancestral polymorphism is R, Derived polymorphism is W
  VARIANT 80: note = Ancestral polymorphism is A, Derived polymorphism is T
  VARIANT 77: note = Ancestral polymorphism is G, Derived polymorphism is C
  VARIANT 63: note = Ancestral polymorphism is E, Derived polymorphism is K
  VARIANT 56: note = Ancestral polymorphism is E, Derived polymorphism is K
  VARIANT 49: note = Ancestral polymorphism is L, Derived polymorphism is P
  VARIANT 44: note = Ancestral polymorphism is E, Derived polymorphism is K
  VARIANT 43: note = Ancestral polymorphism is A, Derived polymorphism is S
  VARIANT 41: note = Ancestral polymorphism is T, Derived polymorphism is S
  VARIANT 33: note = Ancestral polymorphism is D, Derived polymorphism is G
  VARIANT 31: note = Ancestral polymorphism is A, Derived polymorphism is T
  VARIANT 30: note = Ancestral polymorphism is A, Derived polymorphism is V
  VARIANT 28: note = Ancestral polymorphism is R, Derived polymorphism is H
  VARIANT 21: note = Ancestral polymorphism is F, Derived polymorphism is L
  VARIANT 16: note = Ancestral polymorphism is E, Derived polymorphism is D
  VARIANT 15: note = Ancestral polymorphism is V, Derived polymorphism is E
  VARIANT 3: note = Ancestral polymorphism is V, Derived polymorphism is M
MSVEILDGSTVRSFVEDERAFNSSVDGRFAALDADHDGLLTYAEMAGELMSLRVLERHFGVDEAAVAPEELGALYRGLFARFDRDGSGMVDRHEFRAEMKEVMLGVANGLGFLPVQMVLDEGSFLKVAVDRELAKAA

SEQ ID NO: 603 - protein, 227 aa, Zea mays
  VARIANT 110: note = Ancestral polymorphism is L, Derived polymorphism is Q
  VARIANT 92: note = Ancestral polymorphism is A, Derived polymorphism is T
  VARIANT 42..227: note = Derived polymorphism lacks residues 42 to 227
  VARIANT 41: note = Ancestral polymorphism is T, Derived polymorphism is I
  VARIANT 28: note = Ancestral polymorphism is T, Derived polymorphism is M
  VARIANT 15: note = Ancestral polymorphism is R, Derived polymorphism is W
MGGTAVLLSNQRSDRRRAKYELVHTVCTHKGADDRCFGCVTQKEDGEGVLGVSLSRDLMAVAGDALKTNIRTLGPLVLPLSEQLLFMATLVAKKLLKMKKVKSYIPDFKQAFEHFCIHAGGHAVLDELESNLALTDWHMEPSRMMLHQFGNTSSSSLWYELAYSEAKGRIRHCHRVWQIAFGSGFKCNSAVWRALRSVNPAEETNLWMDEIDRFPVDVPKVSKVSSD

SEQ ID NO: 604 - protein, 794 aa, Zea mays
  VARIANT 230..794: note = Derived polymorphism lacks residues 230 to 794
MARAPAKVHAAAGTGTKASLSPCPSRCGDVEISYPFGIGLGCFRQGFELTCDQTAPSPRLFFVSGNSSIQVTSLYVGNSAVLASAVGFNVTMNAGVDTYTKSWEAPTATGVSFYADNNYLYTVGCGVYVYVFGDNREIMESANTGSGVCEGLGCCSIPMRGGQGFTLKLGRLNSTIPQFGEALSSVKIIVSQNYEFVTDDVYASWVNTSNVQGMLLDIAITDQPNCASAQSQENKDTYACTSESICNDVLPPVVSQGGYSCFCPGQIEGNPYIEDGCIAYYNPEAPSIRNCTRLCGNISVPFPFGIEEGCYANDNLRLNCTINDTTLILDRGYAQYRVTNLSLDDGLLMVTNMLNDTSSKNVERIIITSNYDNYQEVMDGIVIGLVCGLGSISFALGAIVLTGKWKKGIQRRIRREYFKKNQGLLLEQLISNENATTKTKIFTLDELEEATNKFDATRVLGHGGHGTVYKGILSDQRVVAIKKSKIVEQIEIDQFINEVAILSQIIHRNVVKLFGCCLEDEVPLLVYEFISNGTLYDILHENIATKCLFSWDDRIRIATEASGALAYLHSAAAIPIFHRDVKSSNILLDDNFTVKVSDFGASRSLSLDETHVVTIVQGTFGYLDPEYYYTGSLTEKSDVYSFGVILVELLTRKKPIFINESGAKQNLSHYFIEGLQEGTLMEIIDSQVVEEADQEEINDISSLIETCLRSKGGHRPSMKEVDMRLQCLRTKRLRNKTHLLIEKGGEMEPLLCAEAQHPHERINPIYNEEHLTIPMMSGCYSLEQELAAASSMVR

SEQ ID NO: 605 - protein, 104 aa, Zea mays
  VARIANT 30: note = Ancestral polymorphism is E, Derived polymorphism is K
  VARIANT 1: note = Ancestral polymorphism is M, Derived polymorphism is T
MAAALRLQRQSLTASPFLFSAHGLRYRKLEVILTTNIDGLDGIGNHEPIKTKDKKFYERSEHWLYQTPQRIKGYLNLASAKIKQLYMIGVVTSIKWHLSRIIGQ

SEQ ID NO: 606 - protein, 140 aa, Zea mays
  VARIANT 3: note = Ancestral polymorphism is V, Derived polymorphism is M
  VARIANT 4: note = Ancestral polymorphism is E, Derived polymorphism is V
  VARIANT 53: note = Ancestral polymorphism is R, Derived polymorphism is H
  VARIANT 54: note = Ancestral polymorphism is V, Derived polymorphism is M
  VARIANT 57: note = Ancestral polymorphism is K, Derived polymorphism is R
  VARIANT 60: note = Ancestral polymorphism is G, Derived polymorphism is D
  VARIANT 66: note = Ancestral polymorphism is V, Derived polymorphism is M
  VARIANT 70: note = Ancestral polymorphism is E, Derived polymorphism is D
  VARIANT 72: note = Ancestral polymorphism is G, Derived polymorphism is R
  VARIANT 76: note = Ancestral polymorphism is R, Derived polymorphism is H
  VARIANT 81: note = Ancestral polymorphism is R, Derived polymorphism is W
  VARIANT 90: note = Ancestral polymorphism is V, Derived polymorphism is M
  VARIANT 96: note = Ancestral polymorphism is R, Derived polymorphism is H
  VARIANT 97: note = Ancestral polymorphism is A, Derived polymorphism is V
  VARIANT 99: note = Ancestral polymorphism is M, Derived polymorphism is I
  VARIANT 102: note = Ancestral polymorphism is V, Derived polymorphism is M
  VARIANT 104: note = Ancestral polymorphism is L, Derived polymorphism is V
  VARIANT 105: note = Ancestral polymorphism is A, Derived polymorphism is T
  VARIANT 109: note = Ancestral polymorphism is G, Derived polymorphism is S
  VARIANT 110: note = Ancestral polymorphism is L, Derived polymorphism is I
  VARIANT 111: note = Ancestral polymorphism is G, Derived polymorphism is D
  VARIANT 113: note = Ancestral polymorphism is L, Derived polymorphism is V
  VARIANT 115: note = Ancestral polymorphism is V, Derived polymorphism is M
  VARIANT 116: note = Ancestral polymorphism is Q, Derived polymorphism is R
  VARIANT 120: note = Ancestral polymorphism is E, Derived polymorphism is K
  VARIANT 123: note = Ancestral polymorphism is S, Derived polymorphism is N
  VARIANT 125: note = Ancestral polymorphism is L, Derived polymorphism is F
MSVEILDGSTVQSFVEDERAFNSSVDGRFAALDADHDGLLTYAEMAGELMSLRVLEKHFGVDEAAMAPEELGALYRGLFARFDRDGSGKVDRHEFRAEMKEVMLAVANGLGFLPVQMVVEEGSFLKVAVDRELGQLAKAA

SEQ ID NO: 607 - protein, 75 aa, Zea mays
  VARIANT 1: note = Ancestral polymorphism is V, Derived polymorphism is M
  VARIANT 5: note = Ancestral polymorphism is E, Derived polymorphism is D
  VARIANT 7: note = Ancestral polymorphism is G, Derived polymorphism is R
  VARIANT 11: note = Ancestral polymorphism is R, Derived polymorphism is H
  VARIANT 16: note = Ancestral polymorphism is R, Derived polymorphism is W
  VARIANT 25: note = Ancestral polymorphism is V, Derived polymorphism is M
  VARIANT 31: note = Ancestral polymorphism is R, Derived polymorphism is H
  VARIANT 32: note = Ancestral polymorphism is A, Derived polymorphism is V
  VARIANT 34: note = Ancestral polymorphism is M, Derived polymorphism is I
  VARIANT 37: note = Ancestral polymorphism is V, Derived polymorphism is M
  VARIANT 39: note = Ancestral polymorphism is L, Derived polymorphism is V
  VARIANT 40: note = Ancestral polymorphism is A, Derived polymorphism is T
  VARIANT 44: note = Ancestral polymorphism is G, Derived polymorphism is S
  VARIANT 45: note = Ancestral polymorphism is L, Derived polymorphism is I
  VARIANT 46: note = Ancestral polymorphism is G, Derived polymorphism is D
  VARIANT 48: note = Ancestral polymorphism is L, Derived polymorphism is V
  VARIANT 50: note = Ancestral polymorphism is V, Derived polymorphism is M
  VARIANT 51: note = Ancestral polymorphism is Q, Derived polymorphism is R
  VARIANT 55: note = Ancestral polymorphism is E, Derived polymorphism is K
  VARIANT 58: note = Ancestral polymorphism is S, Derived polymorphism is N
  VARIANT 60: note = Ancestral polymorphism is L, Derived polymorphism is F
MAPEELGALYRGLFARFDRDGSGKVDRHEFRAEMKEVMLAVANGLGFLPVQMVVEEGSFLKVAVDRELGQLAKAA

SEQ ID NO: 608 - protein, 177 aa, Zea mays
  VARIANT 64: note = Ancestral polymorphism is G, Derived polymorphism is V
  VARIANT 100: note = Ancestral polymorphism is T, Derived polymorphism is M
  VARIANT 133..177: note = Derived polymorphism lacks residues 133 to 177
  VARIANT 144: note = Ancestral polymorphism is F, Derived polymorphism is L
  VARIANT 167: note = Ancestral polymorphism is C, Derived polymorphism is W
MLPVSACWAAKAATFGDVSTELAGPGRQPMDVEVISTGEACRRGLAAGIDKLADTVSVTLGPKVRNVVIDQYDVPKVINDGVTISKAIELPNALEHAGATLLQENWDVALEELNRLKEIIDSKNFSSPLNQLQNRIWLMHWALFIFFNHENGRNGIIDLFFQDKFVCYNLNICHLLT

SEQ ID NO: 609 - protein, 199 aa, Zea mays
  VARIANT 45: note = Ancestral polymorphism is A, Derived polymorphism is E
MASRKLLVGLTARRQLQSRTQQLFWATSLPEATTSRSLMVAAAMARLSDRSSAPFILSSRAISSTQPVMQSTGDVSGSSPSAVDHKLAMQEDEFHKLADETIHDLLEKLEEYGDSIQMDGFDIEYGNQVLTLRLGDLGTYVINKQTPNKQIWLSSPVSGPSRFDWDATANGWIYKRTGVNLVRLLEKEIGELCGTPVEL

SEQ ID NO: 610 - protein, 110 aa, Zea mays
  VARIANT 79: note = Ancestral polymorphism is G, Derived polymorphism is E
  VARIANT 64: note = Ancestral polymorphism is R, Derived polymorphism is Q
  VARIANT 63: note = Ancestral polymorphism is L, Derived polymorphism is F
  VARIANT 54: note = Ancestral polymorphism is S, Derived polymorphism is R
  VARIANT 49: note = Ancestral polymorphism is R, Derived polymorphism is W
  VARIANT 9: note = Ancestral polymorphism is V, Derived polymorphism is M
MESDKGSSVQFQDFLPLMARKLGVEGLIQELCKGFQLLMEPRAGKITIWSLKQSAARLGLGQLQDDELLEMMKEGDLDEDGALDQMEFCILMVRLSPDLMEEEAYMMFQH

SEQ ID NO: 611 - protein, 364 aa, Zea mays
  VARIANT 308: note = Ancestral polymorphism is T, Derived polymorphism is M
MQEAGRERDRAAAAADLGGVAASVRPTDTAAVSTKPAKRYPLALWIGILGLIMLVAVYIFSLSLKQNGMLFGLMQTNLIEKEREKPCHDPSIPDTEIPYLHYPMPNTYDRKECACTGVRFFAILSMQRSGSGWVETLLNSHPNISSNGEIFSVKERRSNITAITKTLDRLYNLDWYSSAAKNECTAAVGLKWMLNQGLMKHHQEIVEYFNRRGVSAIFLLRRNLLRRYVSILANAHDSAMKQLNGTHKAHVHSKHEAEILAQYKPTIDKKTLITELKRSDKLAADALVNFKNTRHVVLYYEDVVSNRTMLMDVLDFLRLPKRKLFSRHVKIHTKRLCDHIDNWADVTDFLKGTPFESFLNGSRR

SEQ ID NO: 612 - protein, 171 aa, Zea mays
  VARIANT 133: note = Ancestral polymorphism is P, Derived polymorphism is L
  VARIANT 75: note = Ancestral polymorphism is G, Derived polymorphism is R
  VARIANT 70: note = Ancestral polymorphism is A, Derived polymorphism is D
  VARIANT 58: note = Ancestral polymorphism is K, Derived polymorphism is N
  VARIANT 46..171: note = Derived polymorphism lacks residues 46 to 171
  VARIANT 29..171: note = Derived polymorphism lacks residues 29 to 171
MSKVKNNSGYHGVTEPISLSGPTEKYLMQTAEVEKYLSDARLDERQDEAILREEVLGKLDQTVKAWIKKATRISGYGEQFVHEANAKIFTFGSYRLGVHGPGADIDTLCVVPRHATRNEYFFRWLHDILAEMPEVSELHPVPDAHVPVLGFKINGVSIDLLYANLAHAVIP

SEQ ID NO: 613 - protein, 1088 aa, Zea mays
  VARIANT 107: note = Ancestral polymorphism is P, Derived polymorphism is L
MSCAAALSLLVALAASVAPAAASQGAGNGDGDAAVLRAFLVSLPPSSQRILLPSWNATNSSSSTGSSHCAFRGVECTAAGAVAAVNLSGLALSGALAASAPGLCALPALAALDLSLNSFTGAVPAALAACSALATLDLSNNSLSGAVPRELAALPALTDLRLSGNGLTGPVPEFPARCGLRYLSLYGNRISGALPRSLGNCVNLTVLFLSSNRIGGALPDVFGSLPMLQKLYLDSNLFAGALPESVGELGSLERFVASTNCFNGSIPASIGRCGSLTTLLLHNNQFTGPIPASIGNLSRLQWLTIKDTFVTGAIPPEIGRCQELVILDLQNNNLTGTIPPELAELKKLRSLSLYRNMLHGPVPAALWQMPELEKLALYNNSLSGEIPEEINHMRNLRELLLAFNNFTGELPQGLGSNTTHGLVWVDVMGNHFHGAIPPGLCTGGQLAILDLALNRFSGGIPSEIIKCQSLWRARLANNLFSGSFPSDLGINTGWSYVELGGNRFDGRIPSVLGSWRNLTVLDLSRNSFSGPIPPELGALAHLGDLNLSSNKLSGRIPHELGNCRGLVRLDLENNLLNGSIPAEIVSLGSLQHLVLGGNKLSGEIPDAFTSTQGLLELQLGGNSLEGAVPWSLGKLQFISQIINMSSNMLSGTIPSSLGNLRMLEMLDLSENSLSGPIPSQLSNMVSLSAANVSFNRLSGPLPVGWANKLPADGFLGNPQLCVRPEDAACSKNQYRSRTRRNTRIIVALLLSSLAVMASGLCAVRYAVKTSRRRLLAKRVSVRGLDATTTEELPEDLSYDDIIRATDNWSEKYVIGRGRHGTVYRTELAPGRRWAVKTVDLSRVKFPIEMKILNMVRHRNIVKMEGYCIRGNFGVILSEYMPRGTLFELLHGRKPQVVALDWKARHQIALGAAQGLSYLHHDCVPMVVHRDVKSSNILMDADLVPKIADFGMGKIVGDEDADATVSVVVGTLGYIAPEHGYNTRLTEKSDVYSYGVVLLELLCRRMPVDPAFGDGVDIVAWMRLNLKHADCCSVMTFLDEEIMYWPEDEKAKALDVLDMAISCTQVAFESRPSMREVVGALMRIDDQYI

SEQ ID NO: 614 - protein, 464 aa, Zea mays
  VARIANT 141: note = Ancestral polymorphism is P, Derived polymorphism is L
  VARIANT 217: note = Ancestral polymorphism is D, Derived polymorphism is Y
  VARIANT 236: note = Ancestral polymorphism is A, Derived polymorphism is G
  VARIANT 271: note = Ancestral polymorphism is P, Derived polymorphism is A
  VARIANT 374: note = Ancestral polymorphism is P, Derived polymorphism is S
  VARIANT 437..464: note = Derived polymorphism lacks residues 437 to 464
MVPCAQQPQLPTAPPFHTFRQAGRRVIPLPRLHRRSRRTIATMASASGSPNPVVLGCGGISVDYLAAVASFPNPDDKIRSLALKVQGGGNTGNALTAAARLGLRPRIISKVANDAQGRSILSELQTDGVDTSYILVRITIPQRFSDSHSGAKIVVLKNAASIHFFSQVAENGNSPFTYIIVDEQTKTRTCIHTPGSPPMVPEELTKANLSSALDGVDIVYFDVRLHDIALLVAEEASQRKIPILIDAERKREGLDELLNFASYVVCSAKFPQAWTGASSIPVALVSMLSRLPNIKFVIVTLGEKGCLMLERSSTDASEAGEIDAEALFESLEKSIDQSSTIPKCVASKSNLRISADGVSSISGRLLLGTAEVIPPGELVDTTGAGDAFIGAVLYGQCAMFPFPRHILLQKLVYAPACHRRGCYLLLHEWLVVVAEVWGLEPAFPIAQTHAWLAIDPNSEGLHPP

SEQ ID NO: 615 - protein, 697 aa, Zea mays
  VARIANT 478..697: note = Derived polymorphism lacks residues 478 to 697
MGARDNGEGRDEKRGTGSDYVPARDSFSSQGESRVPKRLGKKESKDNSPRTTKSSASRQAQNKLQHKGLNNVQNKPQKQKKTVSAAKAVDVRKPDITRIPSRPPSELSEETDDIISDAGTVDDRGTEEAKEINVLDEAPRCDQSTGTDDEIPDIEDKVVDHGKSVVDQGNEELVLKIDKLEQELREVAALEVSLYSVVPEHGSSAHKLHTPARRLSRLYIHASKSWSEDKRASVAKSIASGLVLVAKSSSNDASRLTFWLSNTVVLREIIVQTFGISHQFTPSMTNMSMNGGAKKLGGKSMTMLWRNNYNGTQANFAARLMPDDWQETSTLLAALEKIESWIFSRIVETVWWQVNALTPHMQKRAEGSSTPKAGRVLGPALGDQQQGTFSVNLWKAAFQDAFSRMCPLSAGRHECGCLPVLAKLVMEQCVARLDVAMFNAILRESASEIPTDPISDPIVDPKVLPIPAGDLSFGSGAQLKNSIGNWSRWLTDKLGIDHDDSEDIGDVEDERRAAAETKSFQLLNELSDLLMLPKDMLLEKSIRKEVCPSIGLQLVTRILCNFTPDEFCPDPVPSTVLEELNSESLLERHANKDVTSVFPCTAAPIVYRTPSTLDAAERAADIGGGAKLDRKASMVQRRGYTSDDDLDDLDSPLASLIDRSAPPSPSNGLAHFSAGRGVSMENTRYTLLREVWGLEQR

SEQ ID NO: 616 - protein, 120 aa, Zea mays
  VARIANT 80: note = Ancestral polymorphism is G, Derived polymorphism is A
  VARIANT 67..120: note = Derived polymorphism lacks residues 67 to 120
  VARIANT 14: note = Ancestral polymorphism is A, Derived polymorphism is V
MRAISTAAGGMLRARLRSSSRVRGGGDGAGRWTTPGHEERPKGYLFNRPPPPPGETRKWEDWELPCYITSFLTVVILGVGLNAKPDLTIETWAHEKALERLKQQELAAVSGGGDADADAE

SEQ ID NO: 617 - protein, 107 aa, Zea mays
  VARIANT 79: note = Ancestral polymorphism is L, Derived polymorphism is H
  VARIANT 28: note = Ancestral polymorphism is R, Derived polymorphism is C
  VARIANT 12: note = Ancestral polymorphism is V, Derived polymorphism is I
MEDSAGQEVCAVLGIGDNIKGLLATLSRVDAIISYDSSPRSTCILSYPISYRVPDSRWLCGSRALHLGTKFADEFRESLKVAHYAGANSGPNANGSRFFITYAKQPF

SEQ ID NO: 618 - protein, 341 aa, Zea mays
  VARIANT 326: note = Ancestral polymorphism is C, Derived polymorphism is R
  VARIANT 304: note = Ancestral polymorphism is L, Derived polymorphism is H
  VARIANT 295: note = Ancestral polymorphism is H, Derived polymorphism is Y
  VARIANT 210: note = Ancestral polymorphism is R, Derived polymorphism is C
  VARIANT 197: note = Ancestral polymorphism is S, Derived polymorphism is L
  VARIANT 193: note = Ancestral polymorphism is A, Derived polymorphism is V
  VARIANT 180..341: note = Derived polymorphism lacks residues 180 to 341
  VARIANT 173: note = Ancestral polymorphism is S, Derived polymorphism is N
  VARIANT 163: note = Ancestral polymorphism is G, Derived polymorphism is R
  VARIANT 140..341: note = Derived polymorphism lacks residues 140 to 341
  VARIANT 118: note = Ancestral polymorphism is A, Derived polymorphism is V
MPTIIVSVDLECSRCHAKIENVLNRIQESQPLSRYKPGDWIEGVGGAKAGHFVLPEVTTLLLVGPRGSVKSTLVNRITRVFDKDDDPFAPDRAQVSCNSQSNGTMFLREYPIPRNSSAVCIYDTRGWSNDLEKNFKMLHQWMTKGISHGETTMWDDDEGNKIGNMKPLGRQYSFLRYKIWKVNFVIFVVDGVAVLESMDDSNKGYTEILRQTFMYPFLSIGDDKPVVVVTHGDRLSIQQRVHVQAELAELLDIPVQQIYDILGSNDDQTDMAVLDMLHYCVRHAEQNLHVKLNYYLEVLGRETLNKMAEKLMGLDAVIEVAIIFLCILDLLLRFSDKLVQP

SEQ ID NO: 619 - protein, 288 aa, Zea mays
  VARIANT 255: note = Ancestral polymorphism is Y, Derived polymorphism is C
  VARIANT 150: note = Ancestral polymorphism is R, Derived polymorphism is C
MEAGLRALGHRYFGGGGGGLGGFAAARATRLRRQRQRRMAAFCSREWQGIPPLPPSTSYRSGVSVYLTSLPTLANVSAVAVNGDGNGAAGGPVGSGVEVARARRMLHVVLVSPLIPGNTGSIARTCAASAVGLHLVGPLGYKVDDTKLKRAGLDYWPYVVVKIHDSWDHFCDYFMKQEGDKRLLAFTKRGTHIHSDFSYRPGDWLVFGSETKGLPQQALEDCCREGLGGGTLRIPMVETYVRCLNLSVSVGVALYEAARQLNYEQLQYQPDELPEEAQELFPAEDIYA

SEQ ID NO: 620 - protein, 179 aa, Zea mays
  VARIANT 12..179: note = Derived polymorphism lacks residues 12 to 179
  VARIANT 15: note = Ancestral polymorphism is P, Derived polymorphism is S
  VARIANT 32..179: note = Derived polymorphism lacks residues 32 to 179
  VARIANT 46..179: note = Derived polymorphism lacks residues 46 to 179
  VARIANT 49: note = Ancestral polymorphism is D, Derived polymorphism is N
  VARIANT 50: note = Ancestral polymorphism is R, Derived polymorphism is I
  VARIANT 73..179: note = Derived polymorphism lacks residues 73 to 179
  VARIANT 96: note = Ancestral polymorphism is P, Derived polymorphism is L
  VARIANT 162: note = Ancestral polymorphism is T, Derived polymorphism is N
  VARIANT 169: note = Ancestral polymorphism is S, Derived polymorphism is R
MLFSYCSMFNFQDLPDEIRVAQEKKLEELKRQQELQNQLVVQRTLQFRDRKIKFFERRKIERMIRRLEKQQRSNGDGVNNNLSKLREDLEYVRFFPKNEKYVSLFTGGNSQDIVQERNKCRKQIKENLMAAAANGKDLEETASDELRQNYRLPINIVLWLITGSIISISKKEKPPQQTS

SEQ ID NO: 621 - protein, 1496 aa, Zea mays
  VARIANT 1333..1496: note = Derived polymorphism lacks residues 1333 to 1496
MAGVCGSPFCSREASAPAPASCGRWDELLNSSTCANNILATGAAALLAVVLALQLLVRVARNGLRHAPVVALSSPLQRAAVAANACLGLAYLGLAAWMLGTDLTQRASVYLPHRWLVSLAQGLCLLLAGFAFSVRAQLLGAAFLRVWAALLAAYAAFVCCTSVVHMVADKVLAVKTCLDVLSLPGALLLLVYGIRHAREEEEGDGNGGTESSLYKPLNAEAHDDGAADSRVTPFAKAGVFSIMTFWWLNPMMKKGYEKPLEEKDMPLLGPSDRAYSQYLMFLDNLNRKKQLQAHGNPSVFWTIVSSHKSAILVSGLFALLKVLTLSAGPVLLKAFINVSLGKGSFKYEGFVLAAAMFAIKCCESLSQRQWYFRTRRLGLQVRSLLSAAIYKKQQKLSGSSKLKHSSGEIINYVTVDAYRIGEFPYWFHQTWTTSVQLCIALGILYNAVGLAMIASLVVIVLTVICNAPLSKLQHKFQTRLMEAQGVRLKAMSESLIHMKVLKLYAWETHFKKVIEGLREIEIKWLSAFNLRKSFNGFVFWTSPVLVSAATFLTCYLLKIPLDASNVFTFVATLRLVQDPIRQMPDVIGVVIQAKVAFTRITKFLDAPELSGQARKKYCVGDEYRIVMNSCSFSWDENPSKPTLKNINLVVKAGEKVAICGEVGSGKSTLLAAVLGEVPKTEGMIQICGKTAYVSQNAWIQTGTVQDNILFGSSMDRQRYQETLERCSLVKDLEMLPYGDHTQIGERGVNLSGGQKQRVQLARALYQNADIYLLDDPFSAVDAHTATSLFNEYVMGALSDKTVLLVTHQVDFLPVFDSVLLMSDGEIIRAAPYQDLLAHCQEFQNLVNAHKDTIGVSDLNRVRSHRTNENKGSIDIHGSLYKESLKPSPADQLIKTEEREMGDTGLKPYILYLRQNKGFFNGSMGILCHVIFVCGQIAQNSWMAANVQNPDVGTLKLISVYIAIGFITVFFLLFRSIALVVLGIQTSRSLFSQLLNSLFRAPMSFFDSTPLGRILSRVRILKQIVHIPEIYWVVSSDLSIVDLDVPFGLMLALGASINAYSNLGVLAVVTWQVLFVSVPMMVLALRLQKYYLASAKELMRINGTTKSALANHLGESVAGSITIRAFEEEDRFFEKNSELVDKNAASYFYNFAATEWLIQRLETMSAAVLSFSAFIMALLPAGTFSSGFIGMALSYGLSLNNSFVFSIQNQCQLSNQIISVERVNQYMDIPSEAAEVIEENRPSPNWPQVGRVELRDLKIRYREDAPLVLHGITCTFEGGDKIGIVGRTGSGKTTLIGALFRLVEPTGGKIIIDSVDITTIGLHDLRSRLGIIPQDPTLFQGTIRYNLDPLEQFSDQQIWEVLDKCQLLEAVQEKEQGLDSLVVEDGSNWSMGQRQLFCLGRALLRRCRVLVLDEATASIDNATDAILQKTIRTEFRDCTVITVAHRIPTVMDCSMVLALSDGKLVEYDKPTKLMETEGSLFRDLVKEYWSYASNGNI

SEQ ID NO: 622 - protein, 956 aa, Zea mays
  VARIANT 674..956: note = Derived polymorphism lacks residues 674 to 956
MHLQLKPFRNAARSRCSRAAPARGPAAGLLFFPVAVAAASSSSPSSSLSSRPSSSLVQLRRWSRRKTIGCVASSSSARSETPSSSSGASAAAASTSAMAEARVTAVATIKVTAGGFLNSLRPSRAIDDIKDLIGRSLYLELVSSHLDAKTGREKPTLRSYAHKVADNDADVVTYEADFDLPPGFGEVGAVLVTNEHHTEMFLEDVSLYTNSDSGSDSDSDSGSDDARAAPLLAIRCRSWVEPKSSDAAGDGKRVFFANKPYLPGQTPPGLRSYRSKDLEEKRGDGRGERKPSDRIYDYATYNDLGDPDSDAAKARPVLGGSAQFPYPRRCRTGRPMSAKDPSTETRSGDNYVPRDEAFSEVKNLQFSVTTLRSVLHAAVPAVQSTLIDPNLAFPSFFVIDKLFEDGVELPKADQLGFLRSVVPRLLQLLRDGPGDQVLLFDRPANVQKDKFAWLRDEEFARETLAGMNPYAIELVREFPLKSKLDPAVYGQAESAITAEVLERQMGRVMTVAEAVSQKRLFMLDYHDLFLPYVHRIRAQAHTTMYGSRTIFFLCNDGTLRLLAIELTRPASPTQPQWRRVFTSSTDTTESWLWRMAKSHVRAHDSGHHELISHWLRTHCAVEPYIIAANRQLSEMHPVYQLLHPHFRYTMRINALARSALINAGGIIELSFSPQRYAIELSSVAYDKLWRFDTEALPADLVRRGMAVEDPAAEHGLRLTIPDYPFANDGLLVWDAIKGWVTAYVARFYPDASTLAGDAELQAFWTDVRTVGHGDKKDAPGWPALDSPDSLAHALTTIIWVASAHHAAVNFGQYDFAGYFPNRPSIARTNMPVEEPVDATALAAFLDNPDQALRECFPSQVQATLVMAVLDLLSTHSPDEEYLGGMETAPWNDDATVQDAYGKFNARLKEIEGIMDERNKDRRLKNRCGAGILPYQLMKPFSQPGVTGMGIPNSTSI

SEQ ID NO: 623 - protein, 253 aa, Zea mays
  VARIANT 33: note = Ancestral polymorphism is K, Derived polymorphism is N
MEPDADEDYMGDLSRFLPPSPSSSPPKNLGRRKQPSTQAQAQPRAKRGKGVPWQERRRQERERKQREEDARTMAGLAEAIPESNVGFRMLRQMGYDPDSRAGAGAEPVGIEIRRSRAGLGAEEPVLAPAPAPAPVEKPREVSERERRQQEEMAVELRARKSTQWKGRRVVWDYRKAERALAQLENREVEPQAPEGEDKEKGAEEEEDVITEEDLQQILSKLRDQYQYCLYCGCKYESLEVLSKECPGPDEDDH

SEQ ID NO: 624 - protein, 280 aa, Zea mays
  VARIANT 64: note = Ancestral polymorphism is A, Derived polymorphism is P
MSSAGPPPPLPPWSRLEGQVVLVTGASSGIGRDFCLDLARAGCRVVAAARRADRLRSLCDEINASAASRAPRAVAVEVDVAAGGSALEAAVQKAWDAFGRIDALVNNAGIRGAVHSPLDWPEDEWDRIIKTNLTGSWLVAKHVCRRMRDAKLKGSVVNITSIAGLNRGHLPGSTGYASSKAAVHYATKIMALELGADRIRVNSIAPGLFKSEITAPLFQKRWLSTVASKIVPLKEHGATDPALTSLVRFLIHEASSYVTGNIFIVDSGATIPGVPIFSSL

SEQ ID NO: 625 - protein, 94 aa, Zea mays
  VARIANT 13: note = Ancestral polymorphism is A, Derived polymorphism is V
  VARIANT 14: note = Ancestral polymorphism is S, Derived polymorphism is P
  VARIANT 22: note = Ancestral polymorphism is P, Derived polymorphism is S
  VARIANT 29: note = Ancestral polymorphism is D, Derived polymorphism is N
MATSAETTSELDASISTTSFSPDVTTNADLTLDPGVLTSASSSASASHQPSPAIETTCSLQNGWCYAGQQDPPDQQDHYSSWSVVPVSKILPAL

SEQ ID NO: 626 - protein, 332 aa, Zea mays
  VARIANT 75: note = Ancestral polymorphism is A, Derived polymorphism is V
MSEHCKGGRFWPTLQNACIPVMELIDWELSQPSNVSDIFCSYGIDSAWKYFVESLKSATTDTGRNIRREHLLVIADSLSVTGQFHALSSQGLKQQRTRLSISSPFSEACFSRPAQSFINAAKQCSVDNLCGSLDAVAWGKEPFNGTSGPFEIMHSGKPHEPEQNESIYDFLCSSKVRNFEKNHLDTRRQSTENASICRLACKSSKGSTTVNGVAITIDQDFLHAKVSIWDNIIDMRTSLQNMLREYPLNGYVAEPDKSQLIEALKFHSRGAEKIGVGVREIKIGLNPSHPGNYVSHFKDEVKTERVWRSELRRSSGLEVYVNSTQWDYVRWA

SEQ ID NO: 627 - protein, 133 aa, Zea mays
  VARIANT 28: note = Ancestral polymorphism is E, Derived polymorphism is G
  VARIANT 32: note = Ancestral polymorphism is R, Derived polymorphism is S
  VARIANT 36: note = Ancestral polymorphism is P, Derived polymorphism is H
  VARIANT 37: note = Ancestral polymorphism is G, Derived polymorphism is D
  VARIANT 41: note = Ancestral polymorphism is D, Derived polymorphism is Y
  VARIANT 66: note = Ancestral polymorphism is T, Derived polymorphism is I
  VARIANT 68: note = Ancestral polymorphism is G, Derived polymorphism is E
  VARIANT 71: note = Ancestral polymorphism is T, Derived polymorphism is I
  VARIANT 73: note = Ancestral polymorphism is R, Derived polymorphism is H
  VARIANT 89: note = Ancestral polymorphism is T, Derived polymorphism is I
  VARIANT 99..133: note = Derived polymorphism lacks residues 99 to 133
  VARIANT 106: note = Ancestral polymorphism is N, Derived polymorphism is K
  VARIANT 113: note = Ancestral polymorphism is G, Derived polymorphism is V
MRSKLQPEMEQLRRHYSVLVKGGGKYDEEIYSIKLPGNPTDIGEGKPENQNHGLIKFDVGNVVMVTGGRNTGRVGVIKNREKHKGSFETIHVEDSMGHQFATCMGNVFTIGKGNKPWVSLPKGRGIKLSIIEE

SEQ ID NO: 628 - protein, 191 aa, Zea mays
  VARIANT 156..191: note = Derived polymorphism lacks residues 156 to 191
  VARIANT 169..191: note = Derived polymorphism lacks residues 169 to 191
MCSRAFACVCCASALHLHVVELPVSQIQSLEESAELLRERCLKFHKGCCNYAEGLGEAYDGDIAFASSLETFGGGHNDPISVAFGGPVMTKFTIALREIGTYKEVMRSQVECLLNDRLLNFVDIDLHDVNDAHKRFDKASLSYDQVSYLIMTRRCWRPQGSSSRGSSPWRISIASMTSLPATFCTNSTNGS

SEQ ID NO: 629 - protein, 163 aa, Zea mays
  VARIANT 127: note = Ancestral polymorphism is G, Derived polymorphism is R
MATDAILETIKPRGSEEQLPVTTAGTGIELRRRISSFSARVRPSSSVAAFRRARSMPSVKALAAAGALRRWWEWGLGWVTAPFATRALELGGGDDDDDDDDEARPLGLGGCRCAGGWRHTLFRLRAGARRLLGRDGRPLKAPAPQDFGYDSVSYKQNFDDGEA

SEQ ID NO: 630 - protein, 143 aa, Zea mays
  VARIANT 103..143: note = Derived polymorphism lacks residues 103 to 143
  VARIANT 56: note = Ancestral polymorphism is R, Derived polymorphism is K
MGVTYQRLLSQGSQSQRPRGGGVRARAWVLLRWAAVRLSCAARRRYWCGGAGRARKLAWAGLCGRGGTAAERKGGSGRRSATAGGGAGAGAGAGVLGYDSASYARNFDDGAWKAEEGVSWAGPGGAFFPGANIGGAAVDTARL

SEQ ID NO: 631 - protein, 294 aa, Zea mays
  VARIANT 126: note = Ancestral polymorphism is G, Derived polymorphism is R
  VARIANT 122: note = Ancestral polymorphism is C, Derived polymorphism is Y
  VARIANT 119: note = Ancestral polymorphism is G, Derived polymorphism is R
  VARIANT 109: note = Ancestral polymorphism is L, Derived polymorphism is P
  VARIANT 93: note = Ancestral polymorphism is G, Derived polymorphism is R
  VARIANT 89: note = Ancestral polymorphism is K, Derived polymorphism is N
  VARIANT 75..294: note = Derived polymorphism lacks residues 75 to 294
  VARIANT 74: note = Ancestral polymorphism is A, Derived polymorphism is V
  VARIANT 51: note = Ancestral polymorphism is R, Derived polymorphism is C
  VARIANT 15: note = Ancestral polymorphism is P, Derived polymorphism is L
MASLTTKTSSLLALPAATTALTNLSIYPCRIEAVAPRGRRRTLAYHHGHLRGAGDLAYPTHPPPPSWICPYLHVGSKRLLLAGDNALWKPNSRGWLVAPQHLDSIGEWLSMEVLAKAAGLECIVSGQQAPLRVDCPRTLKLQVLLVHLNKCRELAVDIWNIKKTNFTYILADLVANSHIVASENDDLVILARKHEGRASNVQHIVDGYYLRCGFVVALPRYRRLDPDLVTLHGYLRYLQRRRLAVKQQLLVGAHRAVEMKALVIVDCASTFQAERVRDGNVATTLGRWAAGGPR

SEQ ID NO: 632 - protein, 607 aa, Zea mays
  VARIANT 216: note = Ancestral polymorphism is G, Derived polymorphism is R
  VARIANT 222: note = Ancestral polymorphism is G, Derived polymorphism is D
MFAWVLAAAAATDGVPAESPRPAGCPTAERCGDIAVPYPFSLERRCAINNDERFHLNCTMSTNKQLLLHGKSPPLEYTVVCSPTCMQNPSMENPRNDGKCNHDGGCCPLDLPKGAKSIRAVFYLLNKTSPLWKNYPCNYVTVMDRTRFKFNTTYLTSSAFYDINNGEVSAVMEWKIEEKRCKDPKIHKHGSYACVSNNSECTNTSDDAGYACLSIGLGVGSGICFVVLALISPYIMRKIKTRRIKERFFKQNHGLLLQQLISRNANISERMIITLREVEKATNNFDRERVIGGGGHGTVFKGNLDLNVVAIKKSKIVVQREINEFINEVVVLSQVNHRNVVKLLGCCLETEVPLLVYEFISNGTLYHHLHVHGPISLSWADRLRIALEVARALSYLHSAASMPIFHRDIKTTNILLDDNLTAKVSDFGASRYIKIDQTGVTTAIQGTIGYLDPMYYKTCRLTDKSDVFSFGVVLVELLTRRKPFCYQSDNGDDLVTHFTSLLIEGKLEDIIDPQIMEEEDGEILKVARLATLCTELRGEDRPPMREVEMTLENLILKKRQVLFNKSSWRYDTNQTRDSTRLNEFVSNEASRQYTMEEEILLSATYPR

SEQ ID NO: 633 - protein, 160 aa, Zea mays
  VARIANT 125: note = Ancestral polymorphism is G, Derived polymorphism is R
  VARIANT 105..160: note = Derived polymorphism lacks residues 105 to 160
  VARIANT 104: note = Ancestral polymorphism is V, Derived polymorphism is I
  VARIANT 91: note = Ancestral polymorphism is G, Derived polymorphism is R
MNPWDGVYSHVVVGLPGISAGADPGPWPPGPRPGAQAHLFFRRSWATAERRARDGLTRANPSSPDFASSPRAAPRPRPPLRHAPRPSLLAGWDEESVLLAAMVVEDTPVRESRRKRRASTSSVGGSARSSTRKRRPRRQSPAKIPPVVFALDDEKSDTAT

SEQ ID NO: 634 - protein, 577 aa, Zea mays
  VARIANT 313..577: note = Derived polymorphism lacks residues 313 to 577
MGTALDAAAFGSVDGVVGEIMRLHRALPARPAPEEAEAAEALVRAADREERARLDAAARLRRPPAVPDELFGVALEMHRALAAFHCREQKRDAARLLELDALHGLFDDLIQRASQCVPSSSGSSSTRAAPRVAAATTAAASSSFAAASSSAVAADSGAHRYSSMEPNGFSAPRMVTGMGRVSMDDSYVKKAKAAVWDDRVVASSSHMPRGAVSANSVATPVDGGYGDDNQKLTLIKLASMIEVAAKKGARDLNLQGKLMNQIEWLPDSIGKLTGLVTLDISENRILALPEAIGMLSSLAKLDLHANRIAQLPESIGDLSNLIYLDLRGNQLASLPASLGRLVKLEELDVSANHLTSLPDSIGSLTRLKKLIAETNDLDELPYTIGNCVSLVELRVGYNHLKALPEAVGKLESLEVLSVRYNTIRGLPTTMASLTKLKEVDASFNELESIPENFCFVTSLIKLNVGNNFADLQSLPRSIGNLEMLEELDISNNQIRVLPDSFGNLQRLRVLRAEENPLQVPPRDVALKGAQAAVQYMAEYVAKKATRSQPMKTKKTWAQFCFFSRPNKRKHDRIDTAS

SEQ ID NO: 635 - protein, 446 aa, Zea mays
  VARIANT 92: note = Ancestral polymorphism is P, Derived polymorphism is L
  VARIANT 91: note = Ancestral polymorphism is L, Derived polymorphism is R
  VARIANT 76: note = Ancestral polymorphism is G, Derived polymorphism is R
MATASTTLLLSLAFLAFAWAASPSPSPDAEAISRFQEYLRIDTAQPAPDYAAAVAFLRKQAADAGLEARTLELVAGKPLLLLRWPGRRPSLPSILLNSHTDVVPSEPNKWDHPPFSAALDEPSGRIYARGSQDMKCVGMQYLEAIRRLRSAGFVPDRNIYITFVPDEEIGGHGGVEPFVSSKEFKDMNVALVLDEGLASPGEEYRVFYAERSPWWLTIKATGAPGHGAKLYDGSAMENLMKSVEAIRRFRTSQFDLVKSGEKAEGDVVSVNFAYLKAGTPTPTGFVMNLQPSEAEVGLDIRIPPSAHVEALERRLVEEWAPPSRNLTFEFKQKMSVLDNFGKPAMTAADSTNPWWTLLEEAVKSADGKLGKAEIFPASTDARYFRKIGLPAFGFSPMANTPILLHDHNEFLSKDEYLKGIGIYESIIRALATHEDGGKDDESRAEL

SEQ ID NO: 636 - protein, 164 aa, Zea mays
  VARIANT 75..164: note = Derived polymorphism lacks residues 75 to 164
  VARIANT 18: note = Ancestral polymorphism is G, Derived polymorphism is W
  VARIANT 8: note = Ancestral polymorphism is R, Derived polymorphism is W
MFNYQQFRHIGAPGWQLGWTWAKKEVIWSMVGAQTTEQGDCSKFKGNTPHCCKKDPTIVDLLPGTPYNMQIANCCKAGVINTFNQDPANVASSFQISFGLAGTTNKTVKVPKNFTLKTPGPGYTCGRAIVGRPTKFLSTDGRRVTQALRVEVQPHHIIQSVPIP

SEQ ID NO: 637 - protein, 351 aa, Zea mays
  VARIANT 121: note = Ancestral polymorphism is V, Derived polymorphism is M
  VARIANT 122..351: note = Derived polymorphism lacks residues 122 to 351
  VARIANT 124: note = Ancestral polymorphism is L, Derived polymorphism is V
  VARIANT 130: note = Ancestral polymorphism is L, Derived polymorphism is I
MADEVELAADQHVRYIVTVEKVKSETTLPFPPRVPLTPLQLPTPPLVPAQKKDSFESLVMEHIRLNGAYWGLTTLDLLHKLHAVDAAEVVDWIMSCYHPESGGFGGNVGHDPHVLYTLSAVQVLCLFDRLDVLDVDKVADCILFSQILNWVCAVGVCKIDIYQSPDVAGLQNKDGSFSGDIWGEVDTRFSYIALCTLSLLHRLHKIDVQKAVDFVVSLFCCVGALAITGSLHHIDRDLLGWWLCERQCKDGGLNGRPEKLADVCYSWWVLSSLVMIDRVHWIDKEKLTKFILNCQDKENGGISDRPDNAVDIYHTYFGIAGLSLMEYPGVKPLDPAYALPLHVVNRIFLKK

SEQ ID NO: 638 - protein, 218 aa, Zea mays
  VARIANT 21..218: note = Derived polymorphism lacks residues 21 to 218
  VARIANT 34..218: note = Derived polymorphism lacks residues 34 to 218
  VARIANT 49: note = Ancestral polymorphism is P, Derived polymorphism is L
  VARIANT 50: note = Ancestral polymorphism is E, Derived polymorphism is G
  VARIANT 59: note = Ancestral polymorphism is G, Derived polymorphism is W
  VARIANT 65: note = Ancestral polymorphism is G, Derived polymorphism is S
  VARIANT 84: note = Ancestral polymorphism is Y, Derived polymorphism is S
  VARIANT 100: note = Ancestral polymorphism is A, Derived polymorphism is T
  VARIANT 102..218: note = Derived polymorphism lacks residues 102 to 218
  VARIANT 106: note = Ancestral polymorphism is R, Derived polymorphism is H
  VARIANT 117: note = Ancestral polymorphism is G, Derived polymorphism is W
  VARIANT 118..218: note = Derived polymorphism lacks residues 118 to 218
  VARIANT 120: note = Ancestral polymorphism is N, Derived polymorphism is K
  VARIANT 129: note = Ancestral polymorphism is S, Derived polymorphism is L
  VARIANT 147: note = Ancestral polymorphism is A, Derived polymorphism is V
  VARIANT 188: note = Ancestral polymorphism is T, Derived polymorphism is I
  VARIANT 209: note = Ancestral polymorphism is A, Derived polymorphism is V
MLIVPDFDAISDSKLTSDVNWGCMVRSSQMLVAQALIFHHLGRSCRKPPEKPYNPDYIGVLHLFGDSEACAFSIHNLLQAGRNYGLAAGSWLGPYAMCRAWQTLIHTNREQADAVDGKENFPMALYVVSGDEDGERGGAPVVYIDVAAQLCSDFNKGPSTWSPILLLVPLVLGLDKINPRYIPLLKETFMFPQSLCILGGKPGTSTYIAGVQDDRALY

SEQ ID NO: 639 - protein, 443 aa, Zea mays
  VARIANT 171: note = Ancestral polymorphism is R, Derived polymorphism is L
  VARIANT 207..443: note = Derived polymorphism lacks residues 207 to 443
  VARIANT 391: note = Ancestral polymorphism is V, Derived polymorphism is A
MSQPDADAILIPIAAAMDPSPAPAPAPAPAPVPAPTVVEWPEGGALTRDWVAGLASTLDWCSRHLPADRLPAVLPPALVQRLVLAAAAILHREPNLVRVDPRPGQAVVVVGDVHGQLHDVIFLLRDAGFPSEDRIFVFNGDYVDRGAWGLETFLLLLAWKVLLPNCVFLLRGNHESKYCTSVYGFEKEVMTKYKDQGPQIYRKFLRCFEDLPLATIIAGCVYTAHGGIFRGTIVVPSKKSKKGKKGHKYKANFTVDLTSMKLGSLDELLKARRTVLDPPWEGSNLIPGDVLWSDPSLQMGLSPNKERGIGLLWGPDITQQFLRTNHLKLIIRSHEGPDARDKRHDLLGMDKGYTIDHEVECGKLITLFSAPDYPQFQASEERYNNRGAYIVLSPPDFATPVFHSFGAVKPRPAAHPFYDFEQVIDSDEELDLIAMDSGTSSLS

SEQ ID NO: 640 - protein, 387 aa, Zea mays
  VARIANT 36..387: note = Derived polymorphism lacks residues 36 to 387
MATITASASPAMQQTSNKATTSATVASPAPVRYRPSLLVILSACLVLMGAGGPLLLRVYFVHGGERLFLSAMLQISGWPLLLPPICVSLYRSRSRSRSHGVASLLLPPRLAGAAAVLGAFYAISCFLYALGSQALPLSTSSLLLATQLAFTAVFAFLFVGLRFTPFSANAVVLLTIGPAVLGVGPGSGKPAGEASRTYWIGFCEAIAAAALAGLVLPLVEIATARYGRRTGPAARVPPPYATVMQMQAVMGAAGTLVCLLGMAIKSDFQAVPSEAATFGLGKTNYYLVLIWDAISWQLLNLGIVGLITCASSLLAGIMIAVLLPLSEILAVIFLHEKFDGPKGIALVLSLWGFASYLYGEKAQKKTETQKNELQMVKKTVDLESATL

SEQ ID NO: 641 - protein, 1106 aa, Zea mays
  VARIANT 527..1106: note = Derived polymorphism lacks residues 527 to 1106
  VARIANT 531..1106: note = Derived polymorphism lacks residues 531 to 1106
MQREVGPQVAPPLFLHQIQPMPPHAAAAAKKRGHPWPAAGAAEAGAGNWNPRLWDWDSRALTARPSSDALRLAGGQPQPAAEAQRQGAGALNLQLGLQEDSTTPMDASPTAPAAAAAASPPASAAAGQEPVVRPSKRVRSGSPGGAGGGPGGGGTANGGASYPMCQVDDCRADLTSAKDYHRRHKVCETHSKTTKAVVGNQAQRFCQQCSRFHPLAEFDEGKRSCRRRLAGHNRRRRKSQPTDVASQLLLPVNQENAANRTQDIVNLITVIARLQGSNVGKVPSIPPIPDKQNLVEIISKINSLNNATSPAKSPSPEVVVLNTSQEQREQGHDSVDKTTNGIDKQTVPSTMDLLGVFSTGFATSTPVTNTSQSQGSSDSSGNNKSKSHSTEPATVVNSHDISTQDFPAAGFMRSNSTQESRPHIYKQTEHETRPYLSLQLFGSSEEDIPPKMDSLNKYLSSESSNPLDERSPSSSPPITRKFFPIHSVDEEVRHPHITDFGEDATMGEVSTSQAWCAPPLDLFKDLERPLENGSPPNPGYQSCYVSTSCSDHSPSTSNSDGQDRTGRIIFKLFGKEPSTIPGNLRDDIVNWLKHSPTEMEGYIRPGCLVLSMYLSMPAIAWDELEENLLQRVNSLVQSSDLDFWRKGRFLVRTGSKLVSYKAGMTRLSKSWRTWNTPELTFVSPIAVVGGQKISLILKGRNLSIPGTQIHCTSTGKYISKEVLCSAYPGTIYDDSGVETFDLPGQPDFILGRCFIEVENRFRGNSFPVIVASSSVCQELRSLEVELEDSQVLDVSSDGQIHDCRQSKTRVQVLHFLNELGWLFQRASACTLSTRPDVSDLDLTQFSITRFKYLLLFSSERDWCSLTKTLLDILAKRSLVSEELSKETMEMLAEIHLLNRAVKRKSRRMVHLLVQFVVLCLDNSKVYPFLPNFPGPGGLTPLHLAASIENAEDIVDALTDDPQQVGLTCWQSALDEDGQSPETYAKLRNHNSYNELVAQKLVDMKNSQVTITVNGDEIHMDQLGNVDDRKKSGVQALQIRSCSQCAILESGVLRQPMRSRGLLARPYIHSMLAIAAVCVCVCVFMRALLRINSGKSFKWERLDYGTI

SEQ ID NO: 642 - protein, 343 aa, Zea mays
  VARIANT 179: note = Ancestral polymorphism is A, Derived polymorphism is S
MANTAKGKVCVTGASGFIASWLVKRLLESGYHVLGTVRDPGNGKKVGHLWGLEGAKERLQLVRADLLEEGSFDDAVMACEGVFHTASPVVTGSNSKEEMLDSAINGTMNVLRSCKKNPSLKRVVLTSSSSTVRIKDEADLPPNVLLDESSWSSIEFCESLQIWYAVAKILAEKAAWEFAGEHRIDLVTVLPTFVVGPTLSPELGPTASDVLGLFQGTSAKVCARPEPSRQSHRPLSLLQERRGSSRRTGGWGTSTSTTWRGATCWRTRPRAPEGGTSAARRCWTAATSPPCSRGGSQRTPSRGACPAPTASSRTASTRPRPARWGWRNSRASRRCSTTPSPRS

SEQ ID NO: 643 - protein, 390 aa, Zea mays
  VARIANT 267: note = Ancestral polymorphism is S, Derived polymorphism is C
  VARIANT 173: note = Ancestral polymorphism is A, Derived polymorphism is V
MVKDTRYYDVLGVDPSATESEIKKAYYVKARLVHPDKNPNDPQAAEKFQELGEAYQVLSDPTQRQAYDSHGKDGISTEGIIDPATIFAILFGSELFEEYIGQLAMASMASLDNFGEDEQIDARKLQERMQAVQKDREEKLAETLKNRLHIYVQGNKAEFIQHAEAEVSKLRNAAYGVVMLNTIGYVYSRQAAKELGKKVMFLGVPFIAEWFRDKGHFIKSQVTAATGAIALMQLQDNLTKYMSAEGQYTEEELEMYMENHKKVMVDSLWKLNVADIEATLSHVCQMVLQDSSARKEELRLRAKGLKTLGRIFQGAKVNPSEGETSQTKNIDNMDGNDGSSPDSSPNREAQFTPNQPPVPSPYVEAPHVNGVYCPFPMPAAPPGARRDRIP

SEQ ID NO: 644 - protein, 143 aa, Zea mays
  VARIANT 19: note = Ancestral polymorphism is E, Derived polymorphism is K
  VARIANT 39..143: note = Derived polymorphism lacks residues 39 to 143
  VARIANT 48: note = Ancestral polymorphism is R, Derived polymorphism is H
  VARIANT 53: note = Ancestral polymorphism is A, Derived polymorphism is V
  VARIANT 87: note = Ancestral polymorphism is Y, Derived polymorphism is H
MVLIVGGRTGELEQGQGDEGKDAAAATEADALGEGRLLRLRGRPSRPRSGHTVVIIGKSKVVVFGGFLDKRFLADVSLYDVENKLWYTPECTGNGSDGQAGPSPRAFHIAVVIDCNMFIFGGRSGGKRYAVRQICWSIERQDC

SEQ ID NO: 645 - protein, 325 aa, Zea mays
  VARIANT 227: note = Ancestral polymorphism is T, Derived polymorphism is I
MFPITDRLGLLATGIAGEGRSLAHEARNQTAEFCFNWGYEMPPYVLAQWPKNLRKILGGGMRQVGVMCAGAHTLWESLLGATIVDMAVIITPANDYELPASVLAALEPKDTKPSALQKAEDIIGTMLAKGFILGRDTLDKAKALDEKHQLTSTATARVSSFDKRIGLSEKISVGTSVVNDKVKEMDQKYQVSEKTKSVLVAAEQSVLTAGSAIMKNMYVLTGAAWVTGAFSKVTSAANDVGAKAKEKIAVEQEDKNAEGGPGQANILEIPAAHRELDSEFANIHVSETSEDVPMSSMTVPLLQMRSPARTVHQLKFLKSQKLCRD

SEQ ID NO: 646 - protein, 305 aa, Zea mays
  VARIANT 201: note = Ancestral polymorphism is P, Derived polymorphism is L
MELNSIPYIASWSSSSSCFYYSYSRCACRGTRDGKLVTKASAAGRKRAADSVCSQLSEQGTEDSISGPRSSWRIRRRDLASAILLPFLIPRVNISIAAEIYDASIIRSGVRSVLTKGKAAGVLRLVFHDAGTFEIGDGSGGMNGSIIYEVDRPENIGLNRSIKILRKAKEGIDNVQKVSWADLIAVAGAEAVALCGGPEIPVRLGRVDSSSADPSGKLPEETLDAASLKTLFSKKGFSTYCVFLCEEAGNGMAAMVGLRTDWALTEDDECLRWIRIYAEDQARFFDDFRDTYIKLVDSGASWRTA

SEQ ID NO: 647 - protein, 114 aa, Zea mays
  VARIANT 7: note = Ancestral polymorphism is V, Derived polymorphism is A
  VARIANT 15: note = Ancestral polymorphism is Y, Derived polymorphism is C
  VARIANT 32: note = Ancestral polymorphism is A, Derived polymorphism is V
  VARIANT 38: note = Ancestral polymorphism is A, Derived polymorphism is V
  VARIANT 52: note = Ancestral polymorphism is G, Derived polymorphism is V
  VARIANT 60: note = Ancestral polymorphism is L, Derived polymorphism is P
  VARIANT 63: note = Ancestral polymorphism is L, Derived polymorphism is P
  VARIANT 65: note = Ancestral polymorphism is E, Derived polymorphism is D
  VARIANT 78: note = Ancestral polymorphism is H, Derived polymorphism is D
  VARIANT 83: note = Ancestral polymorphism is C, Derived polymorphism is Y
MDICFPVGTKLFIHYTKPVNFLHTGAPKTWYAVPGDRASELEEVIHVHGYGGNPDCLASLAVLGENTTLMSPDVLVAHGVPCCRLVQYPGAFVVTFPRAYHIGFSHALLDFHLH

SEQ ID NO: 648 - protein, 195 aa, Zea mays
  VARIANT 184..195: note = Derived polymorphism lacks residues 184 to 195
MTTTSSSRSSQAALAETRPPQKQQQQSSEYTGVRLRQWGRWAAEVRVPGTRQKLWIGTFETDRQAALAYDAAVFCFYGVHLPRRRRFNCPAAPRPDIPAWVRVQLNVASVKAIAERHARVVDARLPPLVAAAGAGGPSAGGGASAPPPGDDRTDGMDDGEALVAGASAADESLCSVPPLRRRRRTSARRPEPGES

SEQ ID NO: 649 - protein, 161 aa, Zea mays
  VARIANT 108: note = Ancestral polymorphism is E, Derived polymorphism is K
  VARIANT 77: note = Ancestral polymorphism is P, Derived polymorphism is L
  VARIANT 70: note = Ancestral polymorphism is G, Derived polymorphism is D
  VARIANT 64: note = Ancestral polymorphism is A, Derived polymorphism is T
  VARIANT 43: note = Ancestral polymorphism is R, Derived polymorphism is C
  VARIANT 32: note = Ancestral polymorphism is R, Derived polymorphism is W
  VARIANT 14: note = Ancestral polymorphism is R, Derived polymorphism is W
MARAPRSSRAARRRAQDRLRRGSAHAARTRGRWAAQLRIPGTRARLWIGGFEQALQAALAYDAAIFYLYGALRLPSPRRFNFPAAPRPDIPEDVRAMLSRDDIKVIAKSHARSLARFFLGPQPAVSPAATSPPPPPAPAAAGEATATSDSDSSNDSNYYKG

SEQ ID NO: 650 - protein, 124 aa, Zea mays
  VARIANT 16: note = Ancestral polymorphism is I, Derived polymorphism is T
  VARIANT 28..124: note = Derived polymorphism lacks residues 28 to 124
  VARIANT 99: note = Ancestral polymorphism is T, Derived polymorphism is I
MFICAVDTYTGSFRAINHVFTLSSLLVQALVAPASLIAHNAGVEGEVVVEKIKESDWEVGYNAMTDKYENLMEASVIDPTKVTKCALQNAASVAGMVLITQAIVVEKPKPKPQVAEPPEGALTV

SEQ ID NO: 651 - protein, 394 aa, Zea mays
  VARIANT 152: note = Ancestral polymorphism is T, Derived polymorphism is M
  VARIANT 190..394: note = Derived polymorphism lacks residues 190 to 394
  VARIANT 214: note = Ancestral polymorphism is W, Derived polymorphism is L
  VARIANT 216: note = Ancestral polymorphism is F, Derived polymorphism is Y
  VARIANT 231..394: note = Derived polymorphism lacks residues 231 to 394
  VARIANT 237: note = Ancestral polymorphism is R, Derived polymorphism is W
MDAPVAESAEVMALNRKQILSIWRSSPADMVEAVADNIQQLVGQQPQRPRRNVRGEHGAEEISAVDGVTGLAGGTPVPPPMNMRFIPNTMPTTDAMDVGSSAPRTPSTSSSERTPSPLQRVEVRQVWAHNFDGEAKLIESLLPKFQYVAVDMEFSGMVYRPVGPVYKLEPAERYRLLRCTVDTLHLHPVQLGLTLFDAGCVLLGGHGGATQYVWQYNFRDFDVRQHRHVAESVAALWSRGVDLDWMRQYGIAAEVAFGPHLRKWTRAGLGRADVVTSCGGYDLAYLVKMMFGTGFRMPRSTTEFDAVVKAVLHRRRVFDIGEMARLFPREHLRRGLDNIAGQLNAAWFAADAARQASYDSLRTCYTFMNLREIYFDGDDKLAGVDRILAEVTVF

SEQ ID NO: 652 - protein, 129 aa, Zea mays
  VARIANT 14: note = Ancestral polymorphism is I, Derived polymorphism is N
  VARIANT 4: note = Ancestral polymorphism is L, Derived polymorphism is P
MSKLKDPDAEFEIIQILVKECNKIEGHVQQWLKGLKVGIVDIFAILHGFPDNVRTDQKGEFWVAIHYRRSMYPRLMSCHVKLRKFLLSFPIPAKYHYLMHIDSKLYALIIRDIPMAKCFTSWRTGRERW

SEQ ID NO: 653 - protein, 102 aa, Zea mays
  VARIANT 56..102: note = Derived polymorphism lacks residues 56 to 102
  VARIANT 41..102: note = Derived polymorphism lacks residues 41 to 102
  VARIANT 37: note = Ancestral polymorphism is E, Derived polymorphism is V
  VARIANT 15: note = Ancestral polymorphism is R, Derived polymorphism is M
MRSREAAFAREDHLRVRFQDLVMAYNDLEDYSNVLHEEVHQLYYQLHPDDAPGAAEAEGGVVLADGGEPDADSEKEAAPVFAPGGNSPVGSDVSGIDTDAED

SEQ ID NO: 654 - protein, 138 aa, Zea mays
  VARIANT 13: note = Ancestral polymorphism is R, Derived polymorphism is W
  VARIANT 12: note = Ancestral polymorphism is D, Derived polymorphism is E
MAQWSSVAASLDRWIGLGLGPCRCGSPPAPSRAAMPRRGRARRNGGKVVGCASVPREQAELPPLAVDGTEEEGVGGCGACGGAGWVLCDFCQGKKNNVKSETGSRVYRRCPTCKAAGFILCPRCRVYKCVTFPESTES

SEQ ID NO: 655 - protein, 170 aa, Zea mays
  VARIANT 84: note = Ancestral polymorphism is R, Derived polymorphism is C
  VARIANT 78: note = Ancestral polymorphism is R, Derived polymorphism is W
  VARIANT 74: note = Ancestral polymorphism is R, Derived polymorphism is K
  VARIANT 28: note = Ancestral polymorphism is A, Derived polymorphism is V
MFLGGAGEQLPHRPAVRLPEHGADPVRARAGAVAQREARGVDPDPPTAAAASDAFSVSVSVHHHRPPVVAGRRRRRRRRRVAHRNVILPRRRHGLVGPAARAVGTREAPHLGGAGVDVEEARLVGALPLQRKAAVKLLREHHHRRSSPPSNSHTQGERGWERYMSSGLES

SEQ ID NO: 656 - protein, 206 aa, Zea mays
  VARIANT 70: note = Ancestral polymorphism is S, Derived polymorphism is F
  VARIANT 116: note = Ancestral polymorphism is G, Derived polymorphism is D
  VARIANT 148: note = Ancestral polymorphism is D, Derived polymorphism is Y
MVVLTEEFHGGLSLKRKGAHEPGLFDVDAGATKMRRLACPDGPRGGADQAVTAAWEDDVAMGDAAPAATSPSPSDDGRAVVVYRDGDGESVRGSCSSRRIGIDAPRLALRDGTGAGADWIRAMLREADSRTVRQLLAGAAKEHGSDPDLALAVVPWVAPAPAEAEAEDGDDREAAMDVEGDPPIHSALQAGAHISLPPALALRVRV

SEQ ID NO: 657 - protein, 358 aa, Zea mays
  VARIANT 73..358: note = Derived polymorphism lacks residues 73 to 358
  VARIANT 182: note = Ancestral polymorphism is C, Derived polymorphism is F
  VARIANT 261: note = Ancestral polymorphism is D, Derived polymorphism is G
  VARIANT 274..358: note = Derived polymorphism lacks residues 274 to 358
  VARIANT 280: note = Ancestral polymorphism is S, Derived polymorphism is N
MVRGYMSNTELETAVHAFGSRCSNISRVYSFLICPHFTYILFLLSLRDNTNLLSALERWVIEISDKPKQRESEPAFKATLIVENMHLHILPTMNPDGFALRWHGNANNIDLNRDFPDQPKLKFFPVNNDIDYRQPETRAIMNWVKQEHFTTSASLHGGALVANYPWDGTRDTRAQYDFVSHCNILNNDFTSYNKHYYGCPDDKTFQHMASVYSRSHYNMSLSKEFEGGITNGAFWYPIYGGMQDWNYIHGGCFELTLEISDTKWPKADELPIIWEHSRMSMLNLLASLIKVICFHNCKNGTAKQAKISMAYSFIHRPLSDEERRVTCNDQRREVFVAQDIANKEIDRTVAFDKAWVSL

SEQ ID NO: 658 - protein, 99 aa, Zea mays
  VARIANT 32: note = Ancestral polymorphism is G, Derived polymorphism is E
MKSLLRSNVKVHNVTIETSLDAPLTDGIVPDGTGIALPLGGLPLLSSFRAALAFGSEMSGGILDIHVDHLWIHDSSKGPMMFPHVAQLVVNQMQTHTAD

SEQ ID NO: 659 - protein, 466 aa, Zea mays
  VARIANT 77: note = Ancestral polymorphism is W, Derived polymorphism is C
MAVSPELEGLRRIAPSRFVSFAFPNPFLGHASNPYGGGDDGDAGECVRVAVLDSPLPAPPVPATAAMLVPSGRHRDWIFSTRAGHLHLLLSATRFSRLILVGPELSAPSPRVVSCARRRPDPDPDPAHARLLPLLLALCPVAAFRGNAVPDVPLLTFQDDLLRLAPIEFVAGPVVGEMVVEDVAVDCSPSRPAELRRRLRFKRMPCLVQTQVRLRQSHASPSLSLEALEGSSGELLQPEVGGPLAQPYLQAMVAGLAVTAPSIEKSIQSGARPRCLCAGVGGGSLLMSLRVGLQFDVLGIEADGVVLDVARSHFGLVEDEFLRVHVGDAIQTIEGFAAGQGEPGMNFSAVMVDLDSSDAMCGVSAPPLEMARGSVLLSVRTILDHHGLLILNVIPPPADKTFYKAVTDLLRQFFSELYEIDVGNGENFVLVATVSPVETTATGDPGQFLTDLRNSAGDFLERIRKI

SEQ ID NO: 660 - protein, 466 aa, Zea mays
  VARIANT 221: note = Ancestral polymorphism is R, Derived polymorphism is I
MNGAGGSHHQQQQRLRQQQQQALLMQQALQQQQQQQYQSGVLAAAAAAAMTQMEPVSNGNLPPGFDPSTCRSVYVGNVNPNVTESLLIEVFQSAGLVERCKLIRKEKSSFGFVDYYDRRSAALAIMTLHGRHVYGQAIKVNWAYASTQREDTSGHFHIFVGDLSSEVNDATLYACFSAYPSCSDARVMWDNKTGRSRGYGFVSFRNQQARATWTFFLEFCITVTIFILEAETAITEMTGKWLGSRQIRCNWATKNNSEEKPETDNHNAVVLTNGSSNNSATDASQDAGSKEPPQNNPDCTTVYVGNLGHEVNRDELHRHFYNLGVGAIEEVRVQQDKGFGFVRYSTHGEAALAIQMSNGSVVRGKPIKCSWGVKPTPPGTGSKPLPPPAATYQPAVAMPGVPQGFTTAELLAYQRQLALSQAAAGQQHAGLAGQVSAAGLLAAAGSQALYDGYPNQSSAQQLMYYN

SEQ ID NO: 661 - protein, 329 aa, Zea mays
  VARIANT 6: note = Ancestral polymorphism is E, Derived polymorphism is D
  VARIANT 10: note = Ancestral polymorphism is F, Derived polymorphism is S
  VARIANT 11: note = Ancestral polymorphism is A, Derived polymorphism is T
  VARIANT 41: note = Ancestral polymorphism is A, Derived polymorphism is V
  VARIANT 51: note = Ancestral polymorphism is L, Derived polymorphism is H
  VARIANT 87: note = Ancestral polymorphism is A, Derived polymorphism is V
  VARIANT 121: note = Ancestral polymorphism is A, Derived polymorphism is V
  VARIANT 125: note = Ancestral polymorphism is R, Derived polymorphism is W
  VARIANT 196: note = Ancestral polymorphism is M, Derived polymorphism is T
  VARIANT 212: note = Ancestral polymorphism is T, Derived polymorphism is I
  VARIANT 216: note = Ancestral polymorphism is S, Derived polymorphism is F
  VARIANT 235: note = Ancestral polymorphism is G, Derived polymorphism is D
  VARIANT 238: note = Ancestral polymorphism is P, Derived polymorphism is Q
MVARAEAGDFAEARSLWAQLLHSSAAPCLPAAAPRLLPAYARLGRFDEILHAVRELSARDRGAARALYPLAVSCLGAAGELARMEDAVLEMGRLGLRVDSATGDAFVRAYAAAGTIPQMEAAYRRHRKSGLLITRGAIRAVASAYISRQKYYRLGAFAADAGLRRRDVGNLLWNLYLLSFAANFKMKSLQRAFLEMVAAGFRPDLTTFNIRTAAFSKMCMFWDLHLSADHMRRDGVAPDLVTHGCFVDAYLERRLARNLTFAFDRLDGDGEPVVATDPIVFEAFGKGGFHASSEVLLETAGGKRRWTYYKLLGVYLRKQHRRNQVFWNY

SEQ ID NO: 662 - protein, 172 aa, Zea mays
  VARIANT 59: note = Ancestral polymorphism is S, Derived polymorphism is F
  VARIANT 48: note = Ancestral polymorphism is A, Derived polymorphism is T
  VARIANT 47: note = Ancestral polymorphism is R, Derived polymorphism is Q
  VARIANT 36: note = Ancestral polymorphism is A, Derived polymorphism is T
  VARIANT 15..172: note = Derived polymorphism lacks residues 15 to 172
  VARIANT 1: note = Ancestral polymorphism is V, Derived polymorphism is M
MVFPPKATADDAMLQWFALAPADPASNSTISFNVTATVSLRNPNMYRAIEYGALAMTFSFNGTRFDDSASVPGFKHKARKTATQSMRVSSVGKPIKLTRPRVGEFRAENDTGSFGVEMRLDTVLQYKGRSHPTSRRRNRRSGQRPPTDRPPSPSVRRGAGEARPVPRLLLLW

SEQ ID NO: 663 - protein, 696 aa, Zea mays
  VARIANT 412: note = Ancestral polymorphism is A, Derived polymorphism is T
MCPDASTPATKDADAGTDTTIVLAKLHASRAAIVSVLSAAAEAEVEIDAIGDRLDELLSSASPSSSHHLQSQAVAARALSARIDRAVAPADPLLAEFRRVSALAEDAAPPANPGDAESAVAFVDRVDQLRDAIEEVVARGEEAVRRVEEAVGFLGRTKAAGRGRVRRLTEAAAALRAVYETEAEEMRFEGPLDDALLGLQELFEALLLRLKHPAPVDDDVAGAEDDTAGHELGTDDEVEAAARMAKTLAANDCLDICLDIYVKTRYRRAAKAMMRLNPAYLKSYTPEEIDAMEWESLESAMALWSPHFHVAIASVLAAESRLCERVLEPLPPAVWPECFAKIAARIVAAFFRFADGVAAAAREPQRLFKLLDMLDAVVRERERLDELFSSGSATLVAIRERTREVERALGRTAAGVFFEFGLRIETLYVTGAGADAGHVPKVVRYAVNYLKCLASDDYRALMDTALRADLERGDEEDAGEGGDRAPLAEAAASVLEALHRHVEAARRVCPDTVASHVMAMNAYWYIYMRARGTELAKLVGEDTMRRRYKAAAEEAAWEYQDAVWTPLVRLISGSSSGAPKTWPPDDAQEKAAAFAGKLEERVRRHGAEYKIPDGDLRGQIKIAAAKAVRGAYAGFLKANDKALAGCRKQLLPLDIIEGMVGRVFDEMSDGTAGSVGRARSRRESRSSGNLEGFFGV

SEQ ID NO: 664 - protein, 1089 aa, Zea mays
  VARIANT 790..1089: note = Derived polymorphism lacks residues 790 to 1089
MEKGMMFFCGESFSTMTAGGGVTGAWSPRVSGQPAGLDAPSLMATESAFRLIGGTGARDWSKGFGAFGSSAGALSGEDLGFVDNDTGVYGGWNKSVPNRSGSAPPSMEGSLAALGHLIDQQSGSFEASLTTLDNITDSSKSEEQLRADPAYFEYYGSKVNLNPRLPPPLISRESRRLMNRVGKAKEWRMVSQDNSSKGSIYVPRSMLSTHKEEPEDDKSPRLDSSSVEDAQIVSSASNFQSQDFMLERFQQSVASSPDSSSSNPSNSNTGDSMPVYSDINLLKSLSFDALKQSDLNSWTPKGPLKSNVNNDLSSPPLSSSSYPGSKTGTQTFEQEKAAADTKHGNVVLGSGAAVTEVDNVDSIMKNLKLSLDVHTSSPAKQRWQDNVLQQYGSFLPAQGDPIQLTTQGPHPPHVPFVDNLSHAQLKLPDIHQNLPQPSMTTPFYTPNSFGNPYYQNLHPANAFPTSIGTGGYAVSGSILPPFMAGYAPQGPLATPLDSSMTPSFSGRPSGFLPAGNLTGGTDFMQSCKVYGQFEPGMQPSIPDPNFIHFFQHPSLFQYTGGNQYNTMGPRFTVVGNLAESFDSQNTIPQAASAYPSDQRLPLPITGFPNSPTARRGGTVPNYQGISSYIGVPMTYPTSPVFQGQTLPGVLPPVRRNDSAGFLPPSRNITGSPGIQGQRARQKFDESKTCSFLEELKSNRARMVELSDITGRVVEYSADQHGSRFIQQKLENCTAEEKTSVFAEILPHASALMTDVFGNYVIQKFFEHGTREQRRDLATKLVGHVLPLSLQMYGCRVIQKALEVMELDQKIDLVHELDGHIMRCVRDQNGNHVIQKCIECVPTEHIGFVVSAFQGQVTSLSMHPYGCRVIQRILEHCGGNSQGQCIIDEILQWVCILAQDQYGNYVTQHVLERGKAHERSQIITKLAGQVVTMSQNKYASNVIEKCFQHGDIAERDLLIRRIVEQTEGNNNLLAMMKDQYANYVVQKILETCNEDQRELLLSRVKDHMQALRKYTYGKHIVSRVEQLCGDGKFHHPPAVAPRFSEAVGHTAMTNLQLSPFQELPSQVLETNRRLILHRLEGVLLFCSFRQ

SEQ ID NO: 665 - protein, 1091 aa, Zea mays
  VARIANT 34..1091: note = Derived polymorphism lacks residues 34 to 1091
  VARIANT 72..1091: note = Derived polymorphism lacks residues 72 to 1091
  VARIANT 78..1091: note = Derived polymorphism lacks residues 78 to 1091
  VARIANT 87: note = Ancestral polymorphism is R, Derived polymorphism is M
  VARIANT 110..1091: note = Derived polymorphism lacks residues 110 to 1091
  VARIANT 399..1091: note = Derived polymorphism lacks residues 399 to 1091
  VARIANT 724..1091: note = Derived polymorphism lacks residues 724 to 1091
  VARIANT 936..1091: note = Derived polymorphism lacks residues 936 to 1091
MATPPLYSVSTHHRAPPPWPPPKAATSPRITFRCSVLAAPAGRVLEAPTAAPSSWSTKNPPSRALSSDVNLRIQRLCQAGDLAGALRLLGSDGGVDVRSYCMVVQLCGEERSLEAAKRAHALIRASSAAATGGKGSVLGKRLVLAYLKCGDLGEARTVFDGMPPQAADVRVWTSLMSAYAKAGDFQEAVSLFRQMQCCGVSPDAHAVSCVLKCVSSLGSLTEGEVIHGLLEKLGLGQACAVANALIAVYSRCGRMEDAARVFDSMHPRDAISWNSMIGGCFSNGWHGTAVDLFSKMWSQGTEISSVTVLSVLPACAGLGYGLIGKAVHGYSVKSGLLWGLDSVQSGIDDAALGSKLVFMYVKCGDMASARRVFDAMSSKGNVHVWNLIMGGYAKVGEFEESLSLFVQMHELGIAPDEHAISCLLKCITCLSCARDGLVAHGYIVKLGFGAQCAVCNALISFYAKSNMIGDAVLVFNRMPRQDTISWNSVISGCSSNGLNSEAIELFIRMWTQGQELDSVTLLSVLPACAQSRYWFAGRVVHGYSVKTGLIGETSLANALLDMYSNCSDWQSTNQIFRSMGQKNVVSWTAMITSYMRAGLFDKVAGLLQEMVLDGIRPDVFAVTSALHAFAGDESLKQGKSVHGYTIRNGMEKLLPVANALMEMYVKCRNVEEARLIFDRVTNKDVISWNTLIGGYSRNNFPNESFSLFSDMLLQFRPNAVTMTCILPAAASISSLERGREIHAYALRRGFLEDSYASNALVDMYVKCGALLVARVLFDRLTKKNLISWTIMIAGYGMHGFGKHAIALFEQMRGSGIEPDAASFSAILYACCHSGLAAEGRRFFKAMQKEYKIEPKLKHYTCIVDLLSRTGDLKEALEFIESMPIEPDSSIWVSLLHGCRIHKNVKLAEKVADKVFKLEPENTGYYVLLANIYAEAERWEAVKKLKNKIGGRGLRENTGYSWIEVRSKVHVFIADNRNHPDWNRIAEFLDDVARRMRQEGHDPKKKYALMGADDAVHDEALCGHSSKLAVAFGVLNLPEGRPIRVTKNSKVCSHCHEAAKFISKMCNREIILRDSSRFHRFEGGRCSCRGYL

SEQ ID NO: 666 - protein, 394 aa, Zea mays
  VARIANT 333: note = Ancestral polymorphism is A, Derived polymorphism is V
  VARIANT 14: note = Ancestral polymorphism is A, Derived polymorphism is P
MTESEGEAEAARAAVLTPPLSLGAGGLAGELRPANLGQRVLSLFRNVRPGSDLSHFQLPATFNLPKSQLQLYGEAVYCGGEDMLARCARGADSLQRMCAVVAWSISTTRPPIFGFAPYNPVLGETHHVSTSAGLNVLLEQVSHRPPVTALHATHARGEVELVWCQSPAPRFHGASVEAAVRGARELRLPRHAETYAVGCPGLVIRLLPSPGCEWAGDVRVSCAESGLEATLSYRRSRRSFLGLGGGDARCVRGRVFRSAAPDDTLCEVDGFWDRQVSLRDVATGEVSVLYDARQTIADLATPVVQDRKGVSASESAVVWAEVSAAILNKDWEAARQAKRRVEETARRLAKERNERGEVWTPSHFSLWQNKHGDWECWPLEDSVPPAPIVVPSPL

SEQ ID NO: 667 - protein, 363 aa, Zea mays
  VARIANT 74: note = Ancestral polymorphism is P, Derived polymorphism is L
MEALAGAASSSVLPARHPPSRVAAQSLALRPSRCGPLRAVSAGGVSGKDDAHAANGSPVLKQLNSDSSLNGVLPIAADKSQKASSTNVSTDSSGSRAGLFRTPISGGVQSATFAHGLPPPALAVRNLMEQARFAHLCSVMSGMHHRRTGYPFGSLVDFANDSMGHPIFSLSPLAIHTRNLLADPRCTLVVQVPGWSGLSNARVTIFGDVYPLPAEQQEWAHKQYVAKHQQWASQQWGNFYYYRMHNISDIYFIGGFGTVAWIDVKEYETIQPDKIAVDGGDLQSLKELNAIFSKPLREVLSSEGEVDDAALISVDSKGIDIRVRQGAQFNIQRLAFDVPHKVETLEEAKKALHKIIKDKQQIK

SEQ ID NO: 668 - protein, 41 aa, Zea mays
  VARIANT 4: note = Ancestral polymorphism is K, Derived polymorphism is N
  VARIANT 7: note = Ancestral polymorphism is R, Derived polymorphism is I
  VARIANT 23..41: note = Derived polymorphism lacks residues 23 to 41
MAEKKRRAQYSAAVKRNEAERTERKMAAVARERAWPHGQQG

SEQ ID NO: 669 - protein, 1111 aa, Zea mays
  VARIANT 888..1111: note = Derived polymorphism lacks residues 888 to 1111
MAQGSSPPPPEIRSPDERAAAEDPAEAEAGEVVFDDAFDIPHKNAPHDRLRRWRQAALVLNASRRFRYTLDLKKEEEKEIIRRKIRSHAQVIRAAFLFKEAGQKDIREAYTGINLATASRSFPIELEKLNTLNRDHDSVLLQEIGGVKGLSDLLKSNLEKGVSPNEDELLQRKNVYGSNTYPRKKRKNILRFVFEACQDLTLVILMIAAAISLTLGMTTEGVDEGWYDGGSIFLAVFLVILVTATSDYRQSLQFRHLNEEKQNIQVEVVRGGKRFGASIFDLVVGDVVPLKIGDQVPADGVLISGHSLAIDESSMTGESKVVHKDQKAPFLMSGCKVADGYGSMLVTGVGTNTEWGQLMANLSEDNGEETPLQVRLNGVATFIGLVGLSVAGAVLVVLWIRYFTGHTENPDGTPQFVAGTTGVKQGFMGAIRILTIAVNDYLNFFRLAYSMKKMMRDKALVRRLSSCETMGSATTICSDKTGTLTLNKMTVVEAYFAGTKLDPCDDVSQMSDSAASLIIEGIAQNTTGTVFLPEDGGAAELTGSPTEKAILSWGLKIGMDFDDVRTKSSVIHVFPFNSEKKRGAVAVQLDDGVHIHWKGAAEIVLSSCKSWLSVDGSVQSMSAEKHDEFKRSIEDMGANSLRCVAFAYCSFDIEKIPMEDITSWELPEDDLTLLGIIGIKDPCRPGVRDAVRLCTTAGVKVRMVTGDNIETAKAIALECGILDANSVISEPVVIEGKVFREMSESARGEAADKIIVTLSHYVSQVVWCFLSLCQCSHSSLHPLEYFLSPFILFGSVELINLFQVMGRSSPNDKLLLVQALKRKGHVVAVTGDGTNDAPALHEADIGLSMGISGTEVAKESSDIIILDDDFTSVVKVVRWGRSVYANIQKFIQFQLTVNVAALVINVVAAVSSGDVPLNAVEVRTIFILFCAIYSNAAIASSFKKEPLVTNIMWRNLFVQALYQVAILLIFDFDGVRILRLQNESRSDAEKITNTFIFNTFVFCQIFNEFNARKPEEKNVFKGVTKNHLFMGIIGITTVFQILIIQFLGKFFKIVRLGWRLWLVSVAIGLVSWPLAYVGKFIPVPVRPLPDYFKPRCCWKPPRRDEEEGGQS

SEQ ID NO: 670 - protein, 96 aa, Zea mays
  VARIANT 16: note = Ancestral polymorphism is R, Derived polymorphism is C
MIGDVTSGNLADILGCKMTMRFAAVVGIFGWLTVYCAKDAMMLYAGRVLLGYCTGVLSYVVNIYSSQYITKGYLRRPCNLKPGCSAAYIIGALVSW

SEQ ID NO: 671 - protein, 120 aa, Zea mays
  VARIANT 102: note = Ancestral polymorphism is T, Derived polymorphism is I
  VARIANT 74: note = Ancestral polymorphism is R, Derived polymorphism is H
MDSLGAIVVCTYLRSRELFTTKFLLFLYQGNIANYLSLAEVDSIYLLIPVNFIFIGFDGNGRHELKLGAEELERWFTKIDHVFEHTRIPPVGEVLTLFYKTTVKKLQHYDLPLVGHVNHK

SEQ ID NO: 672 - protein, 472 aa, Zea mays
  VARIANT 22: note = Ancestral polymorphism is E, Derived polymorphism is G
MSDSTFNSCFTHQFKLNYEDTEKVAIGYSVSSENILAGGHLWRIGCYPRGDHGKENKGECLSMFLYHESESKDAKAIFEAFVMDKEGTVSSSSHQSRVLHVFAPKGSDGYGWPSFVERSVLKSRYVTNDGSFVIVGAVQVVQEEDPLDLPPSNIGSHLGLLLDSTAGSDVTFVVDGERFAAHRAVLAARSPVFNAQLFGSMADATMTSIPLHGISAATLRAMLRFMYTDACPEEADDSDLLAAADRFDLDRLKLLCARKLWNNVTEDTVAVKVVQEEDPLDLPPSNIGSHLGLLLDSTAGSDVTFVVDGERFAAHRAMLAARSPVFKAQLLGSMADATMSSIPLHGISAATFRAMLRFMYTDACPEEADDSDSDSSPGEMFHDLLAAADRFDLDRLKLLCARKLWNNVSEDTVADTLICAETYNCPQLKRKCLGFFGEGKDFKTKAVLTDGFARLAMEFPWILDELREKAGA

SEQ ID NO: 673 - protein, 352 aa, Zea mays
  VARIANT 302: note = Ancestral polymorphism is N, Derived polymorphism is S
  VARIANT 169: note = Ancestral polymorphism is D, Derived polymorphism is Y
  VARIANT 101: note = Ancestral polymorphism is H, Derived polymorphism is R
  VARIANT 83: note = Ancestral polymorphism is F, Derived polymorphism is L
  VARIANT 7: note = Ancestral polymorphism is D, Derived polymorphism is N
MSDSTFNSCFTHQFKLNYEDTEKVAIGYSVSSEDILAGGHLWRIVCYPRGDRHEKENKKGECLSMFLRHESESKDAKAIFEAFVMDKEGTVSSSHHSRLVRVFAPKGSGGGIGSLGWRSFVKRSVLESRYVTNDGWFVIVGAVKVVQEEDPLDLPPSNNIGSHLGLLLYSAAGSDVTFVVDGERFAAHRAVLAARSPVFKAQLFGSMAEATMTTSIPLHGTSAATFRAMLRFMYTDACPEEADDSDSDSDSDSSPGEMFHDLLAAADRFDLDRLKLLCARKLWNNVCEDTVADTLICAETYNCPQLKRKCLGFFGEGKDFKTKAVLTDGFARLALEFPWILDELREKVGGSA

SEQ ID NO: 674 - protein, 100 aa, Zea mays
  VARIANT 52..100: note = Derived polymorphism lacks residues 52 to 100
  VARIANT 40: note = Ancestral polymorphism is E, Derived polymorphism is K
  VARIANT 35: note = Ancestral polymorphism is P, Derived polymorphism is L
  VARIANT 12: note = Ancestral polymorphism is L, Derived polymorphism is P
MRPPSPSSKLGPLASGDVFCLLLFSAIGRFSHGLPVLDAETFKTADPFIAGWLLSAYLLGGFGDDAKGRNGVGSVIITVAKSWAVGIPVTFNSLILLFQE

SEQ ID NO: 675 - protein, 1117 aa, Zea mays
  VARIANT 583..1117: note = Derived polymorphism lacks residues 583 to 1117
MDPDDESAAQRKAADLHLPRVTEPASAPARTFCAAQRVLSYGDGPVASASAQRCASFPQRHGHGHGHGEAALAPAASFAAWVDGGPTPPSAVAAALERAMSQYDGAGDALPEFVGAGGGEGIFRVPLRAAVHPARPPPLEVRPHPLRETQVGAFLRTLVCDPRRRKLWAGAESGVRVWCLDEVFRGWWPGAGPRRRGDEEAAPFRDSVPVPPALCAAVDSANGLVWTGHREGRIRAWRVDHAAPAGGDPTGSAAMFKEAFAWQAFSRTPVLAIVVTPYGEIWSGSEGGAIKAWPWEALAKCLSSTPEEIHEAASLVEKSYIDLRNHATVGNMCSLPTADVKHMLADHCRLKVWSVTSMTFALWDAKTRELLKVFGIDGQVDLARPEAPVMPEQFIEEEIKAKPTKKEKLQGSLSFFRKSRNALMGAADAVRRVATKGTFVEDNRRTEAVAQAMNGTIWSGCTDGSIIVWDGNGNRLQEFHYHSSSVQCIEALGERIWVGYASGTIQVMDVEGNLQAGWIGHSCPVISMAVGDSYIFSLAHHGGIRGWSLSSPSPLDDILRYELASRELSYTRLENLKILVGTWNVAQEKACPEALKSWLGGAFFDVGLVVVGLQEVEMGAGVLAMAAAKESVGLEGSTNGQWWIDSIGKTLDEGISFHRVGSRQLAGLLIAAWARNDLKPHVGDVDAAAVPCGFGRAIGNKGGVGLRIRVFDRRICFVNNHFAAHQENVSRRNADFDHIYRTMTFNKPHGSTASATSVQLHKAVSANENQADEDRPELAEADMVVFLGDFNYRLDGITYDEARDMVSQRSFDWLRERDQLRAEMEAGNVFQGMREGRIKFPPTYKFQRHQMGLSGYDSGEKKRIPAWYEACMDVTDSDHKPVRCTFSVDIARVDELIRRQEYGKIVESNKRVHSLLRELHFVPDTIVSTNNIILENQEDVILRITNNCETSKAAFEILCEGQSIRKQDGTKSEPVIRASFGFPLWLEVQPSSGLIGPGDTTEVAVHHEDFFTQEEFVDGVQQSWWCETTRDIEVVLSVNVTGVASTEAATHRITVRHCCPAPPAPPSANPRGPITDSPSDAVPGPKSSQSNHLLRSDFANFGSSEVRDLCGVRKRNL

SEQ ID NO: 676 - protein, 258 aa, Zea mays
  VARIANT 3: note = Ancestral polymorphism is H, Derived polymorphism is R
  VARIANT 17: note = Ancestral polymorphism is P, Derived polymorphism is L
  VARIANT 148: note = Ancestral polymorphism is Q, Derived polymorphism is H
MPRHLALLLPLLLLASPAATRLASAACAGEKFPAGRAYASCEDLPKLGASLHWTYDASKSSLSVAFVAAPAAAGGWVAWGLNPTGEGMAGAQALVALAGAGAAAPAVRTYNITGYVPLGKASTPLDFPATDLAADAAGGKIRVYGKLQLRKGMKAVNQVWQVGASSTGGAPDKHAFQADNLGAKSKLVLAGKAPAAAEAPSPALAPEAGGPSAGGDSGAGASSSTAPSKSPNAAVPAAGVSAPALLALALVGFLAAVW

SEQ ID NO: 677 - protein, 186 aa, Zea mays
  VARIANT 173..186: note = Derived polymorphism lacks residues 173 to 186
MGAHAAAARVGVVFAGVRAPGGHVKTKGTIYLSNIRMVFVASKPVGNFFAFDMPLLFVHGEKFNQPIFHCNNISGFVEPVVPDNQNRALYSTHTFKILFKEGGCGTFVPLFLNLTASVRRYNEFEAQSAANMAPRVDPLQAAQTPVDDMMHHAYVDPNDPTKIYLQQPAPESQLRRRNYHRPADAN

SEQ ID NO: 678 - protein, 290 aa, Zea mays
  VARIANT 54: note = Ancestral polymorphism is G, Derived polymorphism is S
MHHPPPPPPPPRISPPPADPALALCGSAAGLLRHGHGHAAPGIRRRLAASRFRGYSAVRVPMETSPETFLWTSEIAIPVHPTIKVVYSAHPTADVFINFASFRSVAMSSMSALMWPTIRVVAIIVSVFLNQVIIGPATIGGIQAGAFKIEMLSRREKATNFKPDYDIDIHMKVLAMSVQESSILTGYKMKVRTIKVEKRINEIVNRLNKTKVERKPDLKAEREAISAAEKAERKAQLRDKKRREEMERLDKEKQADIRSYKGLMVQEKMTSNKQIASGSKTLQELEEDFM

SEQ ID NO: 679 - protein, 158 aa, Zea mays
  VARIANT 100: note = Ancestral polymorphism is S, Derived polymorphism is F
  VARIANT 120: note = Ancestral polymorphism is W, Derived polymorphism is R
  VARIANT 131..158: note = Derived polymorphism lacks residues 131 to 158
  VARIANT 145: note = Ancestral polymorphism is L, Derived polymorphism is P
MSLTEASSPSPLSSSGSDDFAAFLASELELASGADSAFPRDPSSVFPATDDEGEDEDLEELEGLEVIEAHYLFGDEYDDIEIVIHPQSIIHSMVETQDSSVLAQLGWPDMRLPILYTLSWPDRIYCSEVTWPRLDLCKYDIFKLLCYLCSTIDAFIWK

SEQ ID NO: 680 - protein, 205 aa, Zea mays
  VARIANT 151: note = Ancestral polymorphism is N, Derived polymorphism is I
MTLLLIGSVVLDSTQREPIHSDPAIRLGYNSPHPSSSSARVLARYPESRSSAASRPPFLLARSDPRFLPPPQMAVPLLTKKIVKKRVKQFKRPHLDRYKCLKPSWRRPKGIDSRVRRKFKGCTLMPNIGYGSDKSTRHYLPNKFKKFVVHNVSELELLMMHNRTYCAEIAHNVSTKKRKEIVERAAQLDIVVTNKLARLRSQEDE

SEQ ID NO: 681 - protein, 331 aa, Zea mays
  VARIANT 143: note = Ancestral polymorphism is R, Derived polymorphism is G
  VARIANT 188: note = Ancestral polymorphism is G, Derived polymorphism is E
  VARIANT 248..331: note = Derived polymorphism lacks residues 248 to 331
  VARIANT 282: note = Ancestral polymorphism is D, Derived polymorphism is N
MALEAVVFSQPQAGHFGCGRGDSPYAVPWSDLLQGGGGGGFGDVCAAGEWVDQHDLDTCWAAPTVGDDWDWGEALSRDHSSSDAASTDHGSRKAAPEPAAGRRKRRRTRVVKNKEEIESQRITHIAVERNRRRQMNEYLAVLRSLMPPSHAHRGDQASIVGGAINYVRELEQLLQSLEVQKSLKQSRGRRPAGGGASCSPPFAGFFSFPQYSTAPSTTSSSGGEKCCGHDAAAADIEVTMVEGHASLKVLARRRPKQLLKLVAGLHQLRVPPLHLNVTAAVDAMVLYTFSLKVEDDSKMGSVEDIATAVHEILGSIQRQQQEEEEEETAAM

SEQ ID NO: 682 - protein, 391 aa, Zea mays
  VARIANT 293: note = Ancestral polymorphism is S, Derived polymorphism is L
MKEGRPGAGDYIASLLSSSPRLDFGGEEEEDCLDRFCGDPGFAARAARLSSFSGQRFAVTAGLFGLPPPLPAASGGGEFAGSREASSVSDPASAMKDANAKKRKAPAAAAAKGKGREPSAQAQAGEPKGPDAKRCCKAEGGEGEEGSPVKLPKPEQAGSDSSVEDGGAQNQKPPPPVKGKNAKPVEPPRDYVHVRARRGQATDSHSLAERVRRERISQRMKVLQDLVPGCNKVIGKALMLDEIINYVQSLQRQVEFLSMKLATVNPLDLSNLPTLLQKDMFQACGASASSVFSLESCSPGFPFGGQGDVFQSFVPNGLENPCGGLNPLDLALSQATGGQFGFQDGTAGTNLQQRNYWEEEEEDLQSVFHIDDNGQSQEHGASASAQSFHGW

SEQ ID NO: 683 - protein, 124 aa, Zea mays
  VARIANT 86: note = Ancestral polymorphism is A, Derived polymorphism is T
MGDEPDGEAEEYLFKVVIIGDSAVGKSNLLSRYARNEFNPHSKATIGVEFQTQSMAIEGKEVKAQIWDTAGQERFRAVTSAYYRGAFGALLVYDITRRSTFDNVGRWLQELNMNAYDWYGARVA

SEQ ID NO: 684 - protein, 180 aa, Zea mays
  VARIANT 175: note = Ancestral polymorphism is P, Derived polymorphism is S
  VARIANT 153..180: note = Derived polymorphism lacks residues 153 to 180
  VARIANT 151: note = Ancestral polymorphism is S, Derived polymorphism is L
  VARIANT 148: note = Ancestral polymorphism is K, Derived polymorphism is N
  VARIANT 143: note = Ancestral polymorphism is C, Derived polymorphism is F
  VARIANT 141: note = Ancestral polymorphism is Y, Derived polymorphism is N
  VARIANT 139: note = Ancestral polymorphism is R, Derived polymorphism is W
  VARIANT 137: note = Ancestral polymorphism is T, Derived polymorphism is M
  VARIANT 135..180: note = Derived polymorphism lacks residues 135 to 180
  VARIANT 119: note = Ancestral polymorphism is G, Derived polymorphism is R
  VARIANT 114: note = Ancestral polymorphism is S, Derived polymorphism is F
  VARIANT 111: note = Ancestral polymorphism is G, Derived polymorphism is S
  VARIANT 110: note = Ancestral polymorphism is S, Derived polymorphism is F
  VARIANT 106: note = Ancestral polymorphism is K, Derived polymorphism is N
  VARIANT 91: note = Ancestral polymorphism is T, Derived polymorphism is M
  VARIANT 85: note = Ancestral polymorphism is T, Derived polymorphism is I
  VARIANT 83: note = Ancestral polymorphism is D, Derived polymorphism is N
  VARIANT 82: note = Ancestral polymorphism is Y, Derived polymorphism is C
  VARIANT 81: note = Ancestral polymorphism is T, Derived polymorphism is M
  VARIANT 80: note = Ancestral polymorphism is E, Derived polymorphism is K
  VARIANT 79: note = Ancestral polymorphism is T, Derived polymorphism is I
  VARIANT 71: note = Ancestral polymorphism is A, Derived polymorphism is T
  VARIANT 70: note = Ancestral polymorphism is A, Derived polymorphism is V
  VARIANT 66: note = Ancestral polymorphism is P, Derived polymorphism is S
  VARIANT 63..180: note = Derived polymorphism lacks residues 63 to 180
  VARIANT 51..180: note = Derived polymorphism lacks residues 51 to 180
  VARIANT 49: note = Ancestral polymorphism is R, Derived polymorphism is S
  VARIANT 37: note = Ancestral polymorphism is V, Derived polymorphism is D
  VARIANT 31: note = Ancestral polymorphism is S, Derived polymorphism is L
  VARIANT 28: note = Ancestral polymorphism is G, Derived polymorphism is R
  VARIANT 17: note = Ancestral polymorphism is T, Derived polymorphism is K
  VARIANT 16: note = Ancestral polymorphism is M, Derived polymorphism is T
  VARIANT 14..180: note = Derived polymorphism lacks residues 14 to 180
  VARIANT 8: note = Ancestral polymorphism is E, Derived polymorphism is K
MALRKAFEKAVVKRLMTYVPFDVLLSDGLDSSLVAAVAVRHLTGTEAARRWGTKLHCFYVGLEGSPDLKAAKEDVIYQTETYDVTIIRASTPMFLMSCKIKSLGVKMVISGEGSDELFGGYLYFHKAPNKEELHRETCRKYDCLRANKATSAWGLEARVLFLDKEFMNAAMSINPEWKMV

SEQ ID NO: 685 - protein, 482 aa, Zea mays
  VARIANT 218..482: note = Derived polymorphism lacks residues 218 to 482
MTPSSTCHAVAVLLLLAAATLACHFSVFVVATDVECHCHGAKGCRGLGINYGTVADDLPSASRSVQLLRAAGASAVKIYDANADILRALAGTGVPVSIMVPNSAIPSLASSRAAAEAWVAANLAPHIPATRVAHLLVGNEVLSNRAIAASTWRGVVPAMANLRRALRARGLRGVKLGTTLAMDALSASYPPSAGAFRGDIAEDVVLPLLRFLNATRSYYFVDAYPYFAWAGNRDAISLDYALFQGAAGSRYVDPGNGLTYTNLLDQMLDAVVAAMGRLGYGNVRLAVSETGWPSGGDAGEAGANVRNAATYNRNLALRMSNSPGTPARPGAEVPVFLFSLYNEDRKPGPGSERHWGLYYPNGSMVYELDLTGRRSSYPPLPSADSAPAWCVLASGGGKAANETAVSAAVAYACQHGSRTCAAIQPGGACHEPDALDAHASYAFNAYWQQFRSAGGTCFFDGLAETTTEDPSHGLCKFARSLD

SEQ ID NO: 686 - protein, 385 aa, Zea mays
  VARIANT 36: note = Ancestral polymorphism is H, Derived polymorphism is R
MSRCFPFPPPGSESRPSSEEHRMDLLRKEKHKDKKHRKAKDRGKEETKKDHKYNNTELLPWSTDSIGSTGAKEKERNLLGSITILSMVKKSAQATEDNHMVQKSDSIAQANKKGMGRGIDSKTEMKNGKSLQDRSVEMHSRGRYNCNGVGVSHGNSDTQRSSKGVHTAAGRVTHNPSTFQRTEEKGQDPDISVPSANVKNDSSSTKGKANGNYREGLEGKDRDSAVKKRKTECKNEEKGVEKIGTVNEQKHEDLGASKGKVYNLVRLDYLNNEQKSTSDIRKMENFHPNSSLHEEQTPSVPSSGYEGNRSYLKQPHPDTKYLSRVHRVPSTHDLSEYIDQSWLFPADHGRRKTARLEDAEPRQVWSDAQLIDAADVVAMPYVVPL

SEQ ID NO: 687 - protein, 165 aa, Zea mays
  VARIANT 17: note = Ancestral polymorphism is Q, Derived polymorphism is L
  VARIANT 18: note = Ancestral polymorphism is A, Derived polymorphism is T
  VARIANT 39: note = Ancestral polymorphism is V, Derived polymorphism is M
  VARIANT 41..165: note = Derived polymorphism lacks residues 41 to 165
  VARIANT 45..165: note = Derived polymorphism lacks residues 45 to 165
  VARIANT 48: note = Ancestral polymorphism is F, Derived polymorphism is L
  VARIANT 57: note = Ancestral polymorphism is G, Derived polymorphism is D
  VARIANT 63: note = Ancestral polymorphism is G, Derived polymorphism is V
  VARIANT 65: note = Ancestral polymorphism is T, Derived polymorphism is I
  VARIANT 71: note = Ancestral polymorphism is E, Derived polymorphism is V
  VARIANT 72: note = Ancestral polymorphism is P, Derived polymorphism is L
  VARIANT 92: note = Ancestral polymorphism is R, Derived polymorphism is G
  VARIANT 121..165: note = Derived polymorphism lacks residues 121 to 165
  VARIANT 136..165: note = Derived polymorphism lacks residues 136 to 165
MLKTCYSQVWETVSQMQAVHQMIGALCNNSSKSCTVNTVLWNTIQLLFPRAGAVGSGFISSEGRTRSSFIELGASANFIVSTHGSTRNSNSRRGFVPASQLLLTRLEQSEDAAALAYRLQQEEFVNAFEEPEQESQPRDAVSTTQDTLRAMASRAVRLRTRGWPV

SEQ ID NO: 688 - protein, 388 aa, Zea mays
  VARIANT 286: note = Ancestral polymorphism is S, Derived polymorphism is Y
MDKKLSEHFSAYDKLGFMLIALIWEFDFFIVHDPDTISTSRQLEAKRDLVAGVVYGTDFFTKRKIQDSRGILIGQIGCFDPFLAAYKVTLLSDFLLLCLVTTYDSWNFCMQQTFNDRMHSKRLSMARTSFKMEHDLSKFGYFSRWRSLTKYSNHHGKERPICKSQGLVDMNKPPEMISGNMKVGSANSFERKDLERELLAKLLVYLCTAQEHLLSQRQLLQDAVTDAPKATKFLGQIFARVVLEDGISLTEGGGLLQEWDGREEPAGQHGLEDSLASEDLGSMLESIRVERAKYSLMCFQFPVGRIHRQLKQMTQANGCVGATAAVYSVAILEYLTVEVLELAGNACKDLKLAICGDEELDTLIKGTIVGGGVIPHIHKSLINKSSKE

SEQ ID NO: 689 - protein, 1324 aa, Zea mays
  VARIANT 45..1324: note = Derived polymorphism lacks residues 45 to 1324
  VARIANT 149..1324: note = Derived polymorphism lacks residues 149 to 1324
  VARIANT 609..1324: note = Derived polymorphism lacks residues 609 to 1324
MMGHGDVSFIRILEELRLHVVASTVYVLAEPTSRNLESNKKSQVQQKVVKKLPVSDLRGKLSGVASQRPQLSSTVQVPKPVKEVIKSNKPVQKRDPAPTTAPPDIKKPSAPAPVPAPSALPKQSQNKIDASLDSLLKSLDLEKYLINFQAEEARSIYVAILYCGCDWVPGKRYYQHWLTERTSLRSHCLPVPVEASLSLCAQAPTLPCAQPRAPRMAMAAATGAGAVGEGMRRLTQLSLVSKVCSELESHLGVADRVLAEFVVELGRASASAAAFAAALRDHGAELPDYLVRSLHAVITAIPDSAPAPPASRGAGARGRVDKAAGEDEDQEPGLHQVRRGRVTRVANAGCFVRLDGGREGLVHVSQMPARGRGRAGATVTLGQEVFVKVVSVDGAKLGLSMLDIDQDTERGLHPMRRPHPAEEDAPRANPPADRPRPAGRKKGVSGIFVSDEDDDDKAGPPTRRPTRRMTSPERWEVKQLIAAGVLDAKNYPVLDEDEEGMLYQEEEVEELEIELNQDEPPFLWGKGRSSSDMSPVRISMNPEGSMSRAAALQSALTKERRDIRTQEQRGMVDAIPKDLNRSWEDPISSGRYLMQELMGTGLSAQSVPEWKMTYGKAGTYGQKSRLSIQEQRQSLPIFRLKKELISAVNDNQVLVVIGETGSGKTTQVTQYLAEAGYTTRGKIACTQPRRVAAESIAKRVAEEVGCRVGEEVGYSIRFDDCTGPETVIKYMTDGMLLREILVDGDLSSYSVVMLDEAHERTIYTDILFSLLKQLIKRRNDLKLIVTSATLDAEKFSGYFFDCNIFTIPGRTFPVEILHTKQAESDYMDAALITVLQIHLTEPEGDILLFLTGQEEIDHACERLHERMKAFGGDIPELIICPVYSALPTEVQSKIFEPAPPCKRKVVVATNIAEASITIDGIYYVVDPGFAKLNVYNPKLGLDSLVITPISQASAKQRAGRAGRTGPGKCYRLYTESAFRNEMPPTTIPEIQRANLGWTVLNMKAMGINDLLSFDFMDPPASQALISAMEQLYSLGALDEEGLLTRLGRKMAEFPQEPPLSKMLLASVDLGCSDEILTIIAMIQTGNIFYRPREKQAQADRKRSNFFQPEGDHLTLLTVYEAWKAKGFSGPWCVENFIQVNSLRRAQDVRKQLLEIMDKFKLNVISAGNNSTKIGKALTAGFFFHAARKDPSDGYRTLADHQQVYIHPSSALFHQQPQWVIYHEIVMTTKEYMRDVTAVDPRWLLELAPRSYKSVDPTKISKRKRQERIEPLYDRYNEPNSWRLNLMEAKRTLEENQRKRMMESGIADEEEKKVKRENTAAYSRR

SEQ ID NO: 690 - protein, 97 aa, Zea mays
  VARIANT 88: note = Ancestral polymorphism is A, Derived polymorphism is V
  VARIANT 79: note = Ancestral polymorphism is T, Derived polymorphism is K
  VARIANT 48: note = Ancestral polymorphism is R, Derived polymorphism is W
MHVYEVSFIDSWVLSLSPMRRAFLKAMRKSNNPRRHVVYAFGDHYDFRKKLQIINLLTRYIYLVDGLGRIRWQGSGSATQEELSSLIACTSILLDEK

SEQ ID NO: 691 - protein, 250 aa, Zea mays
  VARIANT 217: note = Ancestral polymorphism is C, Derived polymorphism is Y
MEGRVLRRSVTLADQLAAVAPAPAPLPPPGAAGSCNLRDLLKLRDEDDLASAGRRAAVTLASAMAAERQVQVPAASPSPSPSPSSPAAATRTLLDIIRDDQPPAAGAGDPLVRRAVSLPPPTTASPPAPAPAAEAAPPPSPPPAAADEHEQEQEQEQRVSLMALLEQTDRQWSAVPGAAAQAEEDEDSAAAAAGRGVVAGCCCVCMARAKGAAFIPCGHTFCRGCARELLGGRGRCPLCNAAIVDVLDIF

SEQ ID NO: 692 - protein, 268 aa, Zea mays
  VARIANT 151: note = Ancestral polymorphism is G, Derived polymorphism is A
MEEKKDLLRKLTIVSIPFVFVAIPSVVIIVGMLSPHAAEPRAGSSSSGAAEAAPGQNHSVSMLSTMTGGQMILSCRAAFSGNWEYFHYFILDPYKPQRAFFQPQADPYILFCKWGYMGNFLQDVVVFNSSAAWAPRCRVDNGGCRYLFQDAHMFLITGKHGGDTEAHRVKVEETTEEQQTPAPAGPGPAPGPGPGPSPVPVPAPALVPSLAPSPASHQQRQEKTLIGDVLLRECRHLLGMFPTMCRRKPHSHPYVGKIIGRWRWWFNY

SEQ ID NO: 693 - protein, 290 aa, Zea mays
  VARIANT 214: note = Ancestral polymorphism is E, Derived polymorphism is K
  VARIANT 210: note = Ancestral polymorphism is V, Derived polymorphism is D
  VARIANT 173: note = Ancestral polymorphism is C, Derived polymorphism is Y
  VARIANT 167..290: note = Derived polymorphism lacks residues 167 to 290
  VARIANT 151: note = Ancestral polymorphism is R, Derived polymorphism is W
  VARIANT 144: note = Ancestral polymorphism is R, Derived polymorphism is W
  VARIANT 137: note = Ancestral polymorphism is R, Derived polymorphism is C
  VARIANT 135: note = Ancestral polymorphism is K, Derived polymorphism is E
  VARIANT 132: note = Ancestral polymorphism is S, Derived polymorphism is L
  VARIANT 119: note = Ancestral polymorphism is A, Derived polymorphism is T
  VARIANT 109: note = Ancestral polymorphism is Y, Derived polymorphism is N
  VARIANT 108..290: note = Derived polymorphism lacks residues 108 to 290
  VARIANT 107: note = Ancestral polymorphism is A, Derived polymorphism is T
  VARIANT 86..290: note = Derived polymorphism lacks residues 86 to 290
MGRGKVELKKIENPTNRQVTFSKRQMGLFKKENEVAILCDAQIGVIVFSGSGRMYEYSSPPWRIASVFDRYLKAPSTRFEEMDIQQKIVQEMTRMKDERNRLRMIMAQYMAEDLASFSAQDLSNLEQQIEFSLYKVRLRKIKERISLLPPRPRVQRGERSRSNSNPQRHGQSCSRSAHRSRSERVVVLGGNEGTYFWQIVFAEHHLYPVVVMIEFYLILCDLTDFQAALISDVHLFHSFIYARLMCVLELSSKKATKGNKPSKGRNRFWRNIGLGFKIPKEAIKGSFGAL

SEQ ID NO: 694 - protein, 545 aa, Zea mays
  VARIANT 271: note = Ancestral polymorphism is L, Derived polymorphism is I
  VARIANT 363..545: note = Derived polymorphism lacks residues 363 to 545
MPGGSSGPDGEVDAGFAKLQGEDFEYYMQTYSIMLGRNSKKSTVDVDLSSLGGGMNISRHHARIFYDFQRRRFALDVIGKNGCLVEGVLHLPGNPPVKLDSQDLLQIGDKKFYFLLPTRSIFASAAAARHAPIIPQQLPPPPYAHARAGRPRLSEFHDRSFEGDYGREVDEIGNGISETAMRGKLVKRNKKSSGDLDIYGGHRINVEAIGTLGEDSRSEIRSRGDRDIDNQQALQAEEKDVVSSVATVLSDLCGPGEWMPMAKLHNEVLIIIIMGSRQVCPVELLEQFGNVWHPSRVRKYLTQDDWSPTETKGRPWFGLLALLRKYPEHFVINTRSKGRMTSEFVSLFPDSRELRATVTPPKQLGQRAGRGRMGDAGDKCALRLAATARKWLEDVRVDREGRVHPAVASGGQALTWLATAGARVSLAEPGRVVCSLRVGAPLTDAEGRWHAGAIAVAADNVCAAAVFTALGADVLTVQYSLSYFSPAHLDEEVEMEGRVVGRKAALAAATVEVRKKESGELVAICRQWMAPLSTTKVSTSTSSKL

SEQ ID NO: 695 - protein, 180 aa, Zea mays
  VARIANT 24: note = Ancestral polymorphism is S, Derived polymorphism is I
  VARIANT 141..180: note = Derived polymorphism lacks residues 141 to 180
MSSSHSATVTALAVAVGLQEGFASSLFATVAVFASVVMSNLLYYYGMCNVVKDILLQHYFGKRKDLTENLKQLQCRTLIFVGENSQFHAEAVHMTAKLDRRYSALVEVQACGSVVTEEQPHTMLIPMEYFLMGYGLYRPSQINFSPRSPLNPFCISPELLSPESKGVKLKPTKTQANLKA

SEQ ID NO: 696 - protein, 193 aa, Zea mays
  VARIANT 92..193: note = Derived polymorphism lacks residues 92 to 193
MKIINVVHTVPDLRHSNDSRLGNKRGNNGGRLESHSTVARQDPPRSYPGVVEKVQPRRLELARQEPPMRQVNPQTLQSSSLQAKPRGALNKQSNNPSSYESGPGRPVKAAQQRPFGDMKPKQTREHLAVERKPMASQTDKSRSGARPSAGAKLELAKPKVYDDGLDNNRKLEAAKRRLQERYQEAENGLWSLF

SEQ ID NO: 697 - protein, 219 aa, Zea mays
  VARIANT 47: note = Ancestral polymorphism is Q, Derived polymorphism is R
MARFNPYENNGGTCLAVAGADYCVVAADTRLSIGYSILSRDHSKISQLSDKCVLASSGFQGDIKALQKALAAKELIYEHNNNKKMSCPAMAQLLSNTLYYKRFFPYYAFNVLAGLDTQGKGCVFTYDAVGSYERTGYSAQGTGSALMMPVLDNQLKSPSPLLLPARDAVTPLSESDAVDLVKDVFASATERDIYTGDRLEIVVINKSGTHREYIELRKD

SEQ ID NO: 698 - protein, 413 aa, Zea mays
  VARIANT 51: note = Ancestral polymorphism is S, Derived polymorphism is A
  VARIANT 68: note = Ancestral polymorphism is R, Derived polymorphism is H
MSIMERRSSSDSDDTRSSAAAGEASAVVASLSDDMMAEIIRRLPVDSVARSKCVSKAWCATVSDGYLRRRLPLQLSVVYFPDDDDAAASARGKARPRFACADSAAGGGGMLRDRDLGFFPFLDVSVVSDACNGLLLLRAAGTRRFYVVDPVTRRWAALPPPSKDPRLSMLAFDPSSSSSASSRRGGGGGYHVINFTGRWRDRGGEVEVFSSETRAWALRDAEFGVPAASLSGSVHFHAGAVYVLASDPDCVVRMDVASAGSGGDLACAVAELPEHADGVDGRLAHSAGRLHYMASDGARLLKVWVLDGELPALRWRLKHAVRFGDDVVEGGRCCGGRRGEVRVLALHPEKDAVYVWSAWKLRLLEYDLARKEVTGAWTLGEGGRNRVVKTWLVPSSMYLSDCLPLPDAHVRQC

SEQ ID NO: 699 - protein, 489 aa, Zea mays
  VARIANT 225..489: note = Derived polymorphism lacks residues 225 to 489
MEDALGSAVGPHFSGLRLDSRRLSLSPSSSPSRSASGNGTLVAAPGLAFPKAEDGTRKPFVIVLVSFAAGSEGVCGGTASGKTTVCDAIIQQLHDHRVALVNQDSFYHGLTEEQSEHVQDYNFDHPDAFDTDRLLECMGKLTSGQSVNIPIYDFKNHRRCSEKFRKVNESDVIILEGILVFHDQRVRDLMDMKIFVDADADTRLARRVRRDTVERGRDVTSVLEQYVRFVKPAFDAFVLPSKKYADVIIPRGGDNLVAIDLIVQHINTKLGQHNLCKAYPNVFVVHTTFQIRGMHTLIRDKNITTPDFVFYSDRLIRLVVEHGLGHLPFTEKQVVTPTGSLYMGVDFCKKLCGVSIIRSGESMENALRACCKGIKIGKILFHRIGDNGQQLIYHKLPVDIAERHVLLLDPVLGTGNSANQAIELLMSKGVPEDRIIFLTLVSAPEGIHCVCKRFPHLKIVTSEIDSGLNDEYRVIPGLGEYGDRYFGTD

SEQ ID NO: 700 - protein, 198 aa, Zea mays
  VARIANT 130: note = Ancestral polymorphism is A, Derived polymorphism is T
  VARIANT 127: note = Ancestral polymorphism is R, Derived polymorphism is C
  VARIANT 122: note = Ancestral polymorphism is A, Derived polymorphism is T
  VARIANT 120: note = Ancestral polymorphism is P, Derived polymorphism is L
  VARIANT 96: note = Ancestral polymorphism is M, Derived polymorphism is I
  VARIANT 45: note = Ancestral polymorphism is R, Derived polymorphism is C
  VARIANT 43: note = Ancestral polymorphism is T, Derived polymorphism is I
  VARIANT 23: note = Ancestral polymorphism is C, Derived polymorphism is Y
  VARIANT 13: note = Ancestral polymorphism is P, Derived polymorphism is L
  VARIANT 1: note = Ancestral polymorphism is M, Derived polymorphism is V
MELMTEKCARSLPALASLLVEFCDTTHLAAFGANQFRTTSFAIACDIVVSAWCLFMPMNLHMLSLVVHFSELAASLPGEFRDLVEPDRFDPSYVVMMHVVVCCHEATEAILINFFDAIELETVEVLRHPAKSGGPLVYPIGLDPSGRAQRRRQRRCRFPPTRRSGASGACDGGREVSWGRKKWGGGDLLAVAGWEIWW

SEQ ID NO: 701 - protein, 168 aa, Zea mays
  VARIANT 18: note = Ancestral polymorphism is R, Derived polymorphism is H
  VARIANT 20: note = Ancestral polymorphism is V, Derived polymorphism is M
  VARIANT 40..168: note = Derived polymorphism lacks residues 40 to 168
  VARIANT 50: note = Ancestral polymorphism is G, Derived polymorphism is R
  VARIANT 62: note = Ancestral polymorphism is M, Derived polymorphism is T
  VARIANT 120: note = Ancestral polymorphism is S, Derived polymorphism is L
  VARIANT 155: note = Ancestral polymorphism is D, Derived polymorphism is Y
MWRFMGMKRHHADTTMSHAMAKEVVLNWLAPNAARWVVSQNSTSRLASAGSERAHFSVMSSMTPHLPQAPRRPRPRELETPSSLSSMFISMTLMDAYAKTSHLELVLKVLGKMPSRNIVSRTMPVASLVRDKSDIERICKEVFKDLSDKNTGLLDINSLHVATLMFYK

SEQ ID NO: 702 - protein, 58 aa, Zea mays
  VARIANT 45: note = Ancestral polymorphism is E, Derived polymorphism is K
  VARIANT 38: note = Ancestral polymorphism is P, Derived polymorphism is S
  VARIANT 17..58: note = Derived polymorphism lacks residues 17 to 58
  VARIANT 15: note = Ancestral polymorphism is G, Derived polymorphism is R
  VARIANT 11: note = Ancestral polymorphism is D, Derived polymorphism is E
MKLTKWEDLEDKSIGHWRPILSGDWSLVEVSHHQGLIPAATGYMEYYFGAEWGKVCRY

SEQ ID NO: 703 - protein, 350 aa, Zea mays
  VARIANT 54: note = Ancestral polymorphism is G, Derived polymorphism is A
  VARIANT 55: note = Ancestral polymorphism is R, Derived polymorphism is K
  VARIANT 124: note = Ancestral polymorphism is S, Derived polymorphism is F
  VARIANT 143: note = Ancestral polymorphism is F, Derived polymorphism is L
MPRRQPACCRINTPPPCRSSQTTPSSCAPPSPPSSRPSKGMAAAWKVVRGDASGRLLPVISFFLGAALTAAFVFLGATTDVSWRFAAWGSGARPGAGDEAKSFAELAEVLKNASMEDKTVIVTSINQAYAAPGSLLDLFLDSFRAGEGTAGLLDHLLIVAVDPAALETCRSVHRHCYLLRPAAGAADADLGAAKFFMTKDYLDMMWARNRLQQTILELGFSFLFTDVDILWFRNPMRHIAVTSDVAIACDYFNGDPDSLSNRPNGGFLYVRSARRTVEFYRGWREARAGFPPGTNEQDVLARVQLPLARRLGVRMQFLDTARCGGFCQLSDDLRGLSTMHANCCTGLENK

SEQ ID NO: 704 - protein, 171 aa, Zea mays
  VARIANT 66: note = Ancestral polymorphism is G, Derived polymorphism is V
  VARIANT 63..171: note = Derived polymorphism lacks residues 63 to 171
  VARIANT 51: note = Ancestral polymorphism is V, Derived polymorphism is D
MVKYSQEPGNPTKSAKAMGRDLRVHFKNTRETAFALRKLSLTKAKRYLEDVIAHKQAIPFRRYCGGVGRTAQAKSRHSNGQGRWPVKSARFILDLLKNAESNADVKGLDVDNLYVSHIQVNQAQKQRRRTYRAHGRINPYMSSPCHIELILSEKEEPVKKEADNIVAARKQ

SEQ ID NO: 705 - protein, 601 aa, Zea mays
  VARIANT 144: note = Ancestral polymorphism is V, Derived polymorphism is A
  VARIANT 430: note = Ancestral polymorphism is N, Derived polymorphism is I
MERMPQDAGQERVMAAAKQILKSLAVSKNAADDMMHFLSTFDPRLHPLSSPEAAEEEASGSGADDDDLEEEEEIAAAEEVIIRCESSSMTSGVFSDYLYAVDDAIAASGRSARAAAAVHAAMPRLEEEARALLSSSPSLRRLSVSSDDLGDATTTPDASPRHGNGHGTLSPTAAASVGAVAARMLRAGYGPELAQVYVAARRDALADSVALLGVEAVAIEEVLRMEWTALDQRMRRWSHAVRAVVRTLLAAERQLCDEVFAADEGLGHECFADVARACVLQLLAFADAVAVSPRATEKLYRTLGMYEALADVQPDLEALFSDDDGAREFFASEASSAVQQLGSTVRHTIEEFSQAIHGEASRRPVHGGDIHPMARYVLNYCGLLADCRGALDAVLGDAGGLDDASSDGRGAASTPSACCIRELLTLLLRNIDDKSRLYDDAGLRNIFLMNNLYYVVQKVRESPSLRELVGDDWLRRYRGQIRQYETGYLRASWAAVLSQLRRDDGAAARPPAGHRAPSGPSAKSFNAVFQELYRTQTAWKVADAQLREELRIAVSERLIPAYRAFLGQGTRHPARHVKWSLDDLECYMLDFFEGVQKFVRW

SEQ ID NO: 706 - protein, 272 aa, Zea mays
  VARIANT 7: note = Ancestral polymorphism is E, Derived polymorphism is K
  VARIANT 27: note = Ancestral polymorphism is L, Derived polymorphism is F
  VARIANT 32: note = Ancestral polymorphism is G, Derived polymorphism is S
  VARIANT 104: note = Ancestral polymorphism is R, Derived polymorphism is L
  VARIANT 131: note = Ancestral polymorphism is G, Derived polymorphism is D
  VARIANT 160: note = Ancestral polymorphism is A, Derived polymorphism is T
  VARIANT 188: note = Ancestral polymorphism is C, Derived polymorphism is Y
MGLGAGEGWDIADAVAPPGLAPDHTFLRWIIGGEDASAAMGSVMDSPVLELDHAPSMMSLAFGSTMPFAPTMEDAKPGTALVSPASHHLLELNLIHENLSGFARELGMFLQFATYNVDALDPAELVAITSGDAVAVHLPVGSAHVAAMAAVLRLVKRLVTKVVVSVDRGCDRTELSFATHLLQAFQPCVSLLDSSDAMGGADAEAVGRIERFMVQSDVELTEVFTTIILFHQMLLVPKKKQNKKEEARIIRTARMQVLIPWGYWIRLNFLLK

SEQ ID NO: 707 - protein, 180 aa, Zea mays
  VARIANT 83: note = Ancestral polymorphism is P, Derived polymorphism is S
  VARIANT 54: note = Ancestral polymorphism is A, Derived polymorphism is V
  VARIANT 26..180: note = Derived polymorphism lacks residues 26 to 180
MNRSILPTASASAPPMASLESSRDTQGWNACSRCVANDSSVRSQPRSTDTTTLVTSRFTRRSTAAIAATWADPTGRWTATASPLVMATSSAGSRASTLYVANWRNMPSSRAKPDRFSWMRFSSSRWCDAGDTNAVPLSVAAGQHYASSCISDAHCSPVPMSRSSTWMRPAAPSSSSTACR

SEQ ID NO: 708 - protein, 427 aa, Zea mays
  VARIANT 73: note = Ancestral polymorphism is P, Derived polymorphism is S
MPGLTAPSDYAEEPPRHPALKINSKEPFNAEPHRSELVASYITPVDFFYKRNHGPIPKVEDLSRFLSTSCEFSFIIVICYSLPNTDTLYEWIDRYTVSISGLVNKSIQLSMADIWSLPKYNVTATLQCAGNRRTAMSNVRKVRGVGWDISALGTATWGGAKLSDVLELVGIPKLSSVTSLGGKHVEFVSVDKCKEEKGGPYTASIPLNQATNPDADVLLAYEMNGEVLNRDHGYPLRVVVPGVIGARSVKWLDSINVKEEECQGFFMQKDYKMFPPTVDWDNINWSTRRPQMDFPVQSAICTLEDVDVIKEGQARIAGYALSGGGRGIERVDVSADGGKTWVEARRYQKDNVAYVSDGPQSDKWAWVLFEATLDVPANPEIVVKAVDSAANVQPEKVEDIWNLRGILNTSWHRIKIQRSSCVERSKL

SEQ ID NO: 709 - protein, 250 aa, Zea mays
  VARIANT 208: note = Ancestral polymorphism is G, Derived polymorphism is R
  VARIANT 195..250: note = Derived polymorphism lacks residues 195 to 250
  VARIANT 121: note = Ancestral polymorphism is N, Derived polymorphism is I
MERERGASAALWGHAHLPLLARAGSKESVEYILQALWRTRRTGLDAADRTVARDALQLSSDAELDPVSTPISSFSSLLPSFLPAPSLASRAGGRCRSRPLSTQLVLQLLVCLRILIRRCVNEDFAKDDIPKLFPEEVPPELQKLLTLLLQKFQPEWQADAAKDQEAALHSSAAECQSNQNGDTSEHRDAANAELQNGAAPVKGSLESGQKEVKKSPLAKDSLDKMLKDLFSTRDQMATDGRNTGHELTMG

SEQ ID NO: 710 - protein, 591 aa, Zea mays
  VARIANT 32: note = Ancestral polymorphism is D, Derived polymorphism is N
  VARIANT 53..591: note = Derived polymorphism lacks residues 53 to 591
  VARIANT 72..591: note = Derived polymorphism lacks residues 72 to 591
MGSLSMAEKAPGAALPESSCAYLLQELKMIWDEVGQEQSERERILEELEQECQEVYRRKVNSANMSRIQLHQALAESEAEFTNLLLSLGERSFPARPEKMAGTLKEQLNSITPALQEMQMRKDARVKQFVEVQTETHRIASEIAGRLAGGAVAVNEEDLSLKKLEEFQSELRRLKREKSDRLCKVEEYKVLIHNFAKVMGMDPSEILASVHPRLLDGPNEQQTKNISDDILNKLNMTVQQLKQEKSNRREKLQNLVKALTNLWNTLDTHMEERQPYGQIKVLAMTSVNGMLGPGSLTLETIQQVETEVQRLSQLKASKMEELFVKKRAEVDEICKKSHMGMPYQTEMDKIMNLIMSGDVVHDDLLKTMDEYIYRAKEEATSRKDIMDKVDKWMASWDEERWLEEYSRDDRRYSVSRGAHKHLKRAERARIIVNKIPGLVEQLMVKTQFWEQERNKIFYYDELPLLAMLKDYMFTLKEKEEEKYRQRENKKIQTLLVKRHENSIMLRPNTSFSRPSSRGFNTSPGSTSIWSSQVSAKVQLPDSENSPAEKDMRAKIIRNRGTQGILGNNRSCSISHEDKAEVSTVKQGISPI

SEQ ID NO: 711 - protein, 376 aa, Zea mays
  VARIANT 215..376: note = Derived polymorphism lacks residues 215 to 376
MENQGPKPIRCKAAVCRAAGEPLAIEEVVVDTPKAHEVRIRIICTSLCHSDVTFWRMKDLPDNIPRIFGHEAFGVVESVGEQVDEFAAGDAVVPTFLGQCSECVDCRSARSNMCSKYRFAVRPGMPRDGTTRFTDGQGRPLHHFFGVSSFAEYTVVDVNQVVKLNPAVPPALACLLSCGASTGVGAAWKQAKVEPGSSVAIFGLGAVGLAVNHSEVTSPDAFRPLPLPAGKKFGVTHFINPKELGEEKPVHQAIAEMTDGGADYCFECIGLAALMNDAFRSSRDGWGKTIILGVEMHGAPLCISPHEILHGKSVIGSMFGGVKPKQDIPILADKYMNKELELDKFITHEVGLKDINQAFDLLLQGKSLRCTIWMDK

SEQ ID NO: 712 - protein, 315 aa, Zea mays
  VARIANT 92: note = Ancestral polymorphism is H, Derived polymorphism is N
  VARIANT 114: note = Ancestral polymorphism is I, Derived polymorphism is N
MAAEAGPISKVLIVVGNPTPCCSLRPKALLCSVSRFAYSVGIGLCSGLDAAMQTEAMPLVHKFKLVEAPAHESTFPKGAPWVRYHGNYKGLHIDLVLPGKDAVLGKFWWFHISNTWLSSYILITPQVARRTSSRVDSVGTVSAALLTSFSIQTLKPDLIINAGTAGGFKAKGASIGDVFLASDVSFHDRRIPIPVFDMYGIGARKTSAVPNILKELNLKIGKLSTGDSLDMSPQDEKVILSNDATVKDMEGAAVAYVADMFSTPAIFVKAVTDIVDGEKPTSEEFLQNLIAVTAALDLAVTKVVDFISGKRISDL

SEQ ID NO: 713 - protein, 159 aa, Zea mays
  VARIANT 146: note = Ancestral polymorphism is L, Derived polymorphism is P
MAMDPDAVAKAFVEHYYRTFDTNRAALVGLYQETSMLTFEGQKFQGPSAIAGKLGSLPFQACEHQIVTVDCQPSGPQGGMLVFVSGSIRTGPEEHPIKFSQVCTPAWPRSAFFPLVGVSLISSCVVRDDSSPDAIRCHSCDSGPNLVVVRRRPSLCLLF

SEQ ID NO: 714 - protein, 180 aa, Zea mays
  VARIANT 42: note = Ancestral polymorphism is P, Derived polymorphism is S
MFGESTMSQFTLNLPQQYIPSKIAICLTVVNPYTKYALTMTSVALSIEEALPKKMQSYLVGMLVRTFLVLSTVAVALFFPYFALVMALLGSVFTMLVVGLDTPMRMLALHQEGRSALVGGNHQLETRAPTNTGLEPEYLWSFSLQIILGVSLSRDLMAVAGDALKTNIRTLGPLVLPLSE

SEQ ID NO: 715 - protein, 191 aa, Zea mays
  VARIANT 176: note = Ancestral polymorphism is R, Derived polymorphism is C
  VARIANT 99..191: note = Derived polymorphism lacks residues 99 to 191
  VARIANT 85: note = Ancestral polymorphism is P, Derived polymorphism is L
  VARIANT 13: note = Ancestral polymorphism is R, Derived polymorphism is W
  VARIANT 4: note = Ancestral polymorphism is A, Derived polymorphism is V
MGVAVFGARCTLRYEMDLQFFNIPGNSKMLSLRGRRTSVDIGKSCANGCAGMMENNREHKIALVATGLATGIASACWIGPRCVLPMINQSITNSNHTNQLNIQHASGSVFKGWSEEKIYFAPTYNYSCNSDSYAGETATSKKKRRTPAWCDRILWHGDGIAQLSYFRGESQFSDHRPVCGTFTVEVKRLDG

SEQ ID NO: 716 - protein, 337 aa, Zea mays
  VARIANT 55: note = Ancestral polymorphism is R, Derived polymorphism is L
MEKRRRGSGGVPSLAVAVLAALLAAASMPSPPRVAAALSPDYYKDSCPGLESIVRYEVARKKNETVVTIPATLRLVFHDCMVGGCDAAVLIASKNNDAEKDAPDNESLAGDGFDTINRVKAAVEKRCPGVVSCADIIALAARDVVYLADGPYWRVELGRLDGLDSRASDVKGKLPDPDMHVKDLTPVFQRNGFTEVDMVALSGAHTVGFAHCSRFTDRLYSYGGARTDPSFNPAYAYQLKQACPIDVGPTIAVNMDPVSPIRFDNAYYANLQDGLGLFTSDQVLYADEATRPIVDMFAASQKDFFDAFVAAMLKLGRLGVKTGKDGEIRRVCTAFNH

SEQ ID NO: 717 - protein, 181 aa, Zea mays
  VARIANT 165: note = Ancestral polymorphism is S, Derived polymorphism is I
  VARIANT 102: note = Ancestral polymorphism is M, Derived polymorphism is V
  VARIANT 86: note = Ancestral polymorphism is T, Derived polymorphism is S
  VARIANT 85: note = Ancestral polymorphism is H, Derived polymorphism is Y
  VARIANT 84: note = Ancestral polymorphism is A, Derived polymorphism is T
  VARIANT 82..181: note = Derived polymorphism lacks residues 82 to 181
  VARIANT 7..181: note = Derived polymorphism lacks residues 7 to 181
MATRRQWWWWCLLLLAAWCCAAAAQSPPAADPLQSKCQGDFGKLTDCMDYATGHAASPSSTCCGDAGDTEKARPECLCYIIQQTHTGRNQVQSLGLRFDRLMALPAACNLPNSNVSLCITLLNLKPGSADYALFANASKITPSAGGNPASDSAAGSGVKLRAGVSGGVALAVVSAIASSLF

SEQ ID NO: 718 - protein, 448 aa, Zea mays
  VARIANT 293..448: note = Derived polymorphism lacks residues 293 to 448
MACGSRSRTNEMVDEYEKLVDSANKYGTLLEVVQVLTDLKLTIKRAYISSDGEWFMDVFHVVDQDGNKLYDCQVIDRIEQSLGAGSLSFRGPPERAVAVEAEAEEAQTTIELVGRDRPGLLSEVFAVLADLRCNVVASEVWTHDGRVAALVHVTDADTLGAIEDPARLDTARRLLRHVLRGSSRDKKAARAAVSARVVEHAPRRLHQMMRADRSARRDGEGEGEGDGERERGGAGMPVVAVEDCAERGYTLVNVRCRDRAKLLFDTVCTLTDMQYVVFHGTVIAEGSEAYQEYYIRHLDDRAASSGEERERLRRGLEAAIQRRYTEGLRLELCCEDRVGLLSDVTRVFREHGLSVTHAEVGTRGARAANVFYVVDASSGEPVQAQAVAAVRAEIGEQLLFVREHQDAAAAAANGTRSTVAGGRRSLGNMIRSRSEKFLYNLGLIRSCS

SEQ ID NO: 719 - protein, 453 aa, Zea mays
  VARIANT 143: note = Ancestral polymorphism is C, Derived polymorphism is F
  VARIANT 209..453: note = Derived polymorphism lacks residues 209 to 453
MVRWGEMVEEEEDDEYAKLVRRMNPPRVVIDNDSCGNATVIRVDRVNKHGILLEAVQVLVDLNLVITKAYISSDGNWFMHVFNVTDQDGSKLHNREVIDHIQKCLESDGYLVPPANGYALPEDQFTSIELTGADRPGLLSEVCAVLATLSCNIVKAEVWTHDGRTAAVIQVTDEATGRAVHDAGRLSRVQELLRDVMRGDGTCNRGGTGISAERRLHTLMLDSVGGGGAEEAGGGRDESGGCGVARPKVVVMDCAERRYTVVILRCRDRPKLLFDTLCALADLQYVVFHGTVDAEGASKDKEAYQEYYIRHVDGHPVRSDAERARLVRCLEAAVERRASNGLELEVWTEDRVGLLSEITRVFRENSLSIIRAAITTRDGKAEDTFYVSDAYGNPVDGRTMDAVGEQLGHAVLRVKRGGHDAPVKHEAEGGAVSVLGSLLKSSFQGLRLIRSYS

SEQ ID NO: 720 - protein, 257 aa, Zea mays
  VARIANT 213: note = Ancestral polymorphism is I, Derived polymorphism is T
  VARIANT 189: note = Ancestral polymorphism is T, Derived polymorphism is N
MAPKRGGRAPVPAKKKAVVTNPLFEKRPKQFGIGGALPPKKDLHRFVKWPKVVRIQRQRRILKQRLKVPPALNQFTRTLDKNLATNLFKMLLKYRPEDKAAKKERLLKRAQAENEGKTVESKKPIVVKYGLNHVTYLIEQSKAQLVVIAHDVDPIELVVWLPALCRKMEVPYCIVKGKARLGSIVHKKTASVLCLTTVKNEDKLEFSKILEAIKANFNDKFDEVRKKWGGGIMGSKSQAKTKAREKLLAKEAAQRMT

SEQ ID NO: 721 - protein, 236 aa, Zea mays
  VARIANT 15: note = Ancestral polymorphism is E, Derived polymorphism is D
MRLNKVEVNLIRLLEAAPWQQNQAKLLYYVTTARELLEQLGAETTPEGISSISKAKLSEYSEKIEALASRLAASLPENEKPITESRDEISYDEAKAESPISLSSGLRRRSTAHAEVGPSHHERKEDIGAPIKLDAEAQAHIEKHRKLQEDLTDEMVELARQLKESSLMMNQSVQETEKILDSTERAVEHSLASAGHATSRAAEVYSLASKTTCFQWLLMFVMACMFVMVVLLIRIT

SEQ ID NO: 722 - protein, 356 aa, Zea mays
  VARIANT 24: note = Ancestral polymorphism is R, Derived polymorphism is C
  VARIANT 25: note = Ancestral polymorphism is L, Derived polymorphism is I
  VARIANT 31: note = Ancestral polymorphism is L, Derived polymorphism is H
  VARIANT 40: note = Ancestral polymorphism is R, Derived polymorphism is H
  VARIANT 42: note = Ancestral polymorphism is D, Derived polymorphism is G
  VARIANT 44: note = Ancestral polymorphism is R, Derived polymorphism is L
  VARIANT 45: note = Ancestral polymorphism is R, Derived polymorphism is C
  VARIANT 50: note = Ancestral polymorphism is R, Derived polymorphism is H
  VARIANT 77: note = Ancestral polymorphism is A, Derived polymorphism is V
  VARIANT 98: note = Ancestral polymorphism is V, Derived polymorphism is I
  VARIANT 103: note = Ancestral polymorphism is P, Derived polymorphism is S
  VARIANT 131: note = Ancestral polymorphism is M, Derived polymorphism is T
  VARIANT 137: note = Ancestral polymorphism is N, Derived polymorphism is S
  VARIANT 146: note = Ancestral polymorphism is G, Derived polymorphism is A
  VARIANT 233: note = Ancestral polymorphism is P, Derived polymorphism is L
  VARIANT 256: note = Ancestral polymorphism is E, Derived polymorphism is A
MAAETKPAAASGVAGEMEVEAYRRLFPVAFLERHLGESVRIDARRLREARPTTVALGAVSSAHGSALARLGDTAMLASVKLEVMSPPAEHPDEGSVAVEFHMPPICSPLVRPGRPTDVAPVISKALEDVLTSSGMLNLKDLCLITGKASWLAYLDIYCLNADGSLFDAALISAVAAFTHCRFLFFHFHLCKKTAIANTLTVIENVKDWFYLLLPCLFLSNHYKFYVIFAVEIPLVSVGDDGRLFTVGGNDGKNKFELVNREKRKLTLGAIPLSLTCALHKDEILADPTSEEESIIETYVTVVVDSSDRLVSLQKLGGAVTCMATIKECISLAKERRRSLREILLDSIKAMEVDQTE

SEQ ID NO: 723 - protein, 89 aa, Zea mays
  VARIANT 47..89: note = Derived polymorphism lacks residues 47 to 89
MDNPEMQRFIQLVNRDALLARARCCCYHKEQQKAMMNEMVGKLTSACWDKCITSAPGSKFSSGESTCLTNCAQRFLDMSVLIAKRFEMQ

SEQ ID NO: 724 - protein, 451 aa, Zea mays
  VARIANT 264: note = Ancestral polymorphism is R, Derived polymorphism is M
MALPGPAATRAAVRLCRIAASASSYLPSAAADGRRELELPFALVAERGMVVGGHRGMGMNAVGAPPGARFGAARERENTLLSFGRAAAHAAVAFVEFDVQVRLAVSFGTLFGFGLEFAVTPPQHCDAKMVTKDGCPIIFHDDFILTQGTGAVHERRVTDLLLEDFLSYGPQRESCKVSYLLAIYFFSCEVHECMLKALIYSLSFALAFQVSKPLLRRAGDGRVLNWTTEDDDSLCTLQEAFQRVSPRLGFNIELKFDDSIMYHRKDLQCALKAVLQVVFEHARNRPVFFSSFHPDAAQMMRELQSLYPVLFLTEGGTSKHHDPRRNSFDDAVRVCLEYDLHGIVSEARGVLKNPSAVARAQESNLALLTYGQLNNVWEAVYIQYLMGVHGVIVDRVEEISDAVAGFGLGKPGLGRGGAGVDGAKTHQAQAFSQQQLGFLLRLIPELIEQRH

SEQ ID NO: 725 - protein, 164 aa, Zea mays
  VARIANT 54: note = Ancestral polymorphism is L, Derived polymorphism is F
  VARIANT 147: note = Ancestral polymorphism is D, Derived polymorphism is Y
  VARIANT 148: note = Ancestral polymorphism is Y, Derived polymorphism is C
MLAVDRLDALSALDASGNVLVVVEQHVVDSVNFWAARLQCRQTPVQYRMHPCLLEFPSNCFYEGTLQNGVTVNERQSSGIDFPWPVPNRPMFFYVQMGQEEISASGTSYLNRTETANVEKIVTTFLRSGVVPSEVASVDSFQGREKDYIILSCVRSNEHQLSFV

SEQ ID NO: 726 - protein, 231 aa, Zea mays
  VARIANT 72: note = Ancestral polymorphism is V, Derived polymorphism is L
  VARIANT 101: note = Ancestral polymorphism is G, Derived polymorphism is C
MSAERAPVLVRHGGGGVEALRQLPPGFRFRPTDEELVVQYLRRKAIGVPLPAAVIPVFRDLYSRDPWDVVAVSAPADTRSEGEKYFFAVRPASGGKSSGAGTGSRAAAGGRWKPSGKEKPVVLPRPCGGGSLLVGVKRAMTFVPRRRKKTAALPSAALKTGWVMHEYRLAAPLHKNGCSLAQAQGEWVVCRVFQKGGNRPRRRQREASPPPSASSSCVTDASSSDLDEVSS

SEQ ID NO: 727 - protein, 560 aa, Zea mays
  VARIANT 462..560: note = Derived polymorphism lacks residues 462 to 560
  VARIANT 458..560: note = Derived polymorphism lacks residues 458 to 560
  VARIANT 439..560: note = Derived polymorphism lacks residues 439 to 560
  VARIANT 435..560: note = Derived polymorphism lacks residues 435 to 560
  VARIANT 331: note = Ancestral polymorphism is S, Derived polymorphism is L
  VARIANT 309: note = Ancestral polymorphism is V, Derived polymorphism is A
  VARIANT 277: note = Ancestral polymorphism is P, Derived polymorphism is L
  VARIANT 269: note = Ancestral polymorphism is P, Derived polymorphism is L
  VARIANT 161: note = Ancestral polymorphism is P, Derived polymorphism is S
  VARIANT 145: note = Ancestral polymorphism is D, Derived polymorphism is N
  VARIANT 102: note = Ancestral polymorphism is P, Derived polymorphism is L
  VARIANT 53: note = Ancestral polymorphism is D, Derived polymorphism is V
  VARIANT 50: note = Ancestral polymorphism is D, Derived polymorphism is N
  VARIANT 49: note = Ancestral polymorphism is G, Derived polymorphism is D
  VARIANT 47: note = Ancestral polymorphism is R, Derived polymorphism is W
  VARIANT 45: note = Ancestral polymorphism is P, Derived polymorphism is L
  VARIANT 40: note = Ancestral polymorphism is R, Derived polymorphism is G
  VARIANT 34..560: note = Derived polymorphism lacks residues 34 to 560
  VARIANT 32: note = Ancestral polymorphism is T, Derived polymorphism is M
  VARIANT 24: note = Ancestral polymorphism is A, Derived polymorphism is T
MEVARQLYGRVTGEAVYVAEPVSAPARRGSPTKGCLGAMRLVAGPRRKGDQVVCLGFDMRNTVCSSNGCYPTIVLVHVWGIGHFVPMLEEASGLAIRFHHLPAVEPPTDHSGIEEYISRYVQLYSPHVKAVVASLTCPVAGVVVDIFCTVLFDAAYQLSVPAYVYLITSAAMCALLLRSPALDEEVVIEVEFEQMEGDVDVLGLPPVPASCLPTGLDNRKIPTYRWFLYNGRRYMEATGIIVNTIVEVEPRVLAAIADGRCTHGVPAPPVYSIGPPLGSVVFFCFGGQGCFTAPQAHDLDHSGHRFLWVLRGTPEPGTKMPSDGNLAELLSTDFLARTKDRGLVWPTKAPQKEILAHAAVGGFVTQCGWNSVLESLWHCMPMVPWPLAVEQHYIAFTLVADMGIAVALNVERKRKNFVEATELERAVKALMCDDETARKEALVLTLVIDDEKKLGDCQCDLWKQSYVVACTAVYDKLRRSHRLDVVRSGCTAPSIVKQEDLVVVANVGASRVVLGTTSDDDAITLSSVISVPEMTQRRTDNNDQFIVLTIVGVAFMLACF

SEQ ID NO: 728 - protein, 651 aa, Zea mays
  VARIANT 293..651: note = Derived polymorphism lacks residues 293 to 651
MRPWCTAFHQTASSRQPSKAEQRAAMGREAPAMAVALLAALVASAAMFMLAGTASASPAEGIQPLSKIAVHRATVEMQPSAYVRATPSLLGEQGEDTEWVTVKFGWKEPSEDDWIGVFSPSEFNSSATCPNPWPAEEPYLCTAPIKYQFANYSANYIYWGKGSIRLQLINQRSDFSFALFTGGLSNPRLIAVSEPISFKNPKAPVFPRLAQGTSHDEMTVTWTSGYAIDEAYPFVEWGALVAGGVRHTARAPAGTLTFNRGSMCGEPARTVGWRDPGFIHTAFLRDLWPNKEYHYRIGHELPDGSVVWGKPYSFRAPPSPGQPSLQRVIVFGDMGKAERDGSNEYAAYQPGSLNTTDALIADLDNYDIVFHIGDMPYANGYISQWDQFTAQVAPITARKPYMVGSGNHERDWPDTAAFWDVMDSGGECGVPAETYYYYPAENRANFWYKVDYGMFRFCVGDSEHDWRVGTPQYDFIEHCLSTVDRKHQPWLIFATHRVLGYSSNAWYAGEGSFEEPEGRENLQRLWQKYRVDIAFFGHVHNYERTCPMYQSQCMTSEKTHYSGTMNGTIFVVAGGGGCHLSSYTTAIPKWSIYRDYDFGFVKLTAFNHSSLLFEYKKSSDSKVYDSFTIDRDYRDVLRCVHDSCFPTTLAT

SEQ ID NO: 729 - protein, 116 aa, Zea mays
  VARIANT 3: note = Ancestral polymorphism is M, Derived polymorphism is T
  VARIANT 6..116: note = Derived polymorphism lacks residues 6 to 116
  VARIANT 7: note = Ancestral polymorphism is S, Derived polymorphism is L
MTMELESQVVVLRLLAFAAAVVVATNRQDRWGIVLTLIEDRYSPSGSTYTGINELRLRRLRAAHTAVYAKKLVSKHWLHHMGPVHGEPAGGVDRHRVGGLVGERAQRAVRRLPSLP

SEQ ID NO: 730 - protein, 315 aa, Zea mays
  VARIANT 300..315: note = Derived polymorphism lacks residues 300 to 315
  VARIANT 114: note = Ancestral polymorphism is R, Derived polymorphism is G
MAGFSRPNNSLLLKMPATLASSHTPNLSSLLFYDQNHGQAVNANAAAMMVEDDASLQSSSAVVDTSPQPQGSAAAASPMERKRKPAEDSATLSSAQSKEDCKQQQESKSRRGKRPHNKEANTEEKSATEDEATRGYIHVRARRGQATDSHSLAERVRRERISERMRMLQALVPGCDKVTGKALILDEIINYVQSLQNQVEFLSMRIASMSPVLYGFGLDSDGLHDHAQKMGVMFQEALAMAGPVLSQASPAAPSEAIMDTTTPYSLHGHGQGSISFSQDNGSSTYLMQHQQAAGEPTRQQELLSQLVFNNMCSFQ

SEQ ID NO: 731 - protein, 823 aa, Zea mays
  VARIANT 579..823: note = Derived polymorphism lacks residues 579 to 823
MYFAKLDDSPMFRTQIQSLEESAELLRERCLKFHKGCRKYTEGLGEAYDGDIAFASSLETFGGGHNDPMSVAFGGPVMTKFTIALREIGTYKEVLRSQVEHMLNDRLLNFVDIDLHDVKDAHKRFDKASLSYDQIREKYLSLKKGTRPDITTAIEDELHSARSSFEQARFNLVTSLSHVEAKKRFEFLEAVSATMDSHLRYFKQGYELLHQMEPYINQILAYAQQSRERANKEQASLVERMHEYKRQIDRESRSSINGLNDSYNGDRMQTIGRSSHKQIEAVMQSTSKGKVETIRQGYLSKRSSNLRADWKRRFFVLDSRGMLYYYRKQITRPPAGCSMQRNVNPPEHGSGLLSRLFSSHYHIHDEKSVARHTVNLLTSTIKVDAEQSDLRFCFRIISPTKIYTLQAESAVDQMDWIEKITGVIASLLSSQSPEQCFMSSPKGSGHDRSTSDGSSFTSSVEFEPSVIDDLVLEKYSGNGQHDVIRGTHHHRTSMKPEKPIDLLRKVDGNNMCADCGALEPDWASLNLGALLCIECSGVHRNLGVHISKVRSLTLDVRVWEPSVINLFQSLGNMFVNNIWEDMLPDDNSSADGSDTSQYLSVSKPKHKDVFSAKEKFIHAKYVDKEFIRKRSMDENQLAEQMWNSVAANDKKTAYSLIVRSRANVNLVYGEMPSSPFLTLGKALQQEQPVSPPDGSPKFFDCNSHDKISPREPLSPASTSSRTDDMEDGCEGLSLLHLACRVADVGMVELLLQYGASVNMNDSRGRTPLHHCILKGRHRHAKLLLSRGADSQAMDRDGRTALQYAIDGGTSDEDILALLEDHSR

SEQ ID NO: 732 - protein, 113 aa, Zea mays
  VARIANT 86: note = Ancestral polymorphism is T, Derived polymorphism is A
  VARIANT 83: note = Ancestral polymorphism is L, Derived polymorphism is S
  VARIANT 65: note = Ancestral polymorphism is G, Derived polymorphism is C
  VARIANT 61: note = Ancestral polymorphism is E, Derived polymorphism is K
  VARIANT 60: note = Ancestral polymorphism is A, Derived polymorphism is D
MGAGLDPSPSFGGCSDPVLVELSMGGDYYRACCGEPDSDIPEGPKLPCVGDKEPLSSSAAEFQSGSPILQEKIKLLGEQYGALRRARGDGNCFYRSFIYVFLPGTHPRETRQS

SEQ ID NO: 733 - protein, 448 aa, Zea mays
  VARIANT 275: note = Ancestral polymorphism is R, Derived polymorphism is P
  VARIANT 388: note = Ancestral polymorphism is M, Derived polymorphism is T
MTPAAAWCAQHRLRFLLPSLFLAPVLFFLLSPPSSPPFVSLPASGELPPLSSRLIWAQRWLVEWRPCGWWRTAPLQAPSRRNGYIRIDCYGGLNQLRRDLCDGIGVARLLNATMVLPKFEVAAYWNESSGFADVFDVDYFIEQTRGYVEVVKDLPAEIASREPFKVDCSKRKGHFDYVETVLPALLEHQYISLTPAMNQRRDRNPAYAKASYCQGCYSALRLNKNVESKAVELLQAIPKPFLSLHLRFEPDMVAYSRCSYTGLSSKSMDSIEAARREGRKVLTGDAARLWRNRGKCPLTPSETAFILQALGIPTNTNIYLAAGDGLMELEGFTSVYKNTYTKSSLLTHEAFENMHGNTKAALDYYVSVNSDAYVATFFGNMDKMVTAMRTMQGLQRTLVLSRRAFANYTAAGLAGQQLAKAMWDAHREEYVRGRGSALPEYCFCEFKL

SEQ ID NO: 734 - protein, 147 aa, Zea mays
  VARIANT 11..147: note = Derived polymorphism lacks residues 11 to 147
  VARIANT 110: note = Ancestral polymorphism is D, Derived polymorphism is N
MGCFHSTAKRQHPGYEDPVHLASQTSFSVSEVEALFELFKSISRSVIDDGLINMDNPSEKDINQGMLVIFNVDPSITNNDIHQIFSEYGDIKEIHDAPQKGHHKIIEFYNVRAAEGAARALNRSDLAGKKIKLETGRLSGARRFSEP

SEQ ID NO: 735 - protein, 586 aa, Zea mays
  VARIANT 2: note = Ancestral polymorphism is A, Derived polymorphism is T
MARILMRLLLLAAAAAVAAGDGCLNSGCVALGSYLVARNQNLTYIASLFGIGDYHALARYNPGTTNLDYIQAGQSVNISFTCGCHTFPNSDATYLGGSFPHKVVTGDTYGGIAQNYNNLTSAAWLAVTNPYPTNNIPDTNTVVNVTVNCTCGDPKISSDYGFFLTYPLMGQTLAAVAANYSFNSSSQLDLLRKYNPGMDTATSGLVFIPVKDGNGSYHPLKPPGRKKANKAALLPSSEDSTQLATTSMDKSALSTSQADSSSGVPGITVDKSVEFSYEELFNATEGFSMSNKIGQGGFGAVYYAELRGEKAAIKKMDMQASHEFLAELKVLTHVHHLNLVRLIGFCTESSLFLVYEFIENGNLSQHLRGTGYEPLSWAARVQIALDSARGLEYIHEHTVPVYIHRDIKSANILIDKNYRAKVADFGLTKLTEVGNTSLPTRGIVGTFGYMPPEYARYGDVSPKVDVYAFGVVLYELISAKDAIVRSTESSSDSKGLVYLFEEALNTPDPKEGLQRLIDPALGEDYPIDSILKMTVLARACTQEDPKARPTMRSIVVALMTLSSTSEFWDMNAIQENQGVVNLMSGR

SEQ ID NO: 736 - protein, 418 aa, Zea mays
  VARIANT 3: note = Ancestral polymorphism is K, Derived polymorphism is N
MTKISRSLLVVIALVLLGPHLPPSEALTPKQGVRSKTFLSPPILLRPGDVADKFYYDIPFPRGHLALKSFNGEVVDERGAPVPLHETYLHHWVVQPYYALVVSAEGGSSRPRTIPARNAGVCSGHTLGQYYGLGSETRRTATWVPDPYGIEIGDPAAAPAEGYEQRWLLNVHAIDTRGAADRTMACTECRCDVYNVTADWRGHAIEPGYAGGLRCCYDGTRCGAAAEGAEGKARTVFLRYTVMWRDWSPAAVLPVRIYIFDVAGCGVEYDVEEQCSGGAGGECVHVKTATQALPRGGDVVFGVAHQHAGGAGASLHGADGRLLCESAATYGGGREAGDEAGYIVGMSTCYPRPGAVTVRDGEPLTVVSRYSSDRRHTGVMGLFYILVADHARQLPPQEGLCFSFPVPWCLPSWLSSNL

SEQ ID NO: 737 - protein, 1023 aa, Zea mays
  VARIANT 48: note = Ancestral polymorphism is A, Derived polymorphism is S
MEGFAKPSTSSGSGVTVRASVAAASIEERFADLCKAKLGLDESTTRQAMQLLKETNNILKSSMSSLGGGSPEEIERFWSACVLYCVSRLSKAGRSKEDGSVSLCQILRASKLNIVDFFKEMPQFCIKVAHILTGLYGSDWEKRLELKELQANVVHLSLLSSYYKRAYQELFLSNDGKSSDNSSESNNQEASDYYRFGWLLFLVLRIQTFSRFKDLVTSTNELVSVLAVLIIHVPVRLRNFDIKDSSYFGKKSDRGVSLIASLCEKHHTSEDELSKALEKTNTLIMDILKKKPCPATSACQQDNLSFIDPEGLTVFKDLLQGDSLKPSLIILEKEYENAINTKGELDERMFANDEDSLLGSGSLSGGAINLPGTKRKYDVMASPAKSISSPNPMSPPRFCLSPKGNGFCNSKMAPSTPVSTAMTTAKWLRNTVSPLPSRPSGELLRFFSACDKDLTDDIAHRAGIILGAIFTSSSFGERICTSMRSASRMDAIWTEQRKMEALKLYYRVLESMCRAESQILSGNNLTSLLSNERFHRCMIACSAELVLATHKTVTMMFPAVLEKTGITAFDLSKVIEGFVRHEDTLPRELKRHLNSLEERLLESMAWEKGSSMYNSLIVARPALSVEISRLGLLAEPMPSLDAIAAHHNISLGGLPPLPFQKQERLQDKDEVRSPKRACTERRNVLVDSNSLRSPVKDIIKPKLPPLQSAFASPTRPNPAAGGETCAETGIGVFFSKISKLAAIRIRSLCERLQLPQQVLERVYSLVQQILSQQTGLFFNRHIDQIILCSIYGVAKISQLELSFKEIIFGYRKQPQCKPQVFRSVYVHWPPRSRNGKTGEDHVDIITFYNEVFIPAVKSLLVEVGPGASASPKKKEEEKGPADVGPFPESPRLARFPNLPDMSPKKVSATHNVYVSPLRSSKMDTLLSPSSKSYYACVGESTYAFQSPSKDLKAINNRLNRQDHQKSSSLEVCCVSGGKKVSGRLNFDVVSDLVVASSLGSDRDAKPAADPAKTTPVKCEPSDS

SEQ ID NO: 738 - protein, 676 aa, Zea mays
  VARIANT 270..676: note = Derived polymorphism lacks residues 270 to 676
  VARIANT 300: note = Ancestral polymorphism is T, Derived polymorphism is I
MTSSFALPGPPAGDARVRGEWLAAASAFGGYLELEGRVHGGQPSGAVFTDSAMPLLLSSKGAPSSLLGDIEAYLNPISGELLADPALRLTRYLAAAKLSLVLQRQQALGTGSGTASGDTHEHEKRPKKLLDQAMSSLAMEFCHLRIWRLDADVLRGHPHRRLGISPASIWESVVRGGCRGGSRSAADSVASWPSSSSTSFGGTSGTGSSSGFLSALCEDMSVRSDKAFGRMDLIDRKVLSTINDIAGLMIQGGYEYEDMLRRAIDRHSAQLASYLEILDMDNILGGHKEEPKETVLNVWTAGMHIIVGVLGEMRRQLNGQDLGWFNMLKEDYFSAIAKQSVRRLLRAADSICTQIHGVGVASPVVDPVHMMDTDDTYTAVKPDDLLLSSRTAVGLVMMYKALNCGMPIVLALLSTGHAKDSILAEGEALVQRLSDMFVKLCVEQKELVRARRLDISDTGVHPFTRRVMAHVRTLVQHGSTVCLMLKGRPKAAFHELVAQLVSSLECALDSNSRGLQIPGQQQMFLLNNAHMMLQEARAERDLGRVLGEGWLARRHDQLDVFIAGYVDTSWAPVVSCALRRRRRTTRARETLWPASSHRQSFDKLTWLLETTCRVHRTWKVSDPLVRDKVREAVFHKVVPVYRMHMENCQSEKKQQQQQKCARRHSVATAGTVRGVG

SEQ ID NO: 739 - protein, 211 aa, Zea mays
  VARIANT 5: note = Ancestral polymorphism is G, Derived polymorphism is V
  VARIANT 21: note = Ancestral polymorphism is K, Derived polymorphism is R
MKTIGKAAELVSKAVGALRGKAAVLRARLLFLASPRRRAAVFAGISRHTRALTTPRQHKAKAKAAAQQYCHGGSRAALAPADDVEGLGAAGGLPRHRLPVPAASLLLAVQEGGGGGSDGVGCTADWALALRSLFDDDEGGGDGYLPAAAAATDGLDEEEDQDGTSVIDVIRRRREGDGQEFRIEDEIDRAADMYIARVRRRMSAQLEDLIA

SEQ ID NO: 740 - protein, 380 aa, Zea mays
  VARIANT 39..380: note = Derived polymorphism lacks residues 39 to 380
  VARIANT 165..380: note = Derived polymorphism lacks residues 165 to 380
  VARIANT 175: note = Ancestral polymorphism is L, Derived polymorphism is H
  VARIANT 197: note = Ancestral polymorphism is R, Derived polymorphism is C
  VARIANT 314..380: note = Derived polymorphism lacks residues 314 to 380
MILILWLVSFVGMLFNFLTLVYIEHLISGCECHESDTQQTTNSGTPLLFSAVNCWLKCMLLEPYNQTDHPECKSRPDSGLSAITELDPGYITAKRTIVTASTQIIEGAYPTEGCTNKAVRGDQCDNCRHMLNPTELIDPKCKVRNEKARRYLSSMRKKDPVPFSQKFPSADPLALKLLEKLLAFDPKDRLTAEEALRDPYFKGLAGVEREPSYQPIRKVEFDFEHKRMSNAVDQFKKQFSHLEESGGNDPSVPTDRKHASLLRTTVVQSNPIPAKEQPLAVSSRVRPVSDDSCKNPWEKASGPRNVTRTSLTPQGLQAQAGSVRVNGPVTDSRYPAHQQIPQAYGYRQMPARLDSTNPSQAMGGYTLQSQKETLFEELPF

SEQ ID NO: 741 - protein, 257 aa, Zea mays
  VARIANT 206: note = Ancestral polymorphism is Q, Derived polymorphism is L
  VARIANT 225: note = Ancestral polymorphism is L, Derived polymorphism is P
MSREDNVYMAKLAEQAERYEEMVEYMEKVAKTVDVEELTVEERNLLSVAYKNVIGARRASWRIISSIEHKEESRKNEEHVIQIKEYRGKIEAELSNICDGILKLIDSHLVPSSTAAESKVFYLKMKGDYHRYLAEFKTGAERKEAAESTMIAYKAAQDIALAELASTHPIRLGLALNFSVFYYEILNSPDKACNLARQAFDEAISQLDTLGEDSYKDSTLIMQLLRDNLTLWTADSTTEDGIEEGNEASKGDAGEGQ

SEQ ID NO: 742 - protein, 431 aa, Zea mays
  VARIANT 63..431: note = Derived polymorphism lacks residues 63 to 431
MASAWNLRDLLMLTSNMLAIFFPFEEKEGKEELGAELNRSLCAGGFAAVILTHRISKTKMDLRAVLIEQVVMAWVSKLAVHIILGRLMIPRPATCDSSMGNGLNANSDPAKPPSIEVPALSLDELREKTDDFGSKALVGEGSYGRVYYAVLENEQHVAVKKLDTSADPEPDNEFLAQVSVVSRLKHENFVDMLGYCIQGDQRLLAYEFATMGSLHDILHGRKGVAGAQPGPALDWMQRVKIAVDAAKGLEYLHEKVQPSIVHRDIRSSNVLLFEDYKAKIADFNLSSQSPDMAARLHSTRVLGTFGYHAPEYAMTGQLTQKSDVYSFGVVLLELLTGRKPVDHTMPRGQQSLVTWATPRLGEDKVKQCVDPRLNGEYPPKGVAKLAAVAALCVQYESEFRPSMSIVVKALSPLLVNAPYQPAAAPDVSSDA

SEQ ID NO: 743 - protein, 101 aa, Zea mays
  VARIANT 8: note = Ancestral polymorphism is E, Derived polymorphism is D
MDAEDERDLLKKIRALEEGQAELKRQVSKLQRRPDRDRRGGSSSSSQPADAATESSPSSRWGRNPRNAERLNRYTSAEAVGQDITRLIVHADDSVAICRGW

SEQ ID NO: 744 - protein, 398 aa, Zea mays
  VARIANT 136: note = Ancestral polymorphism is D, Derived polymorphism is Y
MALMLLARNLRSRLRPPLAAAAAFSSAAAEAERAIRDGPRNDWSRPEIQAVYDSPLLDLLFHGGSNISDMPFVLLIAEQLLYFQAQVHRNVHKFREVQQCTLLSIKTGGCSEDCSYCPQSSRYNTGLKAQKLMNKYAVLEAAKKAKESGSTRFCMGAAWRETIGRKSNFNQILEYVKEIRGMGMEVCCTLGMIEKQQAEELKKAGLTAYNHNLDTSREYYPNIITTRSYDDRLQTLEHVREAGISICSGGIIGLGEAEEDRVGLLHTLATLPTHPESVPINALVAVKGTPLEDQKPVEIWEMIRMIATARITMPKAMVRLSAGRVRFSMPEQALCFLAGANSIFAGEKLLTTANNDFDADQAMFKILGLIPKAPSFGEEEASAAAPTESERSEQAASM

SEQ ID NO: 745 - protein, 165 aa, Zea mays
  VARIANT 43: note = Ancestral polymorphism is A, Derived polymorphism is V
  VARIANT 46: note = Ancestral polymorphism is N, Derived polymorphism is Y
  VARIANT 67: note = Ancestral polymorphism is Q, Derived polymorphism is L
MSSSDPDDAPDGGEDSPLFRRSGGPSSGGTVGDVPVSQSLIKAASNVCFSLFVLAVLVVTVVAVTYQPPDPWLQSSAAITTSLSRVLPNSTFLVPDDSLLPTGEDFNSSTAVPAPVRDEDDAAAAVSAASAAAAGNRTCDPDSRRGGGGGGVLRACASRRAACVW

SEQ ID NO: 746 - protein, 654 aa, Zea mays
  VARIANT 147: note = Ancestral polymorphism is F, Derived polymorphism is S
MDSDVEMNAASDEEVMDDEDYYDYCYSDVGDDGDGGSEEELVPVDYDEGLEAEGTDEVVSRREQTFVVLNEEVISERQEEDVSKVSAVLLITREEACALLHHYKWNISKLSDEWFADEEKVRHTVGLLLNGNHEPGSRKARFTFHISMLFLSKQKQHLTCGICFEGYSSDTMSSAGCAHFYCHECWEGYISAAIGGGPGCLSLRCPDPSCSAMVLQGMVNELAKDEDKAKYARFLLRAYVEGSKKTKWCPAPDCTCAVEFLGDENYDVSCNCKFSFCWNCTEEAHRPVNCETVSKWILKNSAESENMNWFVAGSGLAFDMILANSKPCPKCKRPIEKNQGCMHMTCTPPCKFEFCWLCLGAWSDHGERTGGFYACNRYESAKKEGVYDETESRRERAKNSLERYMHYYERWASNQTSRQKAQADLLKAEKDQLANLTYIYGIPETQLKFIIEAWSQIIECRRVLKWTYAYGYYLDDKVKSDFFEYLQGLLFLFHVDIINGFIIPCGNPWNILESNYLTGEAESGLERLHQCAEKDLHNFLTPVKFESTETTTPTVAEFGEFRVKLAGLTSVTRNYFENLVQALEAGLEDVHATAQAAGTSIAGTSSKKGGTKSKKKQHTKPSSDHTDDGWPCERCTFLNPPSVVVCSVCEKSRY

SEQ ID NO: 747 - protein, 88 aa, Zea mays
  VARIANT 35: note = Ancestral polymorphism is E, Derived polymorphism is Q
  VARIANT 29: note = Ancestral polymorphism is V, Derived polymorphism is L
  VARIANT 27: note = Ancestral polymorphism is D, Derived polymorphism is G
  VARIANT 16..88: note = Derived polymorphism lacks residues 16 to 88
MGLKRPTAGAGEAAAQTITLSMSAMWDTVRAAMREAEAAALEPTQSPPISAEDGTVDGGSIPAADGAAGLTAGQLFDQLCNSPYSVNY

SEQ ID NO: 748 - protein, 119 aa, Zea mays
  VARIANT 10: note = Ancestral polymorphism is P, Derived polymorphism is L
MSNKTENMSPLMQAEKCTSVDQEKNTSVKRNGQDNGITTSLSSSTVHVGACLSNNWDSRSRSMVPKVDVITSSASVVPVVASGVKPSQSVNNLVAKIVTSSKTAAKVSSSIFSGAMSHL

SEQ ID NO: 749 - protein, 98 aa, Zea mays
  VARIANT 8: note = Ancestral polymorphism is L, Derived polymorphism is P
  VARIANT 2: note = Ancestral polymorphism is G, Derived polymorphism is V
MGLVRLGPSVADIADGPRQCYSALVLYNLCPKQIHEIKDFLLTARRKDARSVKIKRSKDVVKFKVRCSKYLYTLCVFDAEKANKLKQSLPPGLSVQEV

SEQ ID NO: 750 - protein, 177 aa, Zea mays
  VARIANT 170: note = Ancestral polymorphism is A, Derived polymorphism is T
  VARIANT 164: note = Ancestral polymorphism is K, Derived polymorphism is N
  VARIANT 126: note = Ancestral polymorphism is N, Derived polymorphism is T
  VARIANT 39: note = Ancestral polymorphism is R, Derived polymorphism is Q
  VARIANT 27: note = Ancestral polymorphism is D, Derived polymorphism is N
  VARIANT 11: note = Ancestral polymorphism is R, Derived polymorphism is C
MALRSRTHISRSLASSHSTCTFTMKPDHSSLLAINMSLRFDEKMVLAVFRDLIILWMTKSLMDDVHGWGVLFDGRVGDITITVYIWNGEEPKPNKGHLAWADAFVITADSISMLSEACSIGLILKNVASLFMNKDSLKGIHYQGMELKDTPAPLEKFFAIELAKILFQYALQMVRCP

SEQ ID NO: 751 - protein, 245 aa, Zea mays
  VARIANT 55: note = Ancestral polymorphism is S, Derived polymorphism is C
MVMDKSNLPQPPPPPPSSASSLKSLNKASYKISKQSSSASSAPSPAPPSTMRAPSPPPPAPRPPAPLPPPQASSVPADHPPPQPPVYNIDKSDFRDVVQKLTGSPSHLLPPQPAAAPAPAPVMAPPPPPLMARPPPLPHTMAPPPPPPTAIPSRLHRIRPPPLAPPRPPPILQPAPPALSPLPPLPAVCMTAESPISAYMRRLRGMPSPIHVPTSPLGFGCLPSPRTPPSPGVPMPATSPRVRDP

SEQ ID NO: 752 - protein, 262 aa, Zea mays
  VARIANT 56: note = Ancestral polymorphism is I, Derived polymorphism is T
MGADGEEASRIVVPMAVEGTSEQLAFVEESKLQKRKENADWAVRNRERRAVKRQRIRDEHKVTVRRPEDFVAAFRNKERDFLRMRTRLKVRKQPPAEALSSKLVFAIRIPGSVDLHPHIRKVLRKLRLTTVLTGVFLRATELTLKRLLVVEPFVTYGFPNLKNVKELIYKKGRGFFDKEPFPLTSNDLIEKALGDHGIICLEDVVHEIATVGPHFREASRFLMPFRLKCPERRLQMKRKPYKDGGDSGDRGDKINELIEKLN

SEQ ID NO: 753 - protein, 406 aa, Zea mays
  VARIANT 28: note = Ancestral polymorphism is P, Derived polymorphism is L
  VARIANT 67..406: note = Derived polymorphism lacks residues 67 to 406
  VARIANT 68..406: note = Derived polymorphism lacks residues 68 to 406
  VARIANT 97: note = Ancestral polymorphism is E, Derived polymorphism is K
  VARIANT 110..406: note = Derived polymorphism lacks residues 110 to 406
  VARIANT 247: note = Ancestral polymorphism is D, Derived polymorphism is A
  VARIANT 250: note = Ancestral polymorphism is G, Derived polymorphism is S
  VARIANT 259: note = Ancestral polymorphism is Y, Derived polymorphism is C
  VARIANT 270: note = Ancestral polymorphism is A, Derived polymorphism is V
  VARIANT 306: note = Ancestral polymorphism is G, Derived polymorphism is E
MVDSRRSARARDDGARLHAATQEDYFLPFNFSPVDKCTALTACIDDGRCHRVSKGAPEQKQIMTLRKCQEDVTNKVHATIDKHAERGLAVARQEVPEKRSKEDDGTGGPWQFVAPPLLPLLDPPPTEDNGGSAQARPDVATSSKKKEERQNSAYSGAANMTRKRPCRHRVPDSITAVQHERLEALGATKPPRLMIGKSLMASDVDPKQARLLFSSKRDSLSQVTRVFTQTEMGLVRDRAGLLVTAFDRDGRSYHLTCKYLESNSGYRFIAGWKAYVQDNGLGAAMRVDLWWFRSRKLHNRYELRDGKEKVPFTVDSGHPDGSLGLVLLHYENDLPLPLPLPLPLPLPLPERAVEAPPPVQEAETRHMESKTTNTEEEVNAAIGLLMLSQNDDRSPRSMKRTRRTRK

SEQ ID NO: 754 - protein, 308 aa, Zea mays
  VARIANT 12: note = Ancestral polymorphism is R, Derived polymorphism is W
  VARIANT 207: note = Ancestral polymorphism is A, Derived polymorphism is S
MASTASPPVFERVAGIRAIAESGRFKAWLLDQFGVLHDGKKPYPGAILALEKLAENGAKMVIISNSSRRSSVTMKKLKSLGFDTSCFLATITSGELTHQHLQKRDDPWFAALGRKCIHITWDDRGAISLEGLGLQVVNNVDDAEFILAHGTEALGSPSGVPLPKSLEELEQVLMLGIEKRLPMVVANPDYVTVEARDLRVMPGTLAAKYESLGGEVKWMGKPDKVIYTSAMSLAGVDARECIMVGDSLHHDIKGANASGMASAFVTGGVHADELGLGEFGETAGEDAVSSLCSKHGSYPSYVLPSFAW

SEQ ID NO: 755 - protein, 430 aa, Zea mays
  VARIANT 177: note = Ancestral polymorphism is S, Derived polymorphism is L
  VARIANT 195..430: note = Derived polymorphism lacks residues 195 to 430
  VARIANT 217: note = Ancestral polymorphism is F, Derived polymorphism is S
  VARIANT 232..430: note = Derived polymorphism lacks residues 232 to 430
  VARIANT 243: note = Ancestral polymorphism is S, Derived polymorphism is L
MAQDDIPESSASGSPTSSTPAARLNAAAPEFTPRSAAQHHGNNAHRRGPHHHHQPHHHPHYHPHQHYQPRHQHHQAQAEDEGSAAATAEDREGPAGAVQPQHRLPEPEARKLVKQVEFYFSDINLATTEHLMKFIAKDPDGFVPISVVASFRKIREIVYDRSLLVAALRTSSELVVSEDGKHVKRLQPFNAEEVQSRIVVAENLPEDQKHQTLMKIFSAVGNVKSIRTCYPQDISPAAANRTSRIEMIFANKLHSFVEYSTVEDAEKAVAEFGGGGNWREGIRVRSLLGCLKHGLGQGRKGGDEEYAADEDGPDTTDHPRDFGTDVTAQISEAHFDHQAEDGTHDKGGMRQQGRGRGRGGRGRGRGQHYGHNSRDGHHPIGTPPSEHPAVPKPPPGPRMPDGTKGFTMGRGKPLSITIDAAANPTTTDAA

SEQ ID NO: 756 - protein, 288 aa, Zea mays
  VARIANT 261..288: note = Derived polymorphism lacks residues 261 to 288
  VARIANT 186..288: note = Derived polymorphism lacks residues 186 to 288
  VARIANT 183: note = Ancestral polymorphism is W, Derived polymorphism is C
  VARIANT 116: note = Ancestral polymorphism is P, Derived polymorphism is H
  VARIANT 84: note = Ancestral polymorphism is A, Derived polymorphism is V
  VARIANT 54: note = Ancestral polymorphism is A, Derived polymorphism is V
  VARIANT 46: note = Ancestral polymorphism is D, Derived polymorphism is V
  VARIANT 30: note = Ancestral polymorphism is G, Derived polymorphism is D
  VARIANT 26..288: note = Derived polymorphism lacks residues 26 to 288
  VARIANT 7: note = Ancestral polymorphism is P, Derived polymorphism is R
MEFTLIPDLVPQNRHAVIKVYVSRKWIFRGAMDNGPIHHIDLVLIDKEGNGISAEIPGNLAEEKGSIIKENEIYEISRFTISSARQMFKPVHIDKMIHFTYHTIIKASLDSPSTFPRYVYHLTPLHQIESYIQKNEYFLDVLGVITQVSALKPVRTQTQESSNVIKEIIIKDINDVTMRLTLWAERAKAFKLDDVYNPLEQKPIVTLFVGCLAKNFQGAYLNGGTTCRWYFNPDIKEAAPYYQRFGSQKIKLQIPSEQEQQLSVAKETHVEHKTLHELLTLDPYAFPI

SEQ ID NO: 757 - protein, 45 aa, Zea mays
  VARIANT 1: note = Ancestral polymorphism is K, Derived polymorphism is M
  VARIANT 6: note = Ancestral polymorphism is R, Derived polymorphism is L
MEDTARRYFQQLKVSDFGLSVVADQFHPDGLLHTFCGTPSYVAPE

SEQ ID NO: 758 - protein, 95 aa, Zea mays
  VARIANT 62: note = Ancestral polymorphism is Q, Derived polymorphism is R
MAPRPAANHQATAEQAAKHLGRPSGAPSARAPRPPPAAPERPTGHRAEQSFNSVPDRVFLIQVAASKTKIYMVLELVNGGELLDRIVLQNRGYDG

SEQ ID NO: 759 - protein, 254 aa, Zea mays
  VARIANT 227: note = Ancestral polymorphism is D, Derived polymorphism is Y
  VARIANT 169: note = Ancestral polymorphism is Q, Derived polymorphism is H
  VARIANT 100: note = Ancestral polymorphism is R, Derived polymorphism is Q
  VARIANT 94..254: note = Derived polymorphism lacks residues 94 to 254
  VARIANT 40..254: note = Derived polymorphism lacks residues 40 to 254
MDELVCPAASSCSSPSPTSFFAAGHVPELEFVSWDVPEEWMEGTDWFDEPLDGDEGSRSAGNDLSGEPPAPAPKRRRGRKPGPRTNGPTLSHVEAERQRRDKLNRRFCELRAAVPTVSRMDKASLLADAATYIGELRDRVEQLEAEAKQASAAVTTAVAAASHSFAPLQEKLGLEVRMVAGLDAAALRLTTSAARHAPAHLMLALRSLDLQVQHACVCRVGGVTVQDAIVDVPAGLRDERCLRAALLQRLQPSG

SEQ ID NO: 760 - protein, 174 aa, Zea mays
  VARIANT 123..174: note = Derived polymorphism lacks residues 123 to 174
  VARIANT 5..174: note = Derived polymorphism lacks residues 5 to 174
MLRQQPLSDFGFPPPALQRPGETGVPNRSPCQPVQSHQSYQAISSPVTHQPGAFASSQQASTLQCGHFDPNFVEALKDAIGMMTQIGAPHVAGYNNSSIVRDIFIKDISDASLKITLWGDQASGFSIDNVCNQSNNKPIVIMFVGCLAKQFKGQSYLSGTTTTTWYFNPDIPEA

SEQ ID NO: 761 - protein, 664 aa, Zea mays
  VARIANT 284..664: note = Derived polymorphism lacks residues 284 to 664
MSANQTTSPSLPLLELPPTLSSPAENPHLCADHLPTRRRRRRHRRRRRRRRTEIQMSAAASSLLRPAPKWGGAPSHRRLVEEHLASLPHGLPRLRHVQELHAQLLKQGLHRDPHTASKLIASYALLRRVPACRCVFSAAVALPNSPFPSSTTLLTKTLLRAYALNSLPHAALAVFLDVPLRQRGTFTYSFLIKALAAAGLTPVRGAHAHVVKLGSAEDTFVGNALIDAYSKNQGLSDAKKVFDEMTTRDVVSWNTAMAAMVRQGEVDAARSMFDEMPEKDTVSWNTMLDGYAKAGEAEKAFELFQRMPGRNVVSWSTVVSAYCKKGDMEMARVIFDKMPAKNLVTWTIMVSACAQKGLVEEAGRLFTEMMDAAIELDVIAVVSILAACAESGSLALGKRIHRHVRQRKLSRSTLVCNALMDMFCKCGCVNRADYIFDTEIVEKDLVSWNIIIGGFAMHGPGEKALELFAQMKQQGFHPDAVTLINVLSACTHMGLVEEGRRFFANMETDYGIKPQIEHYGCMVDLLGRGGLIKEAVDMIKRMPWEPNEVIWGSLLSACRLHKNVEYAELAVNELSNLQPSSAGNYAVLSNIYAEAGKWSDMAKARVQMKGTGSQKTAGSSWIELNEAFHEFTVGDRKHPESDQISDMIDRLSSHVKFNFSYILK

SEQ ID NO: 762 - protein, 95 aa, Zea mays
  VARIANT 69: note = Ancestral polymorphism is G, Derived polymorphism is S
  VARIANT 55: note = Ancestral polymorphism is K, Derived polymorphism is M
  VARIANT 17: note = Ancestral polymorphism is F, Derived polymorphism is S
  VARIANT 15: note = Ancestral polymorphism is L, Derived polymorphism is F
  VARIANT 8: note = Ancestral polymorphism is S, Derived polymorphism is L
  VARIANT 5: note = Ancestral polymorphism is Q, Derived polymorphism is K
MMLDQGVSGFLLRLLEFKDKGSDEVVLKAMGRAINKIVMTVELIKISTGRGWDLKGQPVLLFYTSYPAGTEMLTNTAKLYKAALGNCFKTYHIGC

SEQ ID NO: 763 - protein, 264 aa, Zea mays
  VARIANT 101: note = Ancestral polymorphism is K, Derived polymorphism is M
  VARIANT 78: note = Ancestral polymorphism is C, Derived polymorphism is Y
  VARIANT 75: note = Ancestral polymorphism is C, Derived polymorphism is Y
  VARIANT 74: note = Ancestral polymorphism is W, Derived polymorphism is C
  VARIANT 63..264: note = Derived polymorphism lacks residues 63 to 264
  VARIANT 60..264: note = Derived polymorphism lacks residues 60 to 264
  VARIANT 45..264: note = Derived polymorphism lacks residues 45 to 264
  VARIANT 43..264: note = Derived polymorphism lacks residues 43 to 264
  VARIANT 33: note = Ancestral polymorphism is F, Derived polymorphism is S
  VARIANT 29..264: note = Derived polymorphism lacks residues 29 to 264
  VARIANT 23: note = Ancestral polymorphism is E, Derived polymorphism is K
MASLQDFSAGPVPDAIKRKLAVETSVPPQQSSFSYVTGQKQPQNWYPTKKKVKVPHLPSQILQCPRPNVVPSFWCKICKVDCVTEFNFSAHVGGKKHKAKKLEILGTLGAASRCAGNRSENGWFWQLPKYHEDPTTEELAKTLDCWPSMNYYITGCRYVLMPWKFNKCYALFVIDHGKKHVSFIDFTPTQDWCKHIPYKRVNTSYLVLQAMVMWGNGRRMEFVRDARILRRNFVIDLLSYEDNSCRYAIPANIQHRLINISTKE

SEQ ID NO: 764 - protein, 625 aa, Zea mays
  VARIANT 416..625: note = Derived polymorphism lacks residues 416 to 625
MGKMSCFSGLLSCKKKALEGKNKGAYAKKASGNDCPKVKPVEFMDMVVADAVVDDVSRCRDSVPASACSSRLVAHAAAELARHATGENGDKAAAKRDSSSAAGSSSSGYSSDGTGDDAKSAEPDDGEPCSLGRMSPTAASPKLMRSCSNIETTRSVLTGSDLPAKSRSYDDLKTLPSHGSSSARSGGAVRASPTPASSRTSCSADRVMLKKRSSRQVLPSRSRKLWWQLFLWSHRNVHRRRGASAPTPTTLLWPSPGREGGGAAHRRDGYASDTLGTATADDAKEKGVAVEEEGPRVPTQWVAFSAEASPLDRVSAWVNSLGNGSFHAVDEDGGATGHGGDGASRLRPRPRRSEIVELPTSAAAAEAGQASGIIVQTLNTFSSVAHIAGMGLQAVPAIAAFSTLRAVNLSGNVIVRITAGSLPKGLHSLDLSRNKIAIIEGLRDLTRLRVLNLSYNRISRIGHGLSSCTAIRELYLAGNKIGDVEGLHRLLKLAVLDVSFNKIGTAKSLGQLVANYGSLRAINLLGNPVQANAGDDTLRRAVSGLLPRIEYLNKQAVKPQRAREVAKDSVAQAALGNAAGANSRRRPARRLGQSPAGSSAAKGRRGSRGRSVTRPQSSSLPLPRR

SEQ ID NO: 765 - protein, 692 aa, Zea mays
  VARIANT 267..692: note = Derived polymorphism lacks residues 267 to 692
  VARIANT 230..692: note = Derived polymorphism lacks residues 230 to 692
MLVLINRYFRSRNSSPAGGGGEEMAPAAASSDHLCLPGCVPVRAKRASASASAAAAATVTTARASRHNFVRAAASGLLAGAHFTNHESLPPLPDAYAEFVAAFPQYAHGALARADAIRGEEYQHLDRHVCLDYTGINLFSHAQMSASLPSTSSAPPAWQPPFFDIAYKSTSLRAQVQCGDNAAGAEAGVGAAVTRRIMASLKIPGDEYAMVCTANRTAAFRLLAESYSFQPGKQLLPVYDYESEAVGAMADSARRRGAEVASATFAWPSMRIHGADLRKRLARGRRRGGGGRGLFVFPLASRMTGARYPYLWMSAAHQQGWHVALDACALGTKDLDTLGLSLIRPDFIVCNFFKVFGENPSGFAGLFVKRSSGLAALERSVIARSIGIVSIVPARRWSLHDGYSTELEHSRSFPMLAADPALDDADVETTSSFSGPLSSIAITRSRTLQSDAAENGDAHAPEIREVGSTAENGFYSEEPRAEETERLAKEEQDGEGRESVMEVECRGLDHADALGLIAIGNRLRCISNWLVVALQKLRHPHADNGHPLVRLYGPRVKFDRGPSLAFNVFDWKGERVSPLLVQKLADRHNISLTCGFLCNIWFSDKHEAERAVVLEHRVAGDPVAAGSAGGKRRKDAGGGDVGILVVNASLGFLSNFEDAYRLWAFVAKFLDADFVEKERWRYTALNQKTVEV

SEQ ID NO: 766 - protein, 366 aa, Zea mays
  VARIANT 95: note = Ancestral polymorphism is T, Derived polymorphism is M
  VARIANT 322: note = Ancestral polymorphism is D, Derived polymorphism is E
  VARIANT 325: note = Ancestral polymorphism is R, Derived polymorphism is H
MGKGAQGSDAAAAGGEVEENMAAWLVAKNTLKIMPFKLPPVGPYDVRVRMKAVGICGSDVHYLREMRIAHFVVKEPMVIGHECAGVVEEVGAGVMHLSVGDRVALEPGVSCWRCRHCKGGRYNLCEDMKFFATPPVHGSLANQVVHPADLCFKLPDGVSLEEGAMCEPLSVGVHACRRAGVGPETGVLVVGAGPIGLVSLLAARAFGAPRVVVVDVDDHRLAVARSLGADAAVRVSPRVEDLADEVERIRAAMGSDIDVSLDCAGFSKTMSTALESTRPGGKVCLVGMGHNEMTLPLTAAAAREVDVVGVFRYKDTWPLCIDFLRSGKVDVKPLITHRFGFSQRDVEEAFEVSARGRDAIKVMFNL

SEQ ID NO: 767 - protein, 348 aa, Zea mays
  VARIANT 48: note = Ancestral polymorphism is G, Derived polymorphism is C
  VARIANT 49: note = Ancestral polymorphism is A, Derived polymorphism is V
  VARIANT 89: note = Ancestral polymorphism is A, Derived polymorphism is T
  VARIANT 114: note = Ancestral polymorphism is S, Derived polymorphism is F
  VARIANT 125: note = Ancestral polymorphism is S, Derived polymorphism is F
  VARIANT 249: note = Ancestral polymorphism is T, Derived polymorphism is R
MAAGPTPSAAAASLRPPPPCFDYRAAVLADTRAAAAGNPALAGLIESGALVRVPRRRFGPVPAWRPPDFVEPEDVWILGTSHLSRDSVADVERVLRAVQPDNSPHFRAGIMYASSDSSDEPLLKSNMFSLGGSKFFGAVSRSINLGGQSALALRLLLAVFSSKIASSANRPFGEEFRAARRVSEDIGAQLVLGDRPIEITLERAWKSLTWDQKAKLLISLFRGITSKTHTPQDEKAAVSPYELYEKLSTSYPALLQPLIHERDMFLAWSLKRSKAVNKSRTVVGVVGKGHINGIVYALISDQGDLRFRDLVGRASSDTWVSSLVKGLVRDTVIGLVLWALYEQLQAVL

SEQ ID NO: 768 - protein, 134 aa, Zea mays
  VARIANT 99: note = Ancestral polymorphism is A, Derived polymorphism is V
  VARIANT 97: note = Ancestral polymorphism is A, Derived polymorphism is T
  VARIANT 83: note = Ancestral polymorphism is R, Derived polymorphism is H
  VARIANT 75..134: note = Derived polymorphism lacks residues 75 to 134
  VARIANT 73: note = Ancestral polymorphism is E, Derived polymorphism is K
  VARIANT 34: note = Ancestral polymorphism is A, Derived polymorphism is T
  VARIANT 31: note = Ancestral polymorphism is C, Derived polymorphism is F
  VARIANT 27: note = Ancestral polymorphism is E, Derived polymorphism is D
  VARIANT 26: note = Ancestral polymorphism is A, Derived polymorphism is V
  VARIANT 12: note = Ancestral polymorphism is G, Derived polymorphism is D
  VARIANT 11: note = Ancestral polymorphism is C, Derived polymorphism is R
  VARIANT 6: note = Ancestral polymorphism is G, Derived polymorphism is A
MGPFGGIMIECGTNQPIEKVLAAEDAECCICLSAYDDSAELRELPCARMLQHSNNANELLLRRKLEEQQQAAELQHAIELQSRRLMGLQLLDLKARAAATAAAASALPTPVANAFASSHPLSTMAVESPLESGE

SEQ ID NO: 769 - protein, 211 aa, Zea mays
  VARIANT 107: note = Ancestral polymorphism is T, Derived polymorphism is P
  VARIANT 97: note = Ancestral polymorphism is S, Derived polymorphism is C
  VARIANT 92: note = Ancestral polymorphism is K, Derived polymorphism is M
  VARIANT 7: note = Ancestral polymorphism is L, Derived polymorphism is I
MLVYERLYHGSLDKLLFGRSDGRFMDWSKRLKVALGHVQRVLNLNIQIDKGFTAKLSGYGCVGFNTEEISNAPVSAANLSVETLEKGLLTPKSNVWSFGVVLLELITRRKNLDPNYSKEEHNIFSWSRPFLTDDSHLCLIMDSRIKGRFPIKAARIVADIILKCLRLCLQFVYCCNKSGLDRSKVNVNGGAIALGHPLGATGARLHGYSSE

SEQ ID NO: 770 - protein, 438 aa, Zea mays
  VARIANT 104..438: note = Derived polymorphism lacks residues 104 to 438
  VARIANT 276..438: note = Derived polymorphism lacks residues 276 to 438
  VARIANT 318..438: note = Derived polymorphism lacks residues 318 to 438
MPPPTVPAIPPQSPLVLKYGEEGKVVERVNLATRQLRLLPKPVVRICGLLALDVSRDQLKAIVERAGAGSRPTTQQMGEVASRRVAHRRRRPASSPMRRLRGNYDPVEMARMAASAAAAVRHSAKKRPKMSQIVRALEGDISLEDLNDNEGVRPGQSMAFGTAAAAATSYKAKAPGPYTHGVERIRQAPTVYSGAIRHIPMSPTDVYITTNMCSYNKKIGVALRSDIKGSCNSGMDDQFLGEAVSSNNDIEGDMHSRYIPQQDPFSEGLYTFDIGQNDLAGEFYSRTEDQVIVSIPTILLEFENGLKKLYDQGARKFWIHNTGPLGCLPQNIALFGKDPSQLDELHWFEHATHACCGYGGPPLNYDGNVPCGHTVSLDGKMVTAKGAATLLNSSTGMGYITRKLRISISRRRSSQILTGKYSDPPFVDKMLFVIKPRF

SEQ ID NO: 771 - protein, 818 aa, Zea mays
  VARIANT 379..818: note = Derived polymorphism lacks residues 379 to 818
  VARIANT 254..818: note = Derived polymorphism lacks residues 254 to 818
  VARIANT 251..818: note = Derived polymorphism lacks residues 251 to 818
  VARIANT 201..818: note = Derived polymorphism lacks residues 201 to 818
  VARIANT 130..818: note = Derived polymorphism lacks residues 130 to 818
  VARIANT 98..818: note = Derived polymorphism lacks residues 98 to 818
MSRTTPKTTLTRISSPAAATTPRPNLCSCHREYVSFLPTEFLVRTVAWATVLGHIVFDIVGFPSLGAVGCGRRSRRLRSCTPPPRPQGTTATSVRHLRRLHRSSTMLSRTWRGRRGGERSAHSCYRGESQSFLMWRASRGSHLGSKVAMFQYSSVEIYNACKPQPTLEFHNTDMHEWYGQDIRNVLATGVTLFLEVTSALQKLKDQFPVKDLSQLEEMLIKEKAEFMDSLAKAVDRNRESSSVDDILNVNWLYQDLLLELYVWDRRLHQLVDCTPAENTIVANGQTAAAAEADERMSSIASLENRCIKELEQFSEAGTASALLDDAWKDKHYNDQHNTNYGKWKLDVWKGLRSLTTTVQVIYPPCTNTENLEEMGGSPQFTVVPGGSILCVSDDEISSIISRALAVSEERRHLLMDAITETEPADTTRSKTMDKSYNSLSKSSSASLWSSDSEASISFDDLSNYDTSLLLSSSLHPEIDVNGTTTLKGRYSVICVHSNQFYNLRRKCCPSELAYVASLSRCKRWDAQGGKSKAFFARTIDGRLIIKQIKKTEFESFIKFAPDYFRHVNHSLDTGSQTCLAKILGIYQHYDELAGSVMELLEHLEGEARSDTRKLHPLVDEFIPTIDGENDICYTHPERLPGVSKDGLVWHFFHRPSRAYTTGTRKRRKVHSGDDGGVTRWHKTGKTRSVLSNGRPRGYKKILVLYTNYSKQRKPENNWVMHQYHLGSDEEERDGELVVSKSGGGGSSVLREANGGADQLYSPGAMMGYDQGGLETGHLLPLLCLPTSCLTLLSMQQGLALPLEPRIQDKIQTYQNCQI

SEQ ID NO: 772 - protein, 120 aa, Zea mays
  VARIANT 97: note = Ancestral polymorphism is S, Derived polymorphism is Y
  VARIANT 90: note = Ancestral polymorphism is T, Derived polymorphism is P
  VARIANT 59: note = Ancestral polymorphism is T, Derived polymorphism is I
  VARIANT 48: note = Ancestral polymorphism is D, Derived polymorphism is N
  VARIANT 44: note = Ancestral polymorphism is D, Derived polymorphism is N
  VARIANT 42: note = Ancestral polymorphism is A, Derived polymorphism is S
  VARIANT 13..120: note = Derived polymorphism lacks residues 13 to 120
MGLKDEFQKARDWVAESLDFDKDYDASVFETTIRVVGGLLSSYDLSGDKVFLDKAKDIIDRLLPAWDTTSGIPYNRINLAHGRALNPGWTNVSYCYSVFPMSNHLYFKCLLKHTVVHKVC

SEQ ID NO: 773 - protein, 348 aa, Zea mays
  VARIANT 164..348: note = Derived polymorphism lacks residues 164 to 348
MAKYGEGDKRWIVEERADGTNVHNWHWAERDCLEWSRARLSSLLAGLTILDGEGGLSLRTVALDKLDGEAYVNIRKGKVIPGYELSLTLSWEAEAASESGAAKVTGTAEVPYLADENADEDPDLRVTVRGDETPLALRAKDAFLSRGKPMVLEKIREFVAAMAKGGPAKDELDSKKTPTKVAGSAPAKEAVLAPAPAVEKKKAKGKDKEGFKTIEMTEKFYCRSKDIYEILMDENRWKGFTQSNARISREVGGEFSLFDGSITGVNEELQEGKLIAQKWRFGSWPDGLYSSVRLVFDEPESGVTIIKLKQTDVPEEDKYGNSTVVENTERGWRELIFQRIRGVFGFGI

SEQ ID NO: 774 - protein, 523 aa, Zea mays
  VARIANT 312: note = Ancestral polymorphism is G, Derived polymorphism is W
MVVSVAATGPGTDAEPVSSTFFASRYVRDPLPRYRMPERSIPREAAQQIISDELMLDGNPRLNLASFVTTWMEPECDKLIMDSINKNYVDMDEYPVTTELQNRCVNMIAHLFNAPIKEDETAIGVGTVGSSEAIMLAGLAFKRKWQNKRKEQGKPCDRPNIVTGANVQVCWEKFARYFEVELKEVKLSEGYYVMDPVKAVEMVDENTICVAAILGSTLTGEFEDVKQLNDLLTEKNKETGWDVPIHVDAASGGFIAPFLYPELEWDFRLPLVKSINVSGHKYGLVYPGVGWVIWRSKDDLPEELIFHINYLGTDQPTFTLNFSKGSCQIIAQYYQLIRLGFEVLLFFDRFFLLLIEHSEYICAGEQKGVLSDTFLEGESFLFLFSLCAAVTASQSGRVFFFWCRFYLVCRGTETSWRTARRTRRYCGRASRRRAGSTSCPRTPGCRWWPSRSGTAAGSACSTSPRTCGGSAGSCRRTRCRPTRSTWRCSESSSGRTSAAASPNGWSRTSARSCASWTRARPTP

SEQ ID NO: 775 - protein, 215 aa, Zea mays
  VARIANT 172: note = Ancestral polymorphism is S, Derived polymorphism is A
MAAPSAATRRKLQRKFRLRGFTLKVDALEEAAAFLDRFPDAEDDALDLLLDELDKEPLQSSILDRDAVRRVVALLVEAEEALDVASPAATSARSALRVVDAFLVPRFHYDPIKKVFYEHTGRLAVHGEAGDKASLYRDRYQVLLQRLSRDKYFSKPAFDTVATEHCSCEITSVQSLIGCTGRRWIMGVISQLEERQFYLEDLTGAVPIDLSNAIS

SEQ ID NO: 776 - protein, 379 aa, Zea mays
  VARIANT 3: note = Ancestral polymorphism is C, Derived polymorphism is W
  VARIANT 18..379: note = Ancestral polymorphism lacks residues 18 to 379
  VARIANT 159: note = Ancestral polymorphism is P, Derived polymorphism is S
MLCQGISSYFMCGFRDYRESITTFLNIEHKITSGFFVENTVIVAEGELLSNGIFQVNTCGFPPLEDREASVSLLMGFDFFGGGVIPTEETLRLSSLEKKAVNDMFVILSDVWLDNPEDVPLCYLVEKTMEKLAVVLDGYDSVEVVPSLFVLMGNFCSRPCNLAFNSFEELRFQFGKLGEMIAARSRLKEHSRFLFIPGPDDAGPSKALPRCALPKYLIEELQKHIPNSIFVSNPCSYALCYFEISLHNHMMYNGIGVKFYTQEIVFFRQDLLYRMRRSCLIPPTTEETSDPFEHLVATITHQSHLCPLPLTVQPIIWNYDHCLRLYPTPHTIVLGDKSEQKAFKYTGITCFNPGSFANDSTFAAYRPCTKEVELSALEG

SEQ ID NO: 777 - protein, 299 aa, Zea mays
  VARIANT 63: note = Ancestral polymorphism is P, Derived polymorphism is L
  VARIANT 15: note = Ancestral polymorphism is H, Derived polymorphism is D
METAGQTTLQESAVHARRQAACWWPLDTTACSSLDLDDASTFSSSSLLLGWEWDPQLCCFGSPHARDSELFGPTSSMADCARVIGMESPVSEASAAAATGELDDELLLMSLWGECHLFSSCSALKEKTATSSQHDDHHSDLPTSPAKTTPATAQAAEPSHCDVDLRASYTGGAQQQQQQQHRTTRAANSSSKRSATEPEEKGAEGGKRSRKAPGSTAVAAYPFAVVKPGGADGGVTLADINRWILTPPARPVRHPVGEFACAPRVSAANRPGPSGRTVAGFTRLRTAGRGTITIVRTRG

SEQ ID NO: 778 - protein, 122 aa, Zea mays
  VARIANT 37..122: note = Ancestral polymorphism lacks residues 37 to 122
MSVDRHGKESKTVVVPSLGLAFYFIQTFGRVVPSLERALTSVVSLVLEMLSRREKATNFKPDYDIDIHMKVLAMSGQESSILTAYKLKVHFATCNTTRMTFLKTKQEYEISCLLLSLYYLQC

SEQ ID NO: 779 - protein, 518 aa, Zea mays
  VARIANT 82..518: note = Derived polymorphism lacks residues 82 to 518
  VARIANT 476..518: note = Derived polymorphism lacks residues 476 to 518
MLSSCAPTTAFPPPEAGAAAPPEPFRSLQIATTTSAAGAKKKRRPAGTPDPDAEVVSLSPRTLLESDRYVCEICGQGFQRDQNLQMHRRRHKVPWKLLKREAGEAARKRVFVCPEPSCLHHDPSHALGDLVGIKKHFRRKHSGHRQWACARCSKAYAVHSDYKAHLKTCGTRGHTCDCGRVFSRVESFIEHQDTCNAGRTRAETSSSPASGGGYGGGTGAGFCVAAAASTSQQRHLHAAAAAAAALSRTASSASPSSGGEFGVSQQVACWPGPAMASPTAAATFHRFDQALSPPTPHERPGGIHNLELQLMPPRGSAASYYEGAAGAAPAAAVRCCASPHYSPAVHVPQPGADPMRLQLSIGFGGGDGETSAPAAAARLKEEAREQLRLAMAEKAAADDARAQARRQAELAEQELAAARRMRQQAQAELGRAHALRDHAVRQVDATLLQVTCYSCRCKFRARVTGGGAMSSEVASYVSSVVTAEGGDAEVDDDDPYRHHRQLTADDDAPSHARMMDIN

SEQ ID NO: 780 - protein, 492 aa, Zea mays
  VARIANT 113: note = Ancestral polymorphism is D, Derived polymorphism is E
  VARIANT 286: note = Ancestral polymorphism is Q, Derived polymorphism is L
MPSFVSPPTPRYCLTRSWRIVSLPAIPCRSAVNFLGLTTLFLRDFISARSSSGQERLWRGVELATVVDLIFPGRLEHSGAGEGGDARWWRCAGGQKMTTARQWWRRAAAAVKDRRSLYLTRVVALRPRPVSGVATPALRSPKLEAAVIRATSHDERSVDHGSAARVFALARASPPSLQPLMWALARRARRTRCWAVALKALVLAHGLLLRSDVAPRAARLGRVPFDLADFRDRSSPPSKSSGFSAFVRAYFRFLDTRSLFTAQELDAANSGEADGEDARLDSVTKLQHLLDLLMQIRPYGDGVQQGLILEAMDCVVIEIFEVNSQICTGIARFLVAVLGSAPTTPRARPGETLAAARRRRGVQGMRVLRKAAEQSAQLSSYLELCRDLGVLNAAEFPAVERVSDDDIRDLEKIIMNHVVEERGKDVEKETKALVAVEETRLASKTVVTKEWVVFDDDDNDAAGARPRSLGSYMNPFMAAPWDTVACSRDLLV

SEQ ID NO: 781 - protein, 498 aa, Zea mays
  VARIANT 79: note = Ancestral polymorphism is E, Derived polymorphism is G
MRRQSLATVLLLLVAAAALAAPAAGHFESSCPFYDHGGHGEPHERHDHGHSCGGGADHEHHHHHHHGHGHGEIQRLLPEEMAEEADLELESFGYEDHDHGHHHHHHHHHSHGDMETSPMGVWLSAMGCSLLVSMASLVCLVLLPVIFFKGKPSKAIVDSLAVFGVSRSYAWRFISSSAATCFWSTLSLALFFNCCSGGGHSHSHDHEGHDHAHAHEHAHAHSLQDLSVGLSVLFGIVLFFIVEKIVRYVEDNSQNGAHSMGHGHHHHNHKRHDSSDKAKLNYQKSDTDGKDIDHAEEEPSVNDTTGKISDGHESEATIRKRSSSKATDGEATNSGRDPAPEKAPSISNSNLVFGYLNLFSDGVHNFTDGMALGSAFLLHGSVGGWSRTLFLLAHELPQEVGDFGILVRSGFTVSKALFFNFLSALVALAGTALALSLGKDPGHSSLIEGFTAGGFIYIAVAGVLPQMNDQKTTIKSSVAQLISLAMGMLVALGISLVE

SEQ ID NO: 782 - protein, 129 aa, Zea mays
  VARIANT 29: note = Ancestral polymorphism is L, Derived polymorphism is P
MVVVVVVAVVMVFVTEGLELEIRLLRHLLREQPLDLAVSMAVVMVMVVLMVRAAAAAVAMVVAFVWFAVAAVVVEGAGGLKVPSGGGGQGRGGHQEQQYGGEALAAHYGSRVGASAGFWGGSACRRALW

SEQ ID NO: 783 - protein, 421 aa, Zea mays
  VARIANT 40: note = Ancestral polymorphism is P, Derived polymorphism is T
  VARIANT 64: note = Ancestral polymorphism is D, Derived polymorphism is Y
  VARIANT 235..421: note = Derived polymorphism lacks residues 235 to 421
  VARIANT 262..421: note = Derived polymorphism lacks residues 262 to 421
MDTLPEGVVQHILSQLSNARDVAGCAAVARCWRDCVAFLPSLYFPRGAFEALAGGPASAVAFADDAIGRMVDAAARLEELVVYCPFSASLLPHWLAARAATLRVLELRMDSAAADKSGHLNLDSIGVAAGLEELRLWGLTMTRAPAWGRMERLRVLEIVSAILVDAAVNDVLAACPNLTDLSLLGCQCDGEAVISLASLERCRLDFLGSGNSSLRFAAPRVESLEVQGFSFIYLQGGNRLKHLTISKNTGSVHHVEMGKLPELDQLSLRGVQWSWGAISSVLQCASEVKHLVMKVEFSGDYDTLQPFPEIDLVEFFNSHPKLRKFEVHGAMFAALSQENSLKNLDSRFVIPFLEQVVVTVRSSLNAKQKLNTLKSVVRYSVRLRRMIIRISQMKNCHAAGDDFFEEICKFTYMNSGTVCIE

SEQ ID NO: 784 - protein, 271 aa, Zea mays
  VARIANT 88: note = Ancestral polymorphism is A, Derived polymorphism is D
  VARIANT 37: note = Ancestral polymorphism is S, Derived polymorphism is I
MHAIATTQGLKGFWKGNFVNILRTAPFKAVNFYAYDSYRKQLLKWSGNEESANFERFIAGAFAGVTATIMCIPMDTIRTKMVAPGGEALGGVIGVARHMIQTEGFFSLYKGLVPSLISMAPSGAVFYGVYDILKMAYLHSPEGKKRVSMMKQQKQETNALDQLELGTVRTLLYGAIAGCCAEAATYPFEVVRRQLQMQVKATRMNALATCLKIVDQGGVPALYAGLIPSLLQVCILSAENLLPHICRGQVLPSASISYFVYELMKIVLKVE

SEQ ID NO: 785 - protein, 162 aa, Zea mays
  VARIANT 109: note = Ancestral polymorphism is P, Derived polymorphism is L
  VARIANT 18: note = Ancestral polymorphism is S, Derived polymorphism is G
MGKSWSLISHLHTVAGPSITLLYPLYASVCAMESPSKADDEQWLSYWIIHSFVTLLEMLAEPLLHWVPVWYPAKVLFAAWLALPQFKGASFVYEKLVREQLRNYRARYPRKGAAAAAVGGDDDDHKLLTHLFLPVGLGNKTNARLRLSTTMCSESVWRRRRS

SEQ ID NO: 786 - protein, 113 aa, Zea mays
  VARIANT 4: note = Ancestral polymorphism is D, Derived polymorphism is E
  VARIANT 14: note = Ancestral polymorphism is R, Derived polymorphism is W
  VARIANT 16: note = Ancestral polymorphism is R, Derived polymorphism is C
  VARIANT 47: note = Ancestral polymorphism is R, Derived polymorphism is W
MERDRRAARSDFVRFRLVCKLWMDGSGIRKPRELGARVIDHSFHPRRWILLTEEKEEADEATPTPTRRTLLNLTTRKTIQVDLPELAGHSVVPGPTAAPEGMLVVRDLRNRWG

SEQ ID NO: 787 - protein, 291 aa, Zea mays
  VARIANT 237: note = Ancestral polymorphism is S, Derived polymorphism is C
  VARIANT 141: note = Ancestral polymorphism is G, Derived polymorphism is D
  VARIANT 116: note = Ancestral polymorphism is S, Derived polymorphism is R
MGPARHLRGLTALLISAALLLSAAIPAARGQEETEDEEEFNYIPGDANGPENWGSIKPEWANCSAGRMQSPIDLARERVSLVPALGFLNHSYRPAQASIVNRGHDIMVRFNGDAGSLVINGTAYDLRQMHWHSPSEHTVDGRRYAMELHMVHESAAGKAAVIGILYEIGLVPDPFLLRLEPFIRRIADRKDREEPIGVVDPRLARGTASAYYRYMGSLTTPPCSEGVVWTIIKKVRSVSKRQLELLREAVHDGNENNARPVQDLNDRDISLFRPKLHKQELLSFKDKLVGA

SEQ ID NO: 788 - protein, 298 aa, Zea mays
  VARIANT 220: note = Ancestral polymorphism is R, Derived polymorphism is W
MPETVPCRSASSTNDQRHDDMSPARLAAVAAAVLLAAALLRVVPGARGQEETEHEEEFSYVPGDEHGPEHWGSIKAEWAACGAGRMQSPIDLSHERVSLVRSLGYLSHSYRPAEASIVNRGHDIMVRFEGDAGSLVINGTAYYLRQLHWHSPTEHTVDGRRYDMELHLVHESAENKAAVIAVLYEIGGHDDALLRQLEPAIRRVADVRDREMRVGVVDPRRARGRASVYYRYVGSLTAPPCTEGVIWTIVKRVRSVSKHQLELLREAVHDDMENNARPLQEANHRDVSMFRPKPNKQY

SEQ ID NO: 789 - protein, 253 aa, Zea mays
  VARIANT 233..253: note = Derived polymorphism lacks residues 233 to 253
  VARIANT 193: note = Ancestral polymorphism is T, Derived polymorphism is M
  VARIANT 188: note = Ancestral polymorphism is S, Derived polymorphism is C
  VARIANT 109: note = Ancestral polymorphism is A, Derived polymorphism is T
  VARIANT 107..253: note = Derived polymorphism lacks residues 107 to 253
  VARIANT 65: note = Ancestral polymorphism is R, Derived polymorphism is W
  VARIANT 55: note = Ancestral polymorphism is G, Derived polymorphism is S
  VARIANT 32: note = Ancestral polymorphism is V, Derived polymorphism is I
  VARIANT 22: note = Ancestral polymorphism is V, Derived polymorphism is I
  VARIANT 20..253: note = Derived polymorphism lacks residues 20 to 253
MEERREMDPVTDAHRVAWLQHVLLVLLQIHPVRLHLDGDVAVHRPTTEDICYYLGCHLTSIKATWNLVTEIFNFSQDDLLTEDMMILDTHGEVFIWIGQYVESKEKQKAFDIGQACHRWDASAGREDVETLAQCQWMIACGEWPPLAVAYDHVEGSTMEAGGMQVLVDQKLEHKMLDNFFSVLSCVISVPFYTGFLPLLFWSGHDRLARQMTLLMAFCDYLGNSVKDMVSAPRPCSPPIRRVTATEDEKENVM

SEQ ID NO: 790 - protein, 251 aa, Zea mays
  VARIANT 5: note = Ancestral polymorphism is M, Derived polymorphism is T
  VARIANT 40: note = Ancestral polymorphism is M, Derived polymorphism is T
  VARIANT 183: note = Ancestral polymorphism is E, Derived polymorphism is D
MDLDMLNSHPEAQLELMNAMLQLEQLAGFPLHDHGGAIMMAVPSTPPSPPPPPGMQQQAATHHHHLSSVPRHMSAGATANNNGRAGVYDDHQYPRQVRVTAASSSSCSCNDGGSSGEISATAAAAVGSSSSSSAMREMVFRVAALQPVNIEPEMVRPPKRRNARISTDPQSVAARVRRERISERIRVLQRLVPGGTKMDTASMLDEAIHYVKFLKTQVQSLERAAAADARRPVPDNGGAAPYSSARINGQW

SEQ ID NO: 791 - protein, 503 aa, Zea mays
  VARIANT 430..503: note = Derived polymorphism lacks residues 430 to 503
MESRNGEADELPPRDAGDEAKKHYQEGCPGCRLDETNESNTGIPYLNFFYIWIVCLTSSLPIQSLFPYIYFMMRDFKIAKQEQDIGFYAGFVGATYFLARTVSSVPWGIFADKYGRKPCIVISIISVIVFSTLFGLSTSYWMAIVTRGLLGLLCGILGPIKAYATEVCRKEHQALAMSVVTSSRAIALVVGPAIGGFLAQPAEKYPNIFSNGSIFGRFPYFLPGLVISILAAGSCIACIWLPETLHFHDNEKVEAIDEMEAQVGDSNLEVGKAKESGCTSTKNLLKNWQLMSAVILYCIFCLHDTAYLETFSLWAVSSRKFRGLSLTSQDVGIVLAVSGIGVLVYQLAVYPFIVKYFGPVRPLRPSVVLSILVLAMYPFMAKLQGLELKLLINIASLLENVFSTYAYANKIGYSYYCVQYFAKHRSDNFYETCADTRTQRYCEWHLSDTDVIVQRFSWTQKHMTGLLLPGDQILFLVINSVSIIGLIFTFKPFFSMSDALRRS

SEQ ID NO: 792 - protein, 357 aa, Zea mays
  VARIANT 160..357: note = Derived polymorphism lacks residues 160 to 357
  VARIANT 244..357: note = Derived polymorphism lacks residues 244 to 357
MDLKDSERRGAAGPGPLSRQGSIYSLTFDEFQNTLGGTGGGLGKDFGSMNMDELLRSIWTAEESQAMASASEPAAGAAGDGGAALQRQGSLTLPRTLSVKTVDEVWRDFAREGTAGGPEPQPNRQPTLGEMTLEDFLVRAGVVRDNPAAAAAAAAAVPAQPVATRPLQAVNNGASIFFGNFGGANDAGAGAMGFAPVGIGDQAMGNGLMPGVAGMAAGAVTVSPVDMSVAQLDSMGKGNGDLSSPMAPVPYPFEGVIRGRRSGAGVEKVVERRQRRMIKNRESAARSRARLYNGVGSRSSETEGTKRRIAEEAGRNNGDAEKPGRGSDQQSIRTKETVPAENIDRSLVTELLTTDRA

SEQ ID NO: 793 - protein, 399 aa, Zea mays
  VARIANT 132: note = Ancestral polymorphism is P, Derived polymorphism is A
  VARIANT 124..399: note = Derived polymorphism lacks residues 124 to 399
  VARIANT 117: note = Ancestral polymorphism is P, Derived polymorphism is L
  VARIANT 104: note = Ancestral polymorphism is W, Derived polymorphism is R
MVDVDRRMAGLTPAAHAAGLRRLSTRAAAGPSSASASPRHGLHSFAPLAAAVLGHLRASGVAVLPGLTELELARAEAEMGFAFPPDLRAVLAAGLPSGPGFPDWRSRAGLRSAFDLPIAAASLQIARGALWPRCWGARPADPDRALRLARSAIRRAPLLVPLFDRCFLPCRPCLAGNPVFFVTDDRVLCCGLDVLHFFARDSCFQPLDPRSRDGEAGATPCTRRSLDAACGSGKAPRWIEFWSDAASDRRRRDSSSSETSTASSLSSGCASPPPAARRARNPHWVDSYLDRLGHVLRQGGWRDTEVTEMVEVAASGSGVLDGEEAAAPAVDSDAALDALLLNADRCSDALRRAGWSSEDVSDALGLDLRRCKQRPRPAVRVPPEIAVKVERLAQAVARP

SEQ ID NO: 794 - protein, 498 aa, Zea mays
  VARIANT 18: note = Ancestral polymorphism is R, Derived polymorphism is S
MMVSSHSQSQAGRRRRWRCLLPLLVGAAFLAEIAFLGRLDMAKNAEVVESWTTSFYRRSSHWGESVGRGAVPRADGDGDGEDEEIRRCEQRLEREDAVPYDRDFDRDPVLVGGAAKDWSKCYVGCQFGFSASKTPDATFGIAPDPSVEGILRSMESSQYYSENNIDVARGRGYKIVMTTSLSSDVPVGYFSWAEYDIMAPVPPKTEEALAVAFISNCGARNFRLQALEMLENLDVKIDSYGSCHRNRDGKVDKVDTLKRYRFSLAFENSNEEDYVTEKFFQSLVAGSIPVVVGAPNIQELSPGEGAILHIKELDDVVSVAKTMKNIASNPDAFNQSLRWKYDGPSDSFKALIDMAAVHSSCRLCIHIATKIHLKEERTPKFTNRPCSCSSKKGTVYHLFIRERGRFKSESIYMRSGQLTLGALESAVLGKFRSLNHVPVWKDERPPSIRGGDDLKLYRIYPVGLTQRQALYGFRFRDDSKLEQYIKDHPCAKLEVIFV

SEQ ID NO: 795 - protein, 441 aa, Zea mays
  VARIANT 66..441: note = Derived polymorphism lacks residues 66 to 441
  VARIANT 68: note = Ancestral polymorphism is P, Derived polymorphism is S
MMKHSSSLCLLFLLALCTTLLACGLVQAQVLFQGFNWESCKQQGGWYNRLKAQVDDIAKAGVTHVWLPPPSHSVSPQGYMPGRLYDLDASKYGTAAELKSLIAAFHGRGVQCVADIVINHRCAEKKDARGVYCIFEGGTPDDRLDWGPGMICSDDTQYSDGTGHRDTGEGFAAAPDIDHLNPRVQRELSAWLNWLRSDAVGFDGWRLDFAKGYSPAVARMYVESTGPPSFVVAEIWNSLSYSGDGKPAPNQDQCRQELLDWTRAVGGPAMAFDFPTKGLLQAGVQGELWRLRDSSGNAAGLIGWAPEKAVTFVDNHDTGSTQKLWPFPSDKVMQGYAYILTHPGVPCIFYDHMFDWNLKQEISTLSAIRARNGIRAGSKLRILVADADAYVAVVDEKVMVKIGTRYGVSSVVPSDFHPAAHGKDYCVWEKASLRVPAGRHL

SEQ ID NO: 796 - protein, 269 aa, Zea mays
  VARIANT 41: note = Ancestral polymorphism is A, Derived polymorphism is V
MTNLSAMAAYQSYVIRFDGHFDEPSPSSAGAEPPGPQPPFAGRMISLEREHQVIVAALLHVVSGYATPPPQVFTPPPAAARCQVCGMERCLGCEFFAAGEGALGGGAEKAAATGGAAAGQRRRRKKKNKYRGVRQRPWGKWAAEIRDPRRAVRKWLGTFDTAEEAARAYDQAAIEFRGPRAKLNFPFPEQPTGHDEPISSNGEASAAARSSDTTPSPSLCSADAEERGQPEWPSAGQEAGEQLLWEGLQDLMRLDEGEPWLHPASSAWN

SEQ ID NO: 797 - protein, 132 aa, Zea mays
  VARIANT 33: note = Ancestral polymorphism is P, Derived polymorphism is Q
  VARIANT 50: note = Ancestral polymorphism is R, Derived polymorphism is C
MEPPRMSFSSDFALEPPPPRPPGRADADFEFSPAGSRPMMDADQLFSKGRILPLREAEAVAVAARPPTTTTTLRAELRARPDAADRGGRRAPPRWKELLGLRRAHRKGDAAGAGADAHVDLGEHGDQAEAGE

SEQ ID NO: 798 - protein, 231 aa, Zea mays
  VARIANT 30..231: note = Derived polymorphism lacks residues 30 to 231
MSHRLGRVVSDLSHSNSHSVTMTDHSLHRQSSTSNNEGGNAGNKSKKKLSLLISSVVSCTRSESSCETETGSRERNSSRKQQTDGGAGERGRGLETIVLAAVRKYVAMVEQLFTSSYSAAGSSRRDVDGLQGRRRPHTFTSTRHAGGNGNAAAAHSSKRHGGRLRLPSAPASMRGSPAASGHLSVGESVTTSSEVSTMEELQSAIQAAIAHCNNSGAAAGGDRQQQQQRKC

SEQ ID NO: 799 - protein, 283 aa, Zea mays
  VARIANT 102: note = Ancestral polymorphism is A, Derived polymorphism is V
MASAVCGVTARAHLPSAVPAAARKLFFRCRAASTMNEASASSPDAEEKKTTTVFVAGSTGRTGKLVVEKLLAKGFGVVAGTTDVSRARGSLPQDPNLQLVRADVTEGVDKLVEAVRGVDAVVCATGFRRSFDPFAPWKVDNFGTVNLVEACRKAGVARFVLVSSILVNGAAMGQLLNPAYIVLNLLGLTLVAKLQAENHIRKSGIDYTIVRPGGLTDQPPTGNIVMEPEDTLYSGSISRSQVAEVAVEALVCPESSYKVVEIIARTDAPNRSLKDMYAAIKQN

SEQ ID NO: 800 - protein, 380 aa, Zea mays
  VARIANT 14: note = Ancestral polymorphism is P, Derived polymorphism is L
  VARIANT 265: note = Ancestral polymorphism is R, Derived polymorphism is S
MPEQTHRSSPNPIPVAIRISGAAMAEKESNGVRVCVTGGAGFIGSWLVRKLLEKGYTVHATLRNTGDEAKAGLLRRLVPGAAERLRLFQADLFDAATFAPAIAGCQFVFLVATPFGLDSAGSQQYKSTAEAVVDAVRAILRQCEESRTVKRVIHTASVAAASPLLEEEVSASGVGYRDFIDESCWTSLNVDYPLRSAHFDKYILSKLRSEQELLSYNGGESPAFEVVTLPLGLVAGDTVLGRAPETVESAVAPVSRSEPCFGLLRILQQLLGSLPLVHVDDVCDALVFCMERRPSVAGRFLCAAAYPTIHDVVAHYASKFPHLDILKETEAVATVRPARDRLGELGFKYKYGMEEILDSSVACAARLGSLDASKLGLQKG

SEQ ID NO: 801 - protein, 328 aa, Zea mays
  VARIANT 136: note = Ancestral polymorphism is L, Derived polymorphism is P
  VARIANT 170: note = Ancestral polymorphism is H, Derived polymorphism is L
MDPDAEVTFEFVPVIRQYKSGRVERLLPVNPVPPSVDAATGVASKDVTVDKATGLWARLYLPDPDLSARPDGDMRLPIVLYFHGGGLVVGSAADAPEHAFVNRLAARAGALAVSVEYRLAPEHPVPACYDDAWAALRWVVAPAADPWVRDHGDVARVFVLGFSAGGNLAHNLTLRAGSEPDLLPRGARVQGMALLHPFFLSPPAPGSEAAEGEVAKYAWVRAKLAEMWAFACGGWTAGPDDPRVNPLVDGAASLRRLGCARVLVCLADDALAAEGKAYYDGLLASGWAAADAKLLDSAPADHEFHLREPESAKAVLLMDRLAALISGN

SEQ ID NO: 802 - protein, 102 aa, Zea mays
  VARIANT 44: note = Ancestral polymorphism is I, Derived polymorphism is S
  VARIANT 48: note = Ancestral polymorphism is G, Derived polymorphism is E
  VARIANT 49: note = Ancestral polymorphism is Y, Derived polymorphism is N
  VARIANT 50: note = Ancestral polymorphism is G, Derived polymorphism is A
  VARIANT 56: note = Ancestral polymorphism is Q, Derived polymorphism is R
MAASSKVVCACILIVLVISSHADARRLVAATCNGTEGGACKGGIFVQGYAGLSARQKMAATATSTEQVVGGGGEGMPATTTDSRPTAPGNSPGIGNKGKINN

SEQ ID NO: 803 - protein, 605 aa, Zea mays
  VARIANT 4: note = Ancestral polymorphism is P, Derived polymorphism is L
  VARIANT 202..605: note = Derived polymorphism lacks residues 202 to 605
  VARIANT 245..605: note = Derived polymorphism lacks residues 245 to 605
  VARIANT 322..605: note = Derived polymorphism lacks residues 322 to 605
  VARIANT 363..605: note = Derived polymorphism lacks residues 363 to 605
  VARIANT 479: note = Ancestral polymorphism is G, Derived polymorphism is V
  VARIANT 504..605: note = Derived polymorphism lacks residues 504 to 605
MHAPLEAMNGRARRPAAARGAAPRNEKAMEKEQRRPPSSKTAPVSMKASPANATPQCMKNRKIALQQDVDKLRMKLRHEENVHRALERAFTRPLGALPRLPPFLPSQTLELLAEVAVLEEEVVRLEEQVVNFRQGLYRETVITTSMAAKSVYFPDGYRSTPARHKPPAQPQSPELSTSTRQGSDQDAADWLPSLRRATNAMWTPRRPGRSLSQGDSPGKENQSFGSGTNSCREFGLAPLSKVPGCRVVQVAETRAGFQTTSAVEDHKAVEGSNGTGPSKASTAANEVSEELLACLLAIFSQKSASSGQDEERVSLPPVSGSCGSSSADPYCVPEFGWRDIGRYKQFRSVDMNTCAGDDSALGQRLKALLRKLSLVDLAGLSHQHNRLAFWINTYYSCMMNAFLEQGAPSDPRMLVAMMPKATINVGGRVLSAVAIEHFILRLPHYDDDDAKALDVLVGMGHARCTLTEARNGDGQAVLGLDWPEPLLTFALSSGRRSSPVLWTGRPVCPPSCLLKANDFSRHRFLSLKVRVYAAGRSRREAGGGEAGVPAGRGGRLAGERAAEPPPSLVPAGCLTPPRTWTGCACSCPATRVRPAGYLLLLALLS

SEQ ID NO: 804 - protein, 257 aa, Zea mays
  VARIANT 61: note = Ancestral polymorphism is E, Derived polymorphism is A
  VARIANT 181: note = Ancestral polymorphism is S, Derived polymorphism is F
MLSLRSVSGSNSSRGIAAVVGVGPRLGSAVARKFASEGYTIAILSRDLEKLSQLAEEIAQAAKAQVFALRVDCADARSVREAFEGVLSLGPVEVLVYNACEPPAANEDARPAPFLAVTPDAFHRALAVSAGGAFHCAQQVIPGMVERGRGTIIFTGSSASVTGFAGYSDLSSGKFALRGLSQSLAREFQPAGVHIAHVIIDGVIGERRSLTRSSRAGGDTAGAGADPDAVAQSYWHVHAQDKSAWTQEMDIRSPSFM

SEQ ID NO: 805 - protein, 345 aa, Zea mays
  VARIANT 211: note = Ancestral polymorphism is I, Derived polymorphism is L
  VARIANT 67: note = Ancestral polymorphism is Q, Derived polymorphism is H
MPYTGYPLAPSHNRASAVLPPTSAPPTSAPASLAALPSPPSAITAAASFCTGSVAATTPQIRWVDVHGAAPGMSSSASSVEGDAAGEFTEVVIVRHGETSWNASRIIQGHLDAELNDIGRQQAVAVAHRLSKEVKPVAIYSSDLKRAAETAQTIARICNVPNVVFDPALRERHIGDLQGMTLQDAATERPEAYKAFMSHKRNQQVPVSVLIIYRQVLCLALLHMLRCAEASHDQLGLIKAQHSNQGGGESLDQLSERCVSFLYDIVGKHKGERVILVSHGGTIRELYRHVSPTKPLHGKIHNTSVSVILVSDATGRCIVKMCGDVSHLQETGVLENAFGGDKTSA

SEQ ID NO: 806 - protein, 265 aa, Zea mays
  VARIANT 58: note = Ancestral polymorphism is A, Derived polymorphism is V
  VARIANT 135: note = Ancestral polymorphism is A, Derived polymorphism is T
MPSLIDYSPAALRSLLRPPPSDERRAKQSGAAAGAGGALGLFKMFKLLPVLTTGCKVAAMLGRHNNHRALLADHAPTVTLFGHRRGRLSLAIHEDTRAPPAFLIELPMLAPALHREMATGTVRLALESDTRGGAAARRRRRPLLEEYVWAVYCNGRKAGYAIRRKDASDDERHVLRLLRGVSMGAGVLPPPPDDRAGARATATATATPAACPDGELTYMRARVERVVGSNDSQAFYMINPDDASGNTARGGDCAPELSVFFVRNK

SEQ ID NO: 807 - protein, 589 aa, Zea mays
  VARIANT 176: note = Ancestral polymorphism is P, Derived polymorphism is L
  VARIANT 172: note = Ancestral polymorphism is S, Derived polymorphism is W
MDLLDARHRHTPDLSSSQDAASNMGLPLAGAAYQPYVSELLSFSIERLHKEPELLRVDAERVRRQMQEVAVENYAAFIAASEALSFVRAQLESFDGHLEAMIEEIPNLTSGCTEFVESAQQILEERKLNQTLLANHTTLLDLLEIPQLMDTCIRNGNYDEALDLEAFVSKIWKLHPDLPVVQGLATEVKKTVQSLVSQLLQKLRSNIQLPECLRIVAHLRRIGVFSESELRLQFLRCREAWLSGILEDLDQRNVYDYLKGMVTCHRVHLFDVVNQYRAIFNNDKSGNDENYDGGLLFSWAMQQVSNHLTTLQVMLPNITEGGSLSNILEQCMYCAMGLGLVGLDFRGLLPPIFENAVLNLFSKNMSTAVENFQVILDSHCWVPMPSVGFVANGVVDETSDDVTPPSVLMEHPPLAVFVNGVSAAMNELRPCAPLSLKVVLAQEVVKGLHAVSDSLVRYKAMRMLRGNESALFLSLCQAFIEVAYPYCAACFGRCYPNGATLISERQGTFDAVRQLLTVPARSNSSSIERRQSGGIERRQSGAIERKQSVESTGIAVTDNGLSADGPGLETNSSAATTTSPVDDGPPASK

SEQ ID NO: 808 - protein, 421 aa, Zea mays
  VARIANT 277: note = Ancestral polymorphism is M, Derived polymorphism is I
  VARIANT 56: note = Ancestral polymorphism is A, Derived polymorphism is V
MASRSSSAEGAGRTLPVNLKLITVLSIDGGGIRGIIPATILAFLEAKLQELDGPDARIADYFDVVAGTSTGGLLTAMLTAPDTNERPLFAAKDLARFYIQHSPKIFRQKKKKMHASIGVLIHKDAMPCRNAMGSKLVGKLRMACGPKYDGKYLHAQLRRLLGNMRLDRTLTNVVIPTFDIAYMQPMIFSSFELKHRPSTNALLSDICMSTSAAPTYFPPHYFQTRDENGRRKAFNLVDGGIAANNPTLCAMGQVSKDIILADDDFFPVMPADYGKFMVISLGCGSNRNRRYCAKAAARWGVFSWLFKDGSAPIIDMFNSASADMYDQLTGSAGSIDDSSKKNMDRLVRIGNKLLDMNVSRVDLETGRNVEVPGAGTNAERLAKFARQLSDERRRRRQNELIMNSEQVFQIQHQAWYYGGDA

SEQ ID NO: 809 - protein, 194 aa, Zea mays
  VARIANT 51: note = Ancestral polymorphism is V, Derived polymorphism is I
  VARIANT 45: note = Ancestral polymorphism is G, Derived polymorphism is S
MSVFGGDSWARDAQQRKRRLDELLLPITAPSSPSTPDSFKKLHNGKLACLICPHRPVLDTPLMLSAFFRASNYCQTETKLRTRGRETTVDCGVRQERLVGQRSMTVDGPNCAVSRPYASGAVQSQNFGLQLSTLFWLLLFLQSHFWALCLGGFRFRQGAAAGAVREPSQMGLYQYMFFYYAIEENRSSCLYSGV

SEQ ID NO: 810 - protein, 188 aa, Zea mays
  VARIANT 133..188: note = Derived polymorphism lacks residues 133 to 188
  VARIANT 129..188: note = Derived polymorphism lacks residues 129 to 188
  VARIANT 104..188: note = Derived polymorphism lacks residues 104 to 188
  VARIANT 75..188: note = Derived polymorphism lacks residues 75 to 188
  VARIANT 25: note = Ancestral polymorphism is S, Derived polymorphism is R
MPKNLLPAHVCHWCGTWKGDKICSSCKKARYCSEKHQALHWGTGHKNDCLQIISSSAASNSVLPTVGKVPANTSWPEFEIKIDYEGIFDSDSGDENNSKLLVMQRHGKPDAMMQSWMDQFEADSDNKCWTSFQERVSRAPNQVLRYCREPNAKPLWALSSGCPSNADIPSCSYCKDPLCYEFQVGQSS

SEQ ID NO: 811 - protein, 277 aa, Zea mays
  VARIANT 248: note = Ancestral polymorphism is R, Derived polymorphism is I
  VARIANT 241..277: note = Derived polymorphism lacks residues 241 to 277
  VARIANT 239: note = Ancestral polymorphism is R, Derived polymorphism is M
  VARIANT 215: note = Ancestral polymorphism is I, Derived polymorphism is F
  VARIANT 212: note = Ancestral polymorphism is S, Derived polymorphism is L
  VARIANT 207: note = Ancestral polymorphism is K, Derived polymorphism is M
  VARIANT 203: note = Ancestral polymorphism is Y, Derived polymorphism is N
  VARIANT 199: note = Ancestral polymorphism is L, Derived polymorphism is P
  VARIANT 179: note = Ancestral polymorphism is H, Derived polymorphism is Y
  VARIANT 176: note = Ancestral polymorphism is S, Derived polymorphism is L
  VARIANT 171: note = Ancestral polymorphism is R, Derived polymorphism is M
  VARIANT 166: note = Ancestral polymorphism is Y, Derived polymorphism is N
  VARIANT 161: note = Ancestral polymorphism is P, Derived polymorphism is S
  VARIANT 147: note = Ancestral polymorphism is K, Derived polymorphism is N
  VARIANT 127: note = Ancestral polymorphism is E, Derived polymorphism is K
  VARIANT 96..277: note = Derived polymorphism lacks residues 96 to 277
  VARIANT 93: note = Ancestral polymorphism is R, Derived polymorphism is M
  VARIANT 87: note = Ancestral polymorphism is S, Derived polymorphism is C
MGTIPSQLGRPLSSPLQHRQQGLLGERSKISMSTLNKNIVSSQPPLVSSSADLTIPKTTATPSLLASPHQSTSVSTSLHTGFLRSRSTSGLPRQPSYTTGFGTALNIETLVAVAEQRDTPIETPPPEVQDKILFMINNISISNMEAKAKEFNEVIQEQYYPWFAQYMVMKRASIESNFHDLYLKFFDKVNSKSLNKEILKATYENCKVLLRSDLIKSSPEERSLLKNLGSWLGKFTIGRNQALRAIRRLIQNLLSWRYCFSALNSLVVGDLEFQKLP

SEQ ID NO: 812 - protein, 166 aa, Zea mays
  VARIANT 81: note = Ancestral polymorphism is I, Derived polymorphism is V
MARGGSGCRLLALLLVLTAFNGSFAARHLLDTAAAPEATPAQPSIPAVPTKLPPVPTIPAVPTTLTLPPMPSIPEVPKMTIPPIPSIPIPKLALPPTAAGAIPSLPNPVVPTTVPAISAVPVTLPPMPSIPTTLPSIPTTIPTTIPTIPGLQVPPFTAPSPQTTSP

SEQ ID NO: 813 - protein, 106 aa, Zea mays
  VARIANT 68: note = Ancestral polymorphism is I, Derived polymorphism is T
MVGIVVGIVVGMDGKVVGIEGIGGRVTGTAEIAGTVVGTTGFGRDGIAPAAVGGRASFGIGMDGIGGIVILGTSGMEGIGGSVSVVGTAGMVGTGGSLVGTAGMDG

SEQ ID NO: 814 - protein, 267 aa, Zea mays
  VARIANT 64: note = Ancestral polymorphism is G, Derived polymorphism is W
MAVVRLRVSPRLRSIPLLLSQPDAATVRRSFACASASQAPAPARAMAAPSSSSATPSPYTTLVGRVSCEREIKRSKFIAIAAPVPNERAAMAFLDQVKDPRATHNCWAYKLGDQFRYNDDGEPSSTAGKPIYSAIISSGIDKVMVVVISLSCETKGVLNDMNRYFGGIKLGTGGLVRAYGGVASECLKDAPTCLVKPKARVGMEVPFNLLGTVYHQLQHFEAEDIKQDYDTGKDGTVMVMFEVEYEKIENLGNAVNSACSRKIELYL

SEQ ID NO: 815 - protein, 178 aa, Zea mays
  VARIANT 108: note = Ancestral polymorphism is Q, Derived polymorphism is R
MSGNGAKKVVDAAVKAGRTIIDWDGMAKLLVTDEARKEFAALRRAFDDVNHQLQTKFSQEPQPIDWEYYRKGIGSKVVDMYKEAFESSKLEINAGIEIPKYVDTVTPQYKPKFDAVIAELKEAEKEHQKESERIEKELAEMEEMRKKISTMTADDYFEKYPELRKKFDDEIRNDNWGY

SEQ ID NO: 816 - protein, 222 aa, Zea mays
  VARIANT 58: note = Ancestral polymorphism is R, Derived polymorphism is P
  VARIANT 73: note = Ancestral polymorphism is M, Derived polymorphism is I
  VARIANT 215..222: note = Derived polymorphism lacks residues 215 to 222
MAVVSALAKYKLVFLGNQAVGKTAIITRFMYDKFDDTYQAGSLLLNLSSKSDSDLWVRAAAAAAAISAPPCVMQATIGIDFLSKTMYLEDRTVRLQLWDTAGQERFRSLIPSYIRDSSVAVIVYDVTGILIFCSLDVTRKVSTDEGEAKAQEHGAMFMETSAKAGFNVKPLFRKIAGSLPGLDALSSGKQEDMVDINLRPASGSSASGAAAQLEQKSGGCSC

SEQ ID NO: 817 - protein, 294 aa, Zea mays
  VARIANT 212: note = Ancestral polymorphism is T, Derived polymorphism is M
MDREGHYGGRGGGRLLECFSDEVSSGNGGGEERANDGGGPRPPAPGSGVVGAWKRRRGRPPGSKNKPKPQAAAAAAAVARDVEPASSAMRPHVLEVPSGGDVARALAGFARRRGLGICVLAGTGAVADVSLRHPSSSADGAGGSAAVFRGRYEILSISATFLAPSTPAAVARATVRDLSVSLAGPHGQVVGGAVVGPLVAATAVVVLAAAFTDLTFHRLPLEDDAPASVSDIAGADERRGHGRHQYPEQHDAGGSSHPQAMAPATQPVPLFARESHELWPAAPASAQRPRSPYQ

SEQ ID NO: 818 - protein, 326 aa, Zea mays
  VARIANT 122: note = Ancestral polymorphism is T, Derived polymorphism is A
MGVKGFVEGGIASIVAGCSTHPLDLIKVRMQLQGEAAAAVAPQPALRPALAFHAGGHAVALPHHHDIPAPPRKPGPLAVGAQILRSEGAAGLFSGVSATMLRQTLYSTTRMGLYDILKTRWARENGGVLPLHRKILAGLVAGGVGAAVGNPADVAMVRMQADGRLPLAERRNYRGVGDAIGRMARDEGVRSLWRGSSLTVNRAMIVTASQLATYDQAKEAILARRGPGADGLATHVAASFTAGIVAAAASNPVDVVKTRMMNMKVAPGAPPPYAGAVDCALKTVRSEGPMALYKGFIPTVMRQGPFTVVLFVTLEQVRKVFKGVEF

SEQ ID NO: 819 - protein, 124 aa, Zea mays
  VARIANT 70..124: note = Derived polymorphism lacks residues 70 to 124
  VARIANT 73..124: note = Derived polymorphism lacks residues 73 to 124
  VARIANT 87: note = Ancestral polymorphism is C, Derived polymorphism is Y
  VARIANT 118: note = Ancestral polymorphism is V, Derived polymorphism is M
MPQRGGGREGDGRLLHMRKSFKDSLKVLEADIQHANTLAADFSRDYDGMPLDVQPRLPLLPLPHVLDRLQPSWRAWATQDPNLQGLCRWEYHRDLGANLDNDLLVLKTVNYLFLHQVVKLFPLR

SEQ ID NO: 820 - protein, 101 aa, Zea mays
  VARIANT 15: note = Ancestral polymorphism is V, Derived polymorphism is A
  VARIANT 3: note = Ancestral polymorphism is E, Derived polymorphism is K
MAESMLVPQFVTASVVVAIELILNFLNYFGWLSRTLWLLWEDFIITCGLVVLPQVMWLTFVPFIHNSVLHGIISGSLAVAMVRHIKLTCIKQYMFINSGVT

SEQ ID NO: 821 - protein, 424 aa, Zea mays
  VARIANT 39: note = Ancestral polymorphism is R, Derived polymorphism is S
MAPSCYDAAASMLLCAEEHSSILWYDEEEEELEAVGRRRGRSPGYGDDFGADLFPPQSEECVAGLVERERDHMPGPCYGDRLRGGGGCLCVRREAVDWIWKAYTHHRFRPLTAYLAVNYLDRFLSLSEVPDCKDWMTQLLAVACVSLAAKMEETAVPQCLDLQEVGVRLFGIAAKMHTFSLSLSLSLSLSCSCMCNNNKQVGDARYVFEAKTVQRMELLVLTTLNWRMHAVTPFSYVDYFLNKLNNGGSTAPRSCWLLQSAELILRAARGTGCVGFRPSEIAAAVAAAVAGDVDDADGVENACCAHVDKERVLRCQEAIGSMASSAAIDDATVPPKSARRRSSPVPVPQSPVGVLDAAPCLSYRSEEAATATATATSAASHGAPGSSSSSSTSPVTSKRRKLASRCDGSCSDRSKRAPAQWTKE

SEQ ID NO: 822 - protein, 197 aa, Zea mays
  VARIANT 189: note = Ancestral polymorphism is S, Derived polymorphism is I
  VARIANT 154: note = Ancestral polymorphism is T, Derived polymorphism is M
  VARIANT 133..197: note = Derived polymorphism lacks residues 133 to 197
  VARIANT 108: note = Ancestral polymorphism is G, Derived polymorphism is R
  VARIANT 96: note = Ancestral polymorphism is G, Derived polymorphism is D
  VARIANT 36: note = Ancestral polymorphism is E, Derived polymorphism is K
  VARIANT 32..197: note = Derived polymorphism lacks residues 32 to 197
  VARIANT 17..197: note = Derived polymorphism lacks residues 17 to 197
MSSRNVSASQAGAPRQQRPEGGEDRATVARVRVKEERRHAAEEVRGGGGLAGAAERGDVIEPLLVEVDQIYHLACPASPIFYKHNPVKTIKTNVIGTLNMLGLAKRVRARILLTSTSEVYGDPLEHPQTEAYWGNVNPIGVRSCYDEGKRVAETLMFDYHRQHGIEIRIARIFNTYGPRMNIDDGRVVSNFIAQAVR

SEQ ID NO: 823 - protein, 308 aa, Zea mays
  VARIANT 40: note = Ancestral polymorphism is P, Derived polymorphism is R
MDFDEHDDGDEEMTPMPVSSSYDAPMQPGLGLGGGGGETPKHGDSAGAGSFRTPPAGGFGGGGAGAGAGAGGGGATRYRECLKNHAVGIGGHAVDGCGEFMAAGEEGSIDALRCAACGCHRNFHRKESDNSPAGGGGVAPPDPAAALSPAAITAYGAAVAAHHHQFSPYYRTPAGYFLHQQLAAAAGHMQRPLALPSTSHSLGREEGDDVSGLIGPMVVAPMMGMSLGPGGGPSGGSSGGSGSGKKRFRTKFTQEQKDRMLAFAERLGWRIQKHDEAAVQQFCEEVCVKRHVLKVWMHNNKHTLGKKP

SEQ ID NO: 824 - protein, 631 aa, Zea mays
  VARIANT 52..631: note = Derived polymorphism lacks residues 52 to 631
  VARIANT 12: note = Ancestral polymorphism is G, Derived polymorphism is D
  VARIANT 10: note = Ancestral polymorphism is R, Derived polymorphism is W
  VARIANT 1: note = Ancestral polymorphism is M, Derived polymorphism is I
MLEELLIFTRGGLILWSSCRALGAAALKGSPIDALIRSCLLEERSADASFSQDNYALKWTFHNDLGLVFVAVYQKILHLLYVDDLLAAVRKEFSQIYDPKRTSYDDFGDIFRQLHREAEARTEEMKKSKQALSSRPQPALTQKKPGPKGRGGDSRGGAANKGGSGAKDDSDGDGYGNQDHRTLANGAFKGQENGVRKENSSHGRTVVVKGKENGAPKDEGAFDVSKLQKLRANKKNGATDNGTKKLTKPDIKKKGKQDRVWDDKPSNKKLDFTDPADERGDEVADNVAVIEGESMMDKDEDLSSDSEDEEVEDGPKKKGWFSSMFQSISGNNVLEKSDLQPALKALKDRLMAKNVKASLMQAEEIAEKLCESVAASLEGKKLGSFTRISSTVQTAMEDALLRILTPRRSIDILRDVHAAKERGRPYVIVFVGVNGVGKSTNLAKVAYWLLQHNLSVTLAACDTFRSGAVEQLRTHARRLQIPIFEKGYEKDPAVVAREAIQEATRNKSDVVLVDTAGRMQDNEPLMRALSKLINLNSPDLVLFVGEALVGNDAVDQLTKFNQKLADLSAVPTARLIDGILLTKFDTIDDKVGAALSMVYISGAPVMFVGCGQSYTDLKKLNVKSIVKTLLK

SEQ ID NO: 825 - protein, 440 aa, Zea mays
  VARIANT 16..440: note = Derived polymorphism lacks residues 16 to 440
  VARIANT 253: note = Ancestral polymorphism is S, Derived polymorphism is Y
  VARIANT 367: note = Ancestral polymorphism is I, Derived polymorphism is S
MAVVDAMALSTPTPARAEQPDITRCHRGGEVREGDLVQFNYVCRRANDYFVHRCVVEFPDAIALLFDACTGDACYTAPDFESDRVQIHQMCQGAQMVQGYCVRLMVGKLFVVENAAVGSEVEQEEPKKEAMAGVGETLCSFMEGFGDQGEDSIILSPRLKEISTPDRPAALRFLETEQGVAQAIIRFVIDFKRDPWPRVSDNAKDLVRGMLNPDQKRRLTAHQVLGHPWLQNIKKAPNVNLGETVKARLKQFSVMNKFKKHALRVIAEHLWVEEAADIKDMFEKMDLNKDQMLSFEELKLGLHKFGQQMPDADVQTLMEAADADGNGSLNYGEFVTLFVHLRKIGNDEHMHKAFAYFDRNQSDYIEIDELRESLADDLGQNREEIINAIIRDVDTDKDGKISYDEFATMMKAGTYERKASRQYSRKHPDSTRESCKNRVF

SEQ ID NO: 826 - protein, 467 aa, Zea mays
  VARIANT 424..467: note = Derived polymorphism lacks residues 424 to 467
  VARIANT 389..467: note = Derived polymorphism lacks residues 389 to 467
  VARIANT 372..467: note = Derived polymorphism lacks residues 372 to 467
  VARIANT 356..467: note = Derived polymorphism lacks residues 356 to 467
  VARIANT 316..467: note = Derived polymorphism lacks residues 316 to 467
  VARIANT 300: note = Ancestral polymorphism is A, Derived polymorphism is P
  VARIANT 297: note = Ancestral polymorphism is D, Derived polymorphism is Y
  VARIANT 290..467: note = Derived polymorphism lacks residues 290 to 467
  VARIANT 189..467: note = Derived polymorphism lacks residues 189 to 467
  VARIANT 103: note = Ancestral polymorphism is G, Derived polymorphism is D
  VARIANT 87: note = Ancestral polymorphism is R, Derived polymorphism is W
MEPVPRKRKGAPPVCSAARSLQDLASRKRACRGSVPQQSHCTDAPAPAVVMTAPAASGASASAGVLPGRGLKRKVGCIDNATRIGRRKRLENEYDLGEEIGHGKFGSVRVCRPKARTRGEEEFACKALPKNGGDTAHREVEIMQHLSGHPGVVTLRAVFEDTDAFYLVMELCHGGRLLDEVAREGKLSERRAANVIKELMAVLKYCHEMGVVHRDVKPENVLLTKSGRLKLADFGLAVRVADVLQNAARCVKSRSGANLVVAVELLSSGGQQLTGVAGSPAYLAPEVLLGNYSQKVDVWAAGVLLHVLLMGTLPFQGKSVEAIFDAIKTAELDFHSSQWASVSLLARDLIGRMLNREVSSRPDAEDVLRHPWVLFYTDCPQKAEFSNLWGTNKTAAPMIHQEIVRFGYCESSSSKSSSDNSEERDECGIVDALATAITQVRISEPKRSRLFSLPNGLLPPSRNSLRT

SEQ ID NO: 827 - protein, 253 aa, Zea mays
  VARIANT 152..253: note = Derived polymorphism lacks residues 152 to 253
MSKELEEVVDLAGCLCSDPSLSQDQLLSILDVSPSCAYIGTNTKSLDLPRIDRTVRCSLRLQGAHIPTFEPVLESSVSITAYPWASGPPYLFSWLNPQISAQDMMHPELLAKLVSNNFCTVPAKVVLQLTTAFREGGLCNRNGTFSYKDHLRECQTPVLALAGDKDLICPPDAVYETVKLIPNHKVDYRVFGKPQGPHYAHYDLVGGRLEHACADRCPELRRFCLQEAGVIHDSPVRRSGSSSDSDSLYSLNK

SEQ ID NO: 828 - protein, 365 aa, Zea mays
  VARIANT 189: note = Ancestral polymorphism is S, Derived polymorphism is I
  VARIANT 183: note = Ancestral polymorphism is P, Derived polymorphism is L
  VARIANT 111: note = Ancestral polymorphism is P, Derived polymorphism is H
MARCRHHLLLLSVLLALAAAAARQAQSHGKASAVFIDASSHRYLRDQQADHQDASMSLNEVSAVVSVLLGFAPSTSLPAISSSKLNKVLLPNPFDRPRAVFLVQIDGFNVPSFVSEGSNIFKTRIEGANIADTGLTDKDDLIVIHSDESLDLSRSDYLDNELSSLANWLEGSYQKSTGKLVIPLENGNSLTLQLDKEADKEFMSSLASLLKTIERAIQVHEDFSGVVNPAELLECHFTGLKALENEYGSGEIVKQGTEIVQRAVTKSFQSLHEAYKGKIVGLVISTNEAPSSLGSIIDAPSSLHISRRLEEASKTTDIASVVLVRKSLAWITGIILLVSTLIGVCLLMNMPLTRDTLLYSNVKID

SEQ ID NO: 829 - protein, 300 aa, Zea mays
  VARIANT 60: note = Ancestral polymorphism is A, Derived polymorphism is E
  VARIANT 56: note = Ancestral polymorphism is Q, Derived polymorphism is K
MAATTIDWHARNNAALPAAMYGVAVPDSKELVRALAPPTQQAPTISFAYPRSGVEQQSAAGSFLGAGGSGLTPAQILQVQSRLQFLRRPAGAAVATQPMKRQGVPLPQAPAVSKLYRGVRQRHWGKWVAEIRLPRNRTRLWLGTFDTAEEAALAYDSAAFRLRGDSARLNFPELRRGGQHLGPPLHAAVDAKLHAICNGTDVVVPLPQSRSNDATAAATATTAPSPFSSASPHVKSEPGSSGSDSSFSADGDVSSTGSSDVVLDMQLLDFSEAPWDDSESFGLRKYPSLEIDWDSILLIS

SEQ ID NO: 830 - protein, 125 aa, Zea mays
  VARIANT 25: note = Ancestral polymorphism is H, Derived polymorphism is D
MAAAVSFSRVRALPTWSSSVSGDDHHRSYSAALAMSVSVRPRCRARSPARMMGNVNAGKGLFAPLVVVARNIIGRKRFNQLRGKAIALHSQVITEFCKTIGADSKQRQGLIRLAKKNGEKLGFLA

SEQ ID NO: 831 - protein, 745 aa, Zea mays
  VARIANT 22: note = Ancestral polymorphism is K, Derived polymorphism is N
MGSNTERARKALGAMKLIGFSKKQAIPVLKELLKIFNNNWEPIEDESYRALADAILDRQDSKQTPPSQQGTQAAHADLEPLRSTRDDRQQYLSASLDDTCEDDNETPLVKRPRMGTANFRPELQPPQQSSVSTQGALPASPQTSRRQTRSLTVEPHAAGHEYPLAVNDALVVKEPKPEPQIDRAEDFVAGPNATQLNDGSSEQTSGFGARGNIVHQAQSLGRSLQAAAVCKNGVGSTVQNTHETSIVEVDVASSANGEVKMSLKCSLGSSNFSISMEEVFKMVEEKCLHSYKMLPSDLSIGKLLSEVCQSVVQLGTMHSEVNRDSGSLHNEVVVPFVKPISCEAAVGISDDVAGGSSVLESSEPCLQNSLVAWNPELAHCNQKTTHDTTDISKGEERVRIPVVNEFGSETCPPSFYYIPRNLVFQNAYVNISISRICDEDCCADCSGNCLSAPVPCSCARITGGEFSYTLEGLLKTAFLDECTSVNHFLQEHHRFYCPVCPLERSKNEGSPGPCKGHIVRKFIKECWSKCGCGMQCGNRVIQRGITCKLQVFFTREGKGWGVRTVEDLPRGAFVCEYVGEILTSAELHERAIENARNGKHMHQVLLDAGWGSGVVLRDEDACSLDGSFYGNVGRFINHRCYNANLVQIPVEVETPDHHYHHLAFFTNKKVEAFEELTWDYGIDFDDMEGPSKPFRCMCGSRYCRDPNNPSMLPFSVLPLDVNGEPCMYDGLFLAGRMGRAAAKRK

SEQ ID NO: 832 - protein, 384 aa, Zea mays
  VARIANT 49: note = Ancestral polymorphism is S, Derived polymorphism is L
MLSVPGAAGSRGRLVAATACFLLVLLLLQVRPATATPTPPRAFFVFGDSLVDSGNNNYLATTARADSPPYGLDYPTHRATGRFSNGKNVPDIISEYLGAEPALPYLSPHLDGRKLLVGANFASAGVGVLNDTGVQFANIIRVQKQLRYFRQYQDRLSRLVGEDAAARLVRGALVLVTLGGNDFINNYYLVPFSARSREFALPDYVRYVVSEYAKVLRQLYSLGARRVLVTGSGPLGCAPAELALRGSRDGECDAELQRAAALYNPQLVDMIKGVNAELGADVFVAVNAYRMHMDFISDPAAYGFVTSKVACCGQGPYNGVGLCTAASSVCPDRSVYAFWDNFHPTEKANRIIVSQFMDGPQEYMHPLNLSTILAVDARAAATFN

SEQ ID NO: 833 - protein, 522 aa, Zea mays
  VARIANT 207..522: note = Derived polymorphism lacks residues 207 to 522
MGNKKSKRSRSKKNKTNADQALALDYVRAWVLPVPPPLKPSAADVDDFLPVQATRRGDVLFELHSHSNHSDGFLSPSALVERAHRNGVKVLALTDHDTMAGIPEAVSAASKFGMRIIPGVEISALYNPRDIQGDISWCMLFADDVVLVDESREGINRKLELWKYTLESKGFRLSRTKIEYMMCVFSATRHEDGDVTLDGKESFQYLGSMLQKDGDIDEDMFHANFIIFSISLSIREVAGAGETVHILAYYGMCGPSRCDELDGMLLNIRDGRYLRAKNMLEKLTTLKVPIKWEHVNKIAGDGVAPGRLHIARALVEMGYVENLRQAFNKYLGDDGPAYARGSEPFAETVVQLISRTGGFSALAHPWSLKNPDAIIRSLKGAGLNGMEVYRSDGEVNGFSELAEKYGLLKLGGSDFHGRGGKDESDVGTVKLAITTLCCFLKMARSIWSSAMKDILLKFAEEPSAANLGNMLKFGRLTKFAGFSPINNGIHVVDFCLSSWSSNDDIEDVELEEVRLKLAHYAE

SEQ ID NO: 834 - protein, 652 aa, Zea mays
  VARIANT 178..652: note = Derived polymorphism lacks residues 178 to 652
  VARIANT 225: note = Ancestral polymorphism is A, Derived polymorphism is V
  VARIANT 262..652: note = Derived polymorphism lacks residues 262 to 652
  VARIANT 307..652: note = Derived polymorphism lacks residues 307 to 652
MGSCPPPPPPQMAPVLSRFPITPKPDPDGPSPSQSPIPVAERSSLMLALTPELCEIHHRELAPSPDDDPSFAHCLRQYQLHLEALAARLRPPSSSSPAATPVARVPPPPPSLPPQQGQQQQAGAGGGSNSSSKKRARAATEVVRATHLSPADHLRYRALVRRARLTFEALRSRYQRQETSAGVRNRHDLRASSQMLSAGHWLHREVRLVGDIPGVLVGDAFYYRAEICVVGLHTAPQAGIGYIPGRLLDVGQSIATSIVSSGGYLDDEDTGDVLVYTGSGGRQRNRVNHSADQTLERGNLALHNSYQYGVEVRVIRCHDVDQGPHRKVYVYDGLYRVVSSTFGPGKSGHDVCKFKLVRLPGQDELASKTWHNAKLLKESMDARIRPPRYISLDLSKGTEVLRVPVCNKLDDDRSPLMFMYIVRPEFPVPPSHGPVRQHRGCHCASGCGSKCRCGRKNGGGPVYTEDETLVMGRPVVYECGALCGCPMTCVNRVTQRGMKHRLEVFRSHETGWGVRALDLIQPGAFVCEYSGHVVAIDDQSGSALMEGRSIIDPRRFPERWREWGDASAVEPSIRRRQFTKYAGPDYVLDVSDKRNVACYISHSWTPNVFLQFVLRGNEDESFPHLMVFAMETIPPMRELSIDYGIDEELSAS

SEQ ID NO: 835 - protein, 58 aa, Zea mays
  VARIANT 36: note = Ancestral polymorphism is R, Derived polymorphism is Q
  VARIANT 40: note = Ancestral polymorphism is G, Derived polymorphism is R
  VARIANT 45: note = Ancestral polymorphism is Q, Derived polymorphism is K
MDEIMNKVGVYWMGPPANKEISAGDDLEVFTLDQRRGWSGMAGEKVEGQDAEATGGPA

SEQ ID NO: 836 - protein, 568 aa, Zea mays
  VARIANT 25..568: note = Derived polymorphism lacks residues 25 to 568
  VARIANT 296..568: note = Derived polymorphism lacks residues 296 to 568
MASSTSLSLCLHASSPSSSSPGLRRPSLASSSSSRSERTRKIRAKAVREDWRQKSKPIPPGAVYPAKDHCSRCGLCDTYYVAHVKTACAFLGDGMSRVEDLERQVHGRGRKEGMDEMYFGVYDQLLYARKTEPVEGAQWTGIVTTIAVEMLKANMVDAVVCVQRHPNKNQMPHHSFSVLCTSITTWIQIMFFTPSAVILTTGLLQDLFWPDFLTPDEVIAAKGVKPTLSPNLNTLALVEAAGVKRLLFCGVGCQVQALRSVEKYLGLEKLYVLGTNCVDNGTREGLDKFLKAASSEPETVMHYEFMQDYKVHLKHLDGHIEEVPYFCLPANDLVDVIAPSCYSCFDYTNGLASALLEQTNSSESLCCLVKCLQDLVVGYMGVPKYAGVSMTQHPQYITVRNDRGQEMLNLVAGLLESTPTISSGSRQPFVMETVKADDAAKLGTSPNHHLYGILVLSIGIELVVTMTIRLAYIHVNKQTNGSTGKGPSKPAPRFVGDILAFLLNLVGPKGLEFARYSLDYHTIRNYLHVRRAWGKQRAEQHIPGYAKKIVEAYDKDGRIEAMVTQSGD

SEQ ID NO: 837 - protein, 110 aa, Zea mays
  VARIANT 50..110: note = Derived polymorphism lacks residues 50 to 110
  VARIANT 59..110: note = Derived polymorphism lacks residues 59 to 110
  VARIANT 79..110: note = Derived polymorphism lacks residues 79 to 110
MTAGGLSVMVALPGALKALTSRCVEAAIPKFLGTWMSFLLLSVLPSPTMSAVRRKNVGQRSITRNDGEVIVVASSVCGQREEDFGNGGSSSSPTAALAIRRNLYLVIYKD

SEQ ID NO: 838 - protein, 136 aa, Zea mays
  VARIANT 68: note = Ancestral polymorphism is H, Derived polymorphism is P
MGGKCPHRKVKKRRLSHKTARRGKFLLKADDAVYDELVKLADQGKDAEAKELPVDEDLPGLGQFYCLHCEYALPLSSLSLPSIPPVCYFLSSANTETENYSCCTDCKAGIAEYVELLVDGDVCKSLPFGICIENGL

SEQ ID NO: 839 - protein, 94 aa, Zea mays
  VARIANT 35: note = Ancestral polymorphism is L, Derived polymorphism is F
  VARIANT 37: note = Ancestral polymorphism is V, Derived polymorphism is A
MSWLTLSRTDGSHGGVTVPVWSRRCLVVASQDIWLWAGNHRYFASESVKDDHYRSKRHKKRVKVMSGPAPHTQLDAELAAGMGKPDNGLKLMSM

SEQ ID NO: 840 - protein, 1416 aa, Zea mays
  VARIANT 780..1416: note = Derived polymorphism lacks residues 780 to 1416
MSSSDPEEIRARVVVLGSPHADGGDEWARPELEAFHLPSPAHQPPGFLAGQPEAAEQPTLPAPAGRSSSSSNTPTTSAGGGAAPPPPSSPPPPPASLETEQPPNARPASAGANDSKKPTPPAALRDLFRFADGLDCALMLIGTLGALVHGCSLPVFLRFFADLVDSFGSHADDPDTMVRLVVKYAFYFLVVGAAIWASSWAACVRRELAVNLDWMTNHVGQPIAVATNEMFKSFAPLAEISCWMWTGERQSTRMRIRYLDAALRQDVSFFDTDVRASDVIYAINADAVVVQDAISEKLGNLIHYMATFVAGFVVGFTAAWQLALVTLAVVPLIAVIGGLSAAALAKLSSRSQDALSGASGIAEQALAQIRIVQAFVGEEREMRAYSAALAVAQRIGYRSGFAKGLGLGGTYFTVFCCYGLLLWYGGHLVRAQHTNGGLAIATMFSVMIGGLALGQSAPSMAAFAKARVAAAKIFRIIDHRPGISSRDGAEPESVTGRVEMRGVDFAYPSRPDVPILRGFSLSVPAGKTIALVGSSGSGKSTVVSLIERFYDPSAGQILLDGHDLRSLELRWLRRQIGLVSQEPALFATSIRENLLLGRDSQSATLAEMEEAARVANAHSFIIKLPDGYDTQVGERGLQLSGGQKQRIAIARAMLKNPAILLLDEATSALDSESEKLVQEALDRFMIGRTTLVIAHRLSTIRKADVVAVLQGGAVSEMGAHDELMAKGENGTYAKLIRMQEQAHEAALVNARRSSARPSSARNSVSSPIMTRNSSYGRSPYSRRLSDFSTSDFTLSIHDPHHHHRTMADKQLAFRAGASSFLRLARMNSPEWAYALAGSIGSMVCGSFSAIFAYILSAVLSVYYAPDPRYMKREIAKYCYLLIGMSSAALLFNTVQHVFWDTVGENLTKRVREKMFAAVLRNEIAWFDADENASARVAARLALDAQNVRSAIGDRISVIVQNSALMLVACTAGFVLQWRLALVLLAVFPLVVGATVLQKMFMKGFSGDLEAAHARATQIAGEAVANLRTVAAFNAERKITGLFEANLRGPLRRCFWKGQIAGSGYGVAQFLLYASYALGLWYAAWLVKHGVSDFSRTIRVFMVLMVSANGAAETLTLAPDFIKGGRAMRSVFETIDRKTEVEPDDVDAAPVPERPRGEVELKHVDFSYPSRPDIQVFRDLSLRARAGKTLALVGPSGCGKSSVLALVQRFYEPTSGRVLLDGKDVRKYNLRALRRVVAVVPQEPFLFAASIHENIAYGREGATEAEVVEAAAQANAHRFIAALPEGYRTQVGERGVQLSGGQRQRIAIARALVKQAAIVLLDEATSALDAESERCVQEALERAGSGRTTIVVAHRLATVRGAHTIAVIDDGKVAEQGSHSHLLKHHPDGCYARMLQLQRLTGAAAGPGPSTSCNGAA

SEQ ID NO: 841 - protein, 372 aa, Zea mays
  VARIANT 284: note = Ancestral polymorphism is V, Derived polymorphism is L
  VARIANT 267: note = Ancestral polymorphism is A, Derived polymorphism is S
  VARIANT 183: note = Ancestral polymorphism is V, Derived polymorphism is L
MEAQLLMSLRRLAASTPTGAASSVTQSSASKGFDVGSLSSTKGPPSISISDVPFVPDPTIQLMSASQLIDHDCCVILYPNFCYASVRVPLNNGGSLVIEQTEALVSVDVNGGHSMFGQGTSQEKAILEVNLEAAKQIARELRLRDIGGIIIVDFIDMSDDLSLMPHFLPANKKLVYEEMKKAVEKDRSTVGVSELSKLGLMEITRKRLGHGHVYRNILCGGFGDQVRPSVTFMISEPCTCCHGTGRVEALDTSFSKIEREICRRLAASRRKSDPEKPKSWPRFLLRVDHEMCTYLTSGKKTKLGLLSSSLKVWILLKIARGFSRGAFELLPYSEKENYSMEKETSELPQKESRPKLSVFPIKKWMSRAKRAK

SEQ ID NO: 842 - protein, 127 aa, Zea mays
  VARIANT 17: note = Ancestral polymorphism is A, Derived polymorphism is V
  VARIANT 37: note = Ancestral polymorphism is K, Derived polymorphism is R
  VARIANT 40: note = Ancestral polymorphism is Q, Derived polymorphism is R
MRCTLVVWLSLVVMAAVTAAGDDNTPEPRPVITPKPKPPRPYQPKPTPQPYQPKPTPQPYQPKPQPEPGHPKPTPQPNPTPEPTKPKPTPQPEPKPKPQPQPMPEPQPGHGKPKPKPPAYSPGTPGP

SEQ ID NO: 843 - protein, 269 aa, Zea mays
  VARIANT 103: note = Ancestral polymorphism is T, Derived polymorphism is N
MAPSSKDGATATEQPTSGDDDRENGGTGEPKEGAVVAGNRRPRGRPPGSKNKPKPPIFVTRDSPNALRSHVMEVAGGADVAESIAHFARRRQRGVCVLSGAGTVADVALRQPAAPGAVVALRGRFEILSLTGTFLPGPAPPGSTGLTVYLAGGQGQVVGGSVVGTLTAAGPVMVMASTFANATYERLPLDDADEEPAGQQAAQLPPGPGGGQPMVMGGMADPSAVPMFGGAGGVPPSLMPAGAAAASSGAGLQLGHDRLAWAHARPPPY

SEQ ID NO: 844 - protein, 48 aa, Zea mays
  VARIANT 1: note = Ancestral polymorphism is T, Derived polymorphism is M
  VARIANT 9..48: note = Derived polymorphism lacks residues 9 to 48
  VARIANT 27: note = Ancestral polymorphism is D, Derived polymorphism is N
  VARIANT 40: note = Ancestral polymorphism is R, Derived polymorphism is C
MWSKEALSQAATAAGGGPQASDGGDSDPSSASGTHVRYSRFEAQLRAF

SEQ ID NO: 845 - protein, 69 aa, Zea mays
  VARIANT 44: note = Ancestral polymorphism is L, Derived polymorphism is F
  VARIANT 46..69: note = Derived polymorphism lacks residues 46 to 69
MLILELIVQLWSKSFATNIFALLFHKWLFEALLTKKKYRYDIALLLFKVLQMYFVATTVPACVLRMFGI

SEQ ID NO: 846 - protein, 282 aa, Zea mays
  VARIANT 119: note = Ancestral polymorphism is R, Derived polymorphism is L
MGSRYEVEVTVGSASNLKNVNWRNGDLRPYAVLWVDDGPKCSTRVDPDNGEDPVWDEKVVVPVPPASAARLGDAVLHIDVVHAAGDDADAVKPLVGSARLPLRDVLDDAGGVGGARVSRTLRLKRPSGRPQGRLEARVAVREAAPPPRYYDPNPYPAPAYGNPGAARDPYYAAPPAYGGQPPYAAPPVGYPADAPPPYGGGYGYGAAAPTAYGAEAAPLPAQQQKSSKMGMGTGLAVGAAAGLLGGLALAEGASYVEDKFEDRVAERVEEETFGDGDYDDDY

SEQ ID NO: 847 - protein, 68 aa, Zea mays
  VARIANT 35..68: note = Derived polymorphism lacks residues 35 to 68
  VARIANT 28..68: note = Derived polymorphism lacks residues 28 to 68
MAASASLPPPLRAPPPFLLSAATIRRRQRGPALRRGHGVGTCRARVSQMCIADVRSPANLQLPNLQRP

SEQ ID NO: 848 - protein, 355 aa, Zea mays
  VARIANT 89: note = Ancestral polymorphism is R, Derived polymorphism is G
  VARIANT 117: note = Ancestral polymorphism is S, Derived polymorphism is L
  VARIANT 246: note = Ancestral polymorphism is A, Derived polymorphism is V
MSWAAIENDPGVFTELLQQMQLKGLQVSNQLSSLYESMFLLKVDDILCYLFHYQVDELYSLDLDALNDLQPIYGLILLYKWRPPEKDEGPVIKDAIPNLFFANQIINKACATQAIVSVLLNSPGITLSDELKKLKEFAKDLPPELKGLAIVNCASIRMLNNSFARSEASEEQKPPSGDDDVYHFINYVPVDGVLYELDGLKEGPISLGKCPGGVGDAGWWLRLAQPVIKEHIDLFSQNEIRFSVMAILKNRKEMFTVEIKELQRKREGLLQQMGDPNASRHVEQSLAEVAAQIESVTEKIIMEEEKVKKWKAENLRRKHNYVPFLFNFLKILEEKQQLKPLIEKAKAKQKSHGPS

SEQ ID NO: 849 - protein, 419 aa, Zea mays
  VARIANT 40: note = Ancestral polymorphism is S, Derived polymorphism is Y
  VARIANT 100: note = Ancestral polymorphism is A, Derived polymorphism is V
MIGGEGNPYYLQNQLFHHGHAALHGMEGGGFHAIEPPPASDSAADALLYNLSVLRDKVQQLQPLVGLALAHDGPGPVAAAPGAGAAIQEIIAAASSMMYAFQQLCGHGHGHGGAATASANNAAQQATQQGGANIVAVADNHGRMADTAATFGDHHQHQQAPVTDHVMQQQWQQQQHHCYGGGYGRRIHDSKMTPVAAAVAMPSSSHSKPMTTAVAGMAKEEVAAGTIIQLEAAELLAKYTHYCQVCGKGFKRDANLRMHMRAHGDEYKSSAALANPAKAAVVRNATAAPSSGAATTRSLYSCPHEGCRWNRKHAKFQPLKSVICAKNHYKRSHCPKMYVCNRCNRKHFSVLSDLRTHEKHCGDHRWLCSCGTSFSRKDKLIGHLALFSGHQPAVPLDRQANGGDRRSSSMSPWTTQLGT

SEQ ID NO: 850 - protein, 293 aa, Zea mays
  VARIANT 215..293: note = Derived polymorphism lacks residues 215 to 293
  VARIANT 166: note = Ancestral polymorphism is S, Derived polymorphism is L
  VARIANT 34: note = Ancestral polymorphism is P, Derived polymorphism is S
METRFWELRIAFGNYPSSSRLEHSLEHIRPLIFPAKRRKVVTMKKRKERVSSESTLPLVVGITAEESTALIPAASESKAQKVVAEDLTPVGRDALSRIRGRDFDSACGLTEDTGALIVWQAPPILEEMAAHNQLDSKQDPDSFRPPATSVIEYQRQGPTAQMTNISFMVGNSSHARPTDQDDENLRGDVLTLINELEDERAAALERTRILEERLQQELENERTVAAERTTILKSKEAAIERTRVLDENLEVRAIERTRVLDERLQREYEIARTAASQNEALKEEIFKLQEFVF

SEQ ID NO: 851 - protein, 240 aa, Zea mays
  VARIANT 59..240: note = Derived polymorphism lacks residues 59 to 240
MTSDDGENDEYCQNVNFVLGPTGICIVYEQYIFPAAKQYAETLRTSDEFYWDNGPKIREGGGAYFLFLLSIAFLMSFFGILVPGVPTNCIGDIADAPPATTGGIDDVGAGTGGATGVGTDACRGNVAGACEGAGSGGGRVTSGRKLKGVRNWWRGSRQKIISLPTAPCSGDTTNSNKNKRGPASALEKDWALEDHKHMDALISRSIYSGGYLSIFCEIYIFEKHLPLLAAASCKGYIIPG

SEQ ID NO: 852 - protein, 281 aa, Zea mays
  VARIANT 26: note = Ancestral polymorphism is D, Derived polymorphism is G
  VARIANT 191: note = Ancestral polymorphism is T, Derived polymorphism is I
MAGSWMAAPRPLLLSLLVAVLAVAADVANAGHAKPLTPGGRVVHHNHGKFTAGPWKPAHATFYGGRDGSGTTAGACGYKDTRAQGYGVQTVAVSTVLFGDGAACGGCYEVRCVDSPSGCKPSAAALVVTATDLCPPNDQQSADSGGWCNPPREHFDLSMPAFLQIAQEKAGIVPISYRRVACTKQGGIRYTITGNKYFNMVTITNVGGAGDIAAVSVKGSKRVKWTEMKRNWGQVWQTGEDLTCESLTFRVMTSDHRKATSWHVLPADWKFGVTYQASKNF

SEQ ID NO: 853 - protein, 269 aa, Zea mays
  VARIANT 12: note = Ancestral polymorphism is L, Derived polymorphism is P
  VARIANT 43: note = Ancestral polymorphism is G, Derived polymorphism is D
  VARIANT 110: note = Ancestral polymorphism is S, Derived polymorphism is C
MAAPRPLLLSLLVAVLAVAADVANAGHAKPLTPGGRVVHDNHGKFTAGPWKPAHATFYGGRDGSGTTAGACGYKDTRTQGYGVQTVAVSTVLFGDGTACGGCYEVRCVDSPSGCKPDAAALVVTVTDLCPPKDQWCKPPREHFDLSMPAFLQIAQEKAGIVPISYRRVACVKQGGIRYTITGNKYFNMVTITNVGGAGDIAAVSVKGSKRVKWTEMKRNWGQVWQTGEDLTCESLTFRVMTSDHRKATSWHVLPADWKFGVTYQASKNF

SEQ ID NO: 854 - protein, 269 aa, Zea mays
  VARIANT 23: note = Ancestral polymorphism is A, Derived polymorphism is D
  VARIANT 24: note = Ancestral polymorphism is N, Derived polymorphism is I
  VARIANT 29..269: note = Derived polymorphism lacks residues 29 to 269
  VARIANT 138: note = Ancestral polymorphism is P, Derived polymorphism is S
MAAPRPLLLPLLVAMLAVVADVANAGHAKPLTPGGRVVHDNHGKFTAGPWKPAHATFYGGRDGSGTTAGACGYKDTREQGYGVQTVAVSTVLFGDGAACGGCYEVRCVDSPSGCKPDVAALVVTATDLCPPKDKWCKPPQEHFDLSMPAFLQIAQEKAGIVPISYRRVACAKQGGIRYTITGNKYFNMVTITNVGGAGDIAAVSVKGSKRVKWTEMKRNWGQVWQTGEDLTCESLTFRVMTSDHRKATSWHVLPADWKFGVTYQASKNF

SEQ ID NO: 855 - protein, 230 aa, Zea mays
  VARIANT 112: note = Ancestral polymorphism is T, Derived polymorphism is M
  VARIANT 157: note = Ancestral polymorphism is A, Derived polymorphism is V
  VARIANT 169..230: note = Derived polymorphism lacks residues 169 to 230
  VARIANT 172: note = Ancestral polymorphism is K, Derived polymorphism is N
  VARIANT 175: note = Ancestral polymorphism is G, Derived polymorphism is R
  VARIANT 180: note = Ancestral polymorphism is P, Derived polymorphism is L
  VARIANT 203: note = Ancestral polymorphism is A, Derived polymorphism is T
MPHRTPASAASLRAREPPAQPAPPSPRPRLASARPPPRTKQAHRASPPETPPTLRNARPRRSPFCTSQRQRSIGYLVLPAAPNSHGGNDRTRGAACGARSRRPRGAPCSSYMASAPRRRGSGPRTSTASSQSASIPSSLPPPALIVIQLQPHPSLLVEVDHRRSSSLVQFLKDEGVVLSPEDENKREKVIRELKKIVMHWANAVAYEQSVPQGLATAIVLTYDSYTLGVS

SEQ ID NO: 856 - protein, 140 aa, Zea mays
  VARIANT 102: note = Ancestral polymorphism is N, Derived polymorphism is K
  VARIANT 125: note = Ancestral polymorphism is T, Derived polymorphism is I
MAPASASPRLSAASGDGELPKRLLLMYRPEESEDIPKPAPVEEEKAPVEEHVLVPPVTEVVSPPKTKVADTGDLLGLDDPNPIVSAIEERNALALAIVPICKRASTTGNTALQDKGFDPTRWELTLVTALSNTTSSEYVG

SEQ ID NO: 857 - protein, 192 aa, Zea mays
  VARIANT 165: note = Ancestral polymorphism is G, Derived polymorphism is C
  VARIANT 156: note = Ancestral polymorphism is R, Derived polymorphism is C
  VARIANT 152: note = Ancestral polymorphism is R, Derived polymorphism is C
  VARIANT 33: note = Ancestral polymorphism is I, Derived polymorphism is F
  VARIANT 24..192: note = Derived polymorphism lacks residues 24 to 192
  VARIANT 5: note = Ancestral polymorphism is I, Derived polymorphism is V
MGRAINKTVMVVELIKRRIVGLHQNTTTGSTDITDMWEPLEEGLLLLETTRLVSMITITLSKKEVDTSSIGYQSPLPPDEVKPLVKYDNDEGIMHTHLVAVEGVVVVEAVGRAGAEVDVVRLSAAENGFNEFADVGWEDDHAPAYMGNGYACGRGRSFRGRGRRGGYNNQPEYQQDGGYYEEAPVHAPALGG

SEQ ID NO: 858 - protein, 80 aa, Zea mays
  VARIANT 5: note = Ancestral polymorphism is A, Derived polymorphism is E
MAETADMERIFKRFDTNGDGKISLSELTEALRTLGSTSADEVQRMMAEIDTDGDGCIDFNEFITFCNANPGLMKDVAKVF

SEQ ID NO: 859 - protein, 444 aa, Zea mays
  VARIANT 35..444: note = Derived polymorphism lacks residues 35 to 444
  VARIANT 59..444: note = Derived polymorphism lacks residues 59 to 444
  VARIANT 131..444: note = Derived polymorphism lacks residues 131 to 444
  VARIANT 137..444: note = Derived polymorphism lacks residues 137 to 444
  VARIANT 229..444: note = Derived polymorphism lacks residues 229 to 444
MAHARTRDDQPATVALAPKGRRATSDAPAGGEGGWSGQDEKPAADDDWLPVNARRNTKWCAWLVAFLPPFRPITEFSIPRGVGVTVLVLSWVIMVYTLWQMVEMHECVPGKRFDRYHELGRHAFSEKLGLWIVVSQQLVVEVGLNIVYMITGGQSLQKFHDVLPDFHSISSVSLAADVMSVGYSAIAWTASAAQGKAAEADVDYSLRATTTPGKVFGFLGTLGEVAFTYAGHNVVLEIQATIPSTPGKPSKKPMWKGVIVAYVVIAACYLPVALVGYWAFGNDVDENILITLNRPRWLIVAANMMVVVHVVGSYQVYAMPVFDMIETVLVKTYWFTPGFRLCLIAWTVYIALTMFMAITFPFFSELLSFFGGFAYAPTSYFLPCIMWLIIYKPRRFSLSWLTNWICIVIGVLLMVLSPIGGLRQMILKIKTYKFYQDYSGLSHN

SEQ ID NO: 860 - protein, 359 aa, Zea mays
  VARIANT 118..359: note = Derived polymorphism lacks residues 118 to 359
  VARIANT 73: note = Ancestral polymorphism is T, Derived polymorphism is I
  VARIANT 25..359: note = Derived polymorphism lacks residues 25 to 359
MCRRHIRAGVYTTVAPWLERLRSTQRVPVVHLSLLLNATSPPSLRRCACLDRGDVPKHVTEANLLPLFCEVATVDEVTIIKDKATKVSREVILLENVELTLEAFDYMQLPFTLKGDVQREMKNVEKDIRVATKRNDMLSAKEKVLPVDGVDQEKDSLSTLNLPEQSTNPISVSADGEGGNVSEKQVSPDKQIRAALLRSRFADTILKAREKALDQTTKKDPEKLRREREELERVQREERARLQAEAKAAEDVRKRAEAAAAAEAKRQRELEREAARKALQEMEKTVDINEGSHFLKDLEMLGSVTGEQIPNLVGETSPGFQMGSNTLEKLGLYMKNDEDDEDGDFTDEPVADVEEGEID

SEQ ID NO: 861 - protein, 440 aa, Zea mays
  VARIANT 170: note = Ancestral polymorphism is G, Derived polymorphism is W
  VARIANT 94: note = Ancestral polymorphism is R, Derived polymorphism is W
  VARIANT 20..440: note = Derived polymorphism lacks residues 20 to 440
MSLVVAAPMAIVELANAQLQQQAAAAAKKDGGGHELEDGAADADTSTTMGMSCKRSEQQQQLVESSSSYDYDYGALMKGVRHLSDSGITRLPDRYVLPVSDRPGVGLIAASSTAAAAGGVGRVKLPVVDLAGLRDPSQRAAVLATLDDACREYGFFQVVNHGVGSDVSGGMLDVARRFFELPLAERARHMSADVRAPVRYGTSFNQAKDAVLCWRDFLKLVCQPLREVVPRWPQQPADLRDVATGYAAASHALFMEVMEAALEALGIPAPAAGGGVLGELAALASHMMTVNCYPACPQPELTLGMPPHSDYGLLTFVLQDHVEGLQVLHAGRWLTVDPVPGSFVVNVGDHLEIYSNGRYKSVLHRVRVNSTRPRISVASFHSLPAERAIGPAPELVDDEAGNPRRYMDTDFATFLAYLASADGKNKTFLQSRKLPLHTSS

SEQ ID NO: 862 - protein, 415 aa, Zea mays
  VARIANT 157..415: note = Derived polymorphism lacks residues 157 to 415
  VARIANT 130..415: note = Derived polymorphism lacks residues 130 to 415
  VARIANT 121: note = Ancestral polymorphism is P, Derived polymorphism is R
  VARIANT 116..415: note = Derived polymorphism lacks residues 116 to 415
  VARIANT 111..415: note = Derived polymorphism lacks residues 111 to 415
  VARIANT 99..415: note = Derived polymorphism lacks residues 99 to 415
  VARIANT 79..415: note = Derived polymorphism lacks residues 79 to 415
  VARIANT 72..415: note = Derived polymorphism lacks residues 72 to 415
  VARIANT 19..415: note = Derived polymorphism lacks residues 19 to 415
MASFAPSGEVSSKHGVVGYGIVGGPNGNAVAPAAKSTVVETTIERINEVSKEYFLKTVSNIVGDKLLKQAASQYQMQAQRSPQTNPSNYSLSGQVSGQQTAPSGSVTGDEQKGYPWAHTIPMRQAIASTRPPQFRPSSSGQMRSNTGNPPSQTNLHKANKMGNMSDGKGVHMLQTHPPNNSIPVQTMQHHVQRPQTSSPVFGANSIHARPFLRPVGGPAAPFRPQMADSNPRAHLIQGAVTTISRSVPKRSIVSGNAPGNQSTRQQSANKEQKTISFAPTTHMNNETVSQNSKFSHNSFAVMHAKQVNQALGSSKVSAGMESQSQQLSAPKPLAATSLSQTQSHGIQEEPKIQMFAYRETVLEEAHQGMELHEHCRHIVDNDDQHCRFHSLCVHQGYCDRDGHLGAQTISWAEEH

SEQ ID NO: 863 - protein, 612 aa, Zea mays
  VARIANT 292: note = Ancestral polymorphism is R, Derived polymorphism is Q
MQSMALTSPSLPEVGPVSGRRLQRIRATAVSDELKLNKYSARITEPKSQGASQAVLYGVGLTDADLRKPQVGVSSVWYEGNTCNMHLLRLAEAVRDGVREAGMVGFRFNTVGVSDAISMGTRGMCYSLQSRDLIADSIETVMGAQHYDANISIPGCDKNMPGTIMAMGRLNRPSIMIYGGTIKPGHFQGNSYDIVSAFQCYGEYVSGSITDEQRKNVLRNSCPGAGACGGMYTANTMASAIETLGMSLPYSSSTPAEDPLKLEECRLAGKYLLELLKMDLKPKDIITEKSLRNAMVIVMALGGSTNAVLHLIAIARSVGLHLTLDDFQKVSDQVPFLADLKPSGKYVMEDLHKIGGTPAVIHYLLEQGLLDGDCMTVTGKTLAENAKIFPPLSEGQQIIRPLDNPIKPTGHIQILYGNLAPEGSVAKITGKEGLFFSGPALVFEGEESMITAISENPANFKGKVVVIRGEGPKGGPGMPEMLTPTSAIMGAGLGKECALLTDGRFSGGSHGFVVGHICPEAQYMIVKINCRRFVLFTKGAIFQEGGPIGLVHSGDVITIDVSKRVIDVDLTEQQLEERRRKWTPPPYKSTCGALWKYIKLVAPASRGCVTDE

SEQ ID NO: 864 - protein, 213 aa, Zea mays
  VARIANT 157: note = Ancestral polymorphism is C, Derived polymorphism is Y
  VARIANT 153..213: note = Derived polymorphism lacks residues 153 to 213
  VARIANT 135: note = Ancestral polymorphism is G, Derived polymorphism is D
  VARIANT 93: note = Ancestral polymorphism is S, Derived polymorphism is F
  VARIANT 88: note = Ancestral polymorphism is L, Derived polymorphism is V
  VARIANT 85..213: note = Derived polymorphism lacks residues 85 to 213
  VARIANT 82: note = Ancestral polymorphism is D, Derived polymorphism is E
  VARIANT 38: note = Ancestral polymorphism is H, Derived polymorphism is R
MSINSIAWEGQVYPKISAFQKAHDCLLPMGITSENVAHRYGVTRQEQDQAALDFSLSLSLSLLNRYLINQSNCVGNSSQVSEGAGVVVLMKRSMALKKGLPILGVFRSFAAVGVDPAIMGIGPVVAILAAVKSAGLEIGDIDLFELNEAFASQFVYCCNKLGLDRSKVNVNGGAIFLGHPLGAIGVRCVATLLNEMKRRGRDCKFGVVTMCIG

SEQ ID NO: 865 - protein, 137 aa, Zea mays
  VARIANT 29: note = Ancestral polymorphism is K, Derived polymorphism is E
  VARIANT 46: note = Ancestral polymorphism is G, Derived polymorphism is R
MSSFGLQVSALIDEKILCMHGGLSLELNKLEQILNLNRPTDVPDTGLLCDLLWSDPSNEATGWAINDRAESLRPDFFAGEEVERLAMTELIEVISEENKSGPLIVLLKDVEKSFIGVTESLSSLRSKFNRFHLVFLL

SEQ ID NO: 866 - protein, 333 aa, Zea mays
  VARIANT 48..333: note = Derived polymorphism lacks residues 48 to 333
MAASPVAIGTAVFQRGPLRVEARHVDYSQVPSVPKPLMVVAPTDAGVYPVAVFLHGCNTVNSWYESLLSHVASHGFIAVAPQLYCVTLNMNDLKDIDATRQVTAWLADKQQGLAHVLANILQLHGVRPDLSRLALAGHSRGGDTAFAVALGLGPAASDDDDNNADAGTSPAALPLKFSALIGVDPVAGLSKQAQVEPKVLTFRPRSLDPGMPALVVGTGLGPKHVGGPPCAPAGVNHAEFYDECAPPRYHVVLRDYGHMDMLDDDGVPYVINNCMCMRNTKDTKDLARRAIGGAVVAFLRATLEDDDEDLKVVLENRPGLSPAVLDPVGHDLA

SEQ ID NO: 867 - protein, 174 aa, Zea mays
  VARIANT 60: note = Ancestral polymorphism is E, Derived polymorphism is Q
MWGSTDGGTPEVTLETSMGAVSVEMYYRHAPKTCRNFVELARRGYYDNVIFHRIIKVSPEFPISISLCKVGILQEPAEVASPSMGEQAKFEDEIKTELKHTGAGILSMANAGPNTNGSQFFITLAPCQSLDGKHTIFGRVCRGMEIVKRLGSVQTDKNDRPIHEVKILRAVVKD

SEQ ID NO: 868 - protein, 83 aa, Zea mays
  VARIANT 50..83: note = Derived polymorphism lacks residues 50 to 83
  VARIANT 15: note = Ancestral polymorphism is R, Derived polymorphism is H
MAMRTALTSLPARLRAPAPPAATGGRRLLSDGKGRVLSEEERAKESIYIQKMERERQEKLKKRLEQEKADSDKAKPADADKVP

SEQ ID NO: 869 - protein, 241 aa, Zea mays
  VARIANT 62: note = Ancestral polymorphism is D, Derived polymorphism is N
MNSSKQALIYSFVAKGSVVLAEHTAFSGNFSTVAVQCLQKLPPNSTRSTYSCDGHTFNFLVNRGFVFLVVADEAAGRSVPFVFLERVREDFMQRYGSSIDEEGQHPLADDADEDDFLFEDRFSIAYNLDREFGPRLKDHMQYCVNHPEEINKLSKVKAHLSDVKGIMMDNIEKILDRGEKIELLVGKTETLQSQADSFHRHGRELRRKMWLQNLRFKLMVGGGIAALILIIWLMVCRGFKC

SEQ ID NO: 870 - protein, 190 aa, Zea mays
  VARIANT 126: note = Ancestral polymorphism is A, Derived polymorphism is V
  VARIANT 123: note = Ancestral polymorphism is A, Derived polymorphism is T
  VARIANT 119: note = Ancestral polymorphism is G, Derived polymorphism is C
  VARIANT 114: note = Ancestral polymorphism is P, Derived polymorphism is L
  VARIANT 108: note = Ancestral polymorphism is C, Derived polymorphism is W
  VARIANT 103..190: note = Derived polymorphism lacks residues 103 to 190
  VARIANT 96: note = Ancestral polymorphism is A, Derived polymorphism is T
  VARIANT 67: note = Ancestral polymorphism is V, Derived polymorphism is M
MGSASSPPSHRRWSWGSALAGAATTAAATALVLCRPRDPRFELISISLSAFHFRPPAALDIGLTLTVHATNPNVVPVRYGPSTVSILYGGAHLGTARLDAGEQPATSCRLLHLPARLDGVELAHRARALLSDVARRHMELDAAVEIAGEAAVLLWSRPFSVRIDSHITVDPVFLEVVEQENRSEMQLYLA

SEQ ID NO: 871 - protein, 55 aa, Zea mays
  VARIANT 16: note = Ancestral polymorphism is Q, Derived polymorphism is H
  VARIANT 32: note = Ancestral polymorphism is P, Derived polymorphism is L
MERQEAARRTLPRRGQIKLRIFASLFRCFITPEAPARKEGDKNRDGGGRRVSPGG

SEQ ID NO: 872 - protein, 140 aa, Zea mays
  VARIANT 84: note = Ancestral polymorphism is T, Derived polymorphism is I
MERSSPNRILAASQPYMDVLLGSGRFLARRPPLALVPRCSRGSPDKSGSDKGETSADWDKAWSAFKKKGKRTLFSDFSPDKYVIWNPRRSEYPLSEEVDPIKRSERSNLMLWTSPQFTLVGAIIIVLTLLIYTLVVPPPK

SEQ ID NO: 873 - protein, 216 aa, Zea mays
  VARIANT 105..216: note = Derived polymorphism lacks residues 105 to 216
  VARIANT 43..216: note = Derived polymorphism lacks residues 43 to 216
  VARIANT 34..216: note = Derived polymorphism lacks residues 34 to 216
  VARIANT 29: note = Ancestral polymorphism is E, Derived polymorphism is K
  VARIANT 14: note = Ancestral polymorphism is S, Derived polymorphism is F
MSKLQSESVKDAISQIVGDAKEKNRKFTETVELQIGLKNYDPQKDKRFSGSVKLPHIPRPKMKVCMLGDAQHVEEAEKMGLDYMDVEALKKMNKNKKLVKRLAKKYHAFLASEAIIKQIPRLLGPGLNKAGKFPTLVTHQESLESKVNETKATVKFQLKKVLCMGVAVGNLAMEEKQIQQNIQMSVNFLVSLLKKNWQNVRCLYVKSTMGKPYRVF

SEQ ID NO: 874 - protein, 216 aa, Zea mays; identical to SEQ ID NO: 873
  VARIANT 105..216: note = Derived polymorphism lacks residues 105 to 216
  VARIANT 43..216: note = Derived polymorphism lacks residues 43 to 216
  VARIANT 34..216: note = Derived polymorphism lacks residues 34 to 216
  VARIANT 29: note = Ancestral polymorphism is E, Derived polymorphism is K
  VARIANT 14: note = Ancestral polymorphism is S, Derived polymorphism is F

SEQ ID NO: 875 - protein, 356 aa, Zea mays
  VARIANT 266: note = Ancestral polymorphism is D, Derived polymorphism is V
MGQDGQQIRRDKLIIDTDPGIGPQSCFFLFFSPINFRSRACYNLTAQLLMLQDDSMTILMAFRAPSVEIIGLTTIFGNVDTKGATRNALLLCERAGCPEVPVAEGSHEPLKGGKPRVADFVHGSDGIGNLFLPAPSAKKVEESAADFLINKVSEFPGEVSVLALGPLTNVALAIKRDPSFASKVKKIVVLGGAFFAAGNVNPAAEANIHGDPEAADIVFTSGADIVVVGINITTQVCLTDEDLLELRNSKGKHAAFLYEMCKFYRDWHAKSDGFHGIFLHDPVSFTAVLHPEYFTFKKGVVRVETQGICTGHTLMDQGLKKWNSENPWSGYKPISVAWTVDVPKVISFIKKLLMAP

SEQ ID NO: 876 - protein, 530 aa, Zea mays
  VARIANT 387: note = Ancestral polymorphism is A, Derived polymorphism is V
  VARIANT 336: note = Ancestral polymorphism is L, Derived polymorphism is I
  VARIANT 327: note = Ancestral polymorphism is R, Derived polymorphism is S
MQKVPATTSSKLQTMVDSAMDAARIIGYFKDKTILVTGSTGFLGKILVEKILRVQPAVRRIYLLVRAADEPSAQQRVQQEVTGTELFSLLRDKYGEEGFDLFIRDKIVPLAGDITNQDLGLEPTTLDGMAKEMDVIVNVAATTNFYERYDVALDVNVMGVKQLCHLAKHCANLRMFMHVSTAYVSGDGSTEPILEKPIKPGEALRGGGTRVDVDGELRLVSDAKNDLTTTSTTGAAERKAMKELGLRRARHFGWSNTYVFTKAMGETVLEEQLRRDGDGDGDGGMPPPAVVVVMRPSIITSVRADPVPGWVQGTRTIDTLIVGYAKRSISAFLADIRLVMDVIPADMVVNAMLAAAVAHSGSGSGSGQDVVVYYQPTSSLRNPVTYAVLYRSGSRHFREHPRVRDDGEAIPNKEMRFFTTIPRFRLYMILSYKLPLEMLHMANLLLCGLFSKLYKDSNRKYKFVMHLVDVYGPFAFFKGCFDDTNMERLRSTMVMRSPEDDMFNYDPKTIDWDDYFYRIHIPGVLKYVCK

SEQ ID NO: 877 - protein, 147 aa, Zea mays
  VARIANT 89: note = Ancestral polymorphism is G, Derived polymorphism is D
  VARIANT 62: note = Ancestral polymorphism is Y, Derived polymorphism is C
MSAANQLAALVSNMYATGLLDDQFQQLQLLQDPSAPDFVSEVVTLFCQDGERIIEELAKLLCVWEKPNVDFDRVDAFVHQLKGSSANIGAQKVKNTCIQFREFCQQKSRDGCLKVLETMRINFYELRGKFQTMLQLERQVNGFPPNK

SEQ ID NO: 878 - protein, 316 aa, Zea mays
  VARIANT 156: note = Ancestral polymorphism is A, Derived polymorphism is V
  VARIANT 159: note = Ancestral polymorphism is E, Derived polymorphism is Q
  VARIANT 175: note = Ancestral polymorphism is A, Derived polymorphism is V
  VARIANT 216: note = Ancestral polymorphism is G, Derived polymorphism is A
  VARIANT 238: note = Ancestral polymorphism is W, Derived polymorphism is C
  VARIANT 258..316: note = Derived polymorphism lacks residues 258 to 316
  VARIANT 263..316: note = Derived polymorphism lacks residues 263 to 316
  VARIANT 285: note = Ancestral polymorphism is A, Derived polymorphism is T
MRELSCFGDGSVSVATADAAVSGRGALDRALQAATTSVYRAALSSGKEVLVRVTWTRSAAGEAGVAVAFDFDDDGGGGTSDAPKPSPARTRPPVLLLHKRRGSRSLVTGAGTAVGVHWDTAEAKYPSPSSPEPERDYCLAVVADAELALLLGAGGAARELSRRLGLAPSARAAPALLVSRREQLRCAAAAAAAHVTRCRFREGGDEHEVAVHACRGGEGELRVTIDGEKVTEVRRVGWGFRGNRAAVLPDGEVVDVMWDVHDWWFGGRGGGSAGSGAQFMVKARAEKEGRLWMADDTAATEQSPGGFFLHVQCYRR

SEQ ID NO: 879 - protein, 274 aa, Zea mays
  VARIANT 36: note = Ancestral polymorphism is T, Derived polymorphism is I
MPGAVALAPTFAAASSSAAAASTLAPNPTSRGDPLIIRLCRNAPASATPLVPLVATRRYVRGCRGAALVASPHHAPNPRLRFASAAEGMAAEASTAGAASAAEAKPFAVLFVCLGNICRSPAAEAVFRTLVSKRGLDSKFLIDSAGTIGYHEGNKADSRMRAASKKRGIEVTSISRPIKPSDFRDFDLILAMDRQNYEDILNSFERWRRKEPLPDSAPNKVKLMCSYCKQHTESEVPDPYYGGPQGFEKVLDLLEDACESLLDSIVANNASISG

SEQ ID NO: 880 - protein, 366 aa, Zea mays
  VARIANT 122: note = Ancestral polymorphism is S, Derived polymorphism is F
MPSHRPTHCLPEANLPQVHFVLQLSQESSILGMSRGMSRAFDDYYIEDCGVILAPEVTQRKTDNNNQFEFVILATVGVAFVPGSSPLFSFRGKHEESSAGLRALALLGVGASGLLSFATIASADEAEHGLAAPDYPWPHAGIMSSYDHASIRRGHQVYTQVCASCHSMSLISYRDLVGVAYTEEETKAMAAEIEVVDGPNDEGEMFTRPGKLSDRFPQPYANEQAARFANGGAYPPDLSLITKARHNGQNYVFALLTGYHDPPAGVQIREGLHYNPYFPGGAIAMPKMLNDGAVEYEDGTPATEAQMGKDVVSFLSWAAEPEMEERKLMGVKWIFLLSLALLQAAYYRRMRWSVLKSRKLVLDVVN

SEQ ID NO: 881 - protein, 223 aa, Zea mays
  VARIANT 74: note = Ancestral polymorphism is P, Derived polymorphism is L
  VARIANT 53: note = Ancestral polymorphism is D, Derived polymorphism is E
  VARIANT 51: note = Ancestral polymorphism is W, Derived polymorphism is S
  VARIANT 48: note = Ancestral polymorphism is Q, Derived polymorphism is L
  VARIANT 40: note = Ancestral polymorphism is G, Derived polymorphism is S
  VARIANT 35: note = Ancestral polymorphism is S, Derived polymorphism is C
  VARIANT 33: note = Ancestral polymorphism is D, Derived polymorphism is H
  VARIANT 17: note = Ancestral polymorphism is R, Derived polymorphism is S
MLGEQVAGPSGQMTWIRGGPTSLDSQNIAEAIDGCLRRLGVDYIDLYQIHWPDRYVPMFGETEYDPNCQYTSVPMEEQLEALGRAIDAGKVMLSRISLLAYSPMAMGILSGKYHLSDNCGPPDARMNLFKGRYSEGESRYKLQSPKVKAAVKEYTQISAKYGISPVTLAIAFVLRHPLVASAVFGATKLWQLDEVLQATTVHLCEEIVAEINDVHARYPNPCP

SEQ ID NO: 882 - protein, 804 aa, Zea mays
  VARIANT 340..804: note = Derived polymorphism lacks residues 340 to 804
MDGSGSWDAIDWNQIEDPRPRRSGQAVKESMDDFLLEDEEVLAQGHGVVLLNNRDAGTLSVTNFRLLFVSQAKKCVIELGTIPLTTIEKLNDDVKLQPLPHLSDKNHPRELLQVIGKDMRIIVFAFIPRTQQKNEVFDALRRYTKPANLWDLYAFSCDPSTIKHDSEPKWRLLREYFRLFRRSLPLQGVEEVSLCNEWWRLTRVNSSYSLCSTYPSELIVPRSISDEDLFQASPFRSGKRLPVISWCDPGSGAVLARSSQPMVGLMMNFRNNADEKLVCALSSRTIDEKGSPRKLYIIDARPRANAIANGAKGGGSESSSNYHKSEVLFLGIQNIHTMRESLSRLRDYVDAHGSISSNGSPSAVSVVGDRRNRGSTWGGGNLNSMTSFSSTLGEWLNHIQNILVGASWIAAQISEEAASVLVHCSDGWDRTTQLALVEKDWLAFGHPFAERMGVPTVAENGGSQYELLRQPSLGNLSSSPSRNTLGPPGPSSNSPVQSQTSNNTSPILLQWLDCISQLLRLYPSAFQFSSKFLVDFMDCVLSCRFGNFLCNSEREREQSGVTISCRCMWSHLANLRASGGSFHEHYNPFYDPVNHNGALLPPAAALAPTLWPQFFLRWTCPIESQGGDLESQWHAMNKKYADTMKAKDIAEWRAKDIKLKLESMKQDLQREKRINSTALAAARSAQRENAAIKKAIESIGCTIKFSTSENEDRTEVLSCSLGRGTDGRAQQDENGDFSVAIEDSLVSDAPADHFCESLCPFRTREGCRWPDAPCAQLGSQFVGLKANFDAFDRLSIHDCYFGPE

SEQ ID NO: 883 - protein, 682 aa, Zea mays
  VARIANT 212..682: note = Derived polymorphism lacks residues 212 to 682
MARKHGWQLPAHTLQIIAVTVFFLLVIAFYAFFAMFLGKQVLEYVVIGVYTAVVFSVAMLYIRCTSINPADPGIMSKFDNVLIDAPGSAANIQGTDLPVKAGIGAGTISPSATSTCRNSVDGHSNAGALAAGDTNLDLRSQPPTSPWSCLLGGLVCFLFVKEDCRKYDDSENQVDGEGALFCTLCDAEVRKFSKHCRSCDKCVDGFDHHCRWLNNCVGRKNYFTFLALMATSLLWLAIEIGVGIGVLVICFANKNSERIIQDRLGNGLPRPAFATIVAFFTLLSLVACIPLGELFFFHMILIRKGITTYEYVVAMRAMSETPQEEEEHEEEEGVNIVYSPTNSATTAFSGASSLSLHYKGSWCTPPRIFVDQDEVIPHLEPGMVPSTIDPDAVGRAERANKAKKQVKISAWKLAKLDSNEAMKAAAKVRASSSVLRPIDSRRVPGASPGSSGNASMRSSMSAGYSASGTKERGAGMLQSPSYPQSPASQDDYESGTQSGSSRTSPVHIHRPAAPHAQINVPLPPRVPQAPPRPAPALAPRPPVPATQMSKPTFQSATSYVRENRKVSVVWDQEAARYVSVAPAPTRPVTGNHGRTLASMNPSSSALPSGQPSERLAYTGQSIFFGGPLLGAAAADPRRNEAVAGVPPETRRNDGTGGERRRTAESFPVFAPGSLEKNPPSNR

SEQ ID NO: 884 - protein, 135 aa, Zea mays
  VARIANT 4: note = Ancestral polymorphism is D, Derived polymorphism is H
MAEDSAAAATWGGGDKLILRGLQFHGFHGVLREEKTLGQKFVVDIDAWMDLAAAGESDCIADTVSYTDIYSIAKDVVEGTPRNLLESVAHSIAEATLLKFPQVSAVRVKVGKPHVAVRGVLDYLGVEITRQRKKE

SEQ ID NO: 885 - protein, 247 aa, Zea mays
  VARIANT 151: note = Ancestral polymorphism is E, Derived polymorphism is G
  VARIANT 142: note = Ancestral polymorphism is P, Derived polymorphism is L
  VARIANT 91: note = Ancestral polymorphism is P, Derived polymorphism is L
  VARIANT 45: note = Ancestral polymorphism is D, Derived polymorphism is N
  VARIANT 33: note = Ancestral polymorphism is S, Derived polymorphism is N
  VARIANT 22..247: note = Derived polymorphism lacks residues 22 to 247
MTMNAIIALSSLLLETELTPEQRLMVETVLKSSNLLATLINDVLDLSKLEDGSLELEIKAFNLHTVFKEVMGFIKPIASIKRISVSVMLAPDLPLCAIGDEKRLMQTILNISGNAVKFTKEGHITLVASIMKADSLREFRTPEFHPTASDEHFYLKVQVKDTGCGVSPQDLPHVFTKFAHPQSGGNRGVNGSGLGLAICKRFVSLMGGHIWIDNEGTGRGCTATFVIKLGVCDNTNTYQQQLIMKCI

SEQ ID NO: 886 - protein, 388 aa, Zea mays
  VARIANT 27..388: note = Derived polymorphism lacks residues 27 to 388
  VARIANT 42..388: note = Derived polymorphism lacks residues 42 to 388
  VARIANT 141..388: note = Derived polymorphism lacks residues 141 to 388
  VARIANT 165..388: note = Derived polymorphism lacks residues 165 to 388
  VARIANT 211..388: note = Derived polymorphism lacks residues 211 to 388
MTEGQSESASAPEGVSGLRRNSDDMGWEYGVLVGINNKDKVKCILCDKQMCGGVYRLKQHIAQEGKNAKKCQGMKTTKEKLLEAQEKCKKALDEAKRKREEKIVRELELREEVHVSRVGGSEEVTCVGSSEPHKLGPMDKWTKAIDPTATKSESLTQQRLNKELWKERLHEFKQMCEAIGQFGPGIEPPTMFDLRGRLLEEEYARTKSLLQEREAEKMKNGCSIKIDACIQEKKDQLRKMVVHSRSDSLKDVKSKKGKNATATILNPTFWKDVKLTLAVFAPLFKVLRLVDGDVKPSMGFVYGELLKAKRHVHTKKRNRLTTDRLNKVVYIQFNNKLINKRAKIKSKKITDVLLPNARKDGENRYVTRKVGMSVGNLDLMEVVGRHAG

SEQ ID NO: 887 - protein, 328 aa, Zea mays
  VARIANT 285..328: note = Derived polymorphism lacks residues 285 to 328
  VARIANT 79: note = Ancestral polymorphism is Y, Derived polymorphism is C
  VARIANT 74..328: note = Derived polymorphism lacks residues 74 to 328
  VARIANT 66..328: note = Derived polymorphism lacks residues 66 to 328
  VARIANT 34: note = Ancestral polymorphism is V, Derived polymorphism is G
  VARIANT 3..328: note = Derived polymorphism lacks residues 3 to 328
MCQVDDCRADLTSAKDYHRRHKVCETHSKTTKAVIANQAQRFCQQCSRKLSPDGTVMAWKVDSGKGEGLATKYRWFMIYVHAKGMIVDDEYVILGSANINQRSLAGSRDTEIAMGAYQPHYAWSTKNGHPDGQAHKMEMMYTIIADEFKSMDNKDMRPEDYLNFFCLGNREEPPSNGSPESEKSTDKSAAVFSAFGYVHKIATFEKAVGFQALIQYTDAATASAARESLDGRSIPSYLLPEHVTSCCLRISFSAHKDLNIKFQSNRSSMPEYLQDSDIVMNRFHKQRHVYGGWEQHLGLEHTATTPKRSYLGNNQNRHSFEKPVRIYN

SEQ ID NO: 888 - protein, 142 aa, Zea mays
  VARIANT 1: note = Ancestral polymorphism is M, Derived polymorphism is I
  VARIANT 5: note = Ancestral polymorphism is G, Derived polymorphism is E
  VARIANT 21: note = Ancestral polymorphism is P, Derived polymorphism is L
  VARIANT 27..142: note = Derived polymorphism lacks residues 27 to 142
  VARIANT 36: note = Ancestral polymorphism is R, Derived polymorphism is Q
  VARIANT 112..142: note = Derived polymorphism lacks residues 112 to 142
  VARIANT 118..142: note = Derived polymorphism lacks residues 118 to 142
MGLLEYIFSRSTISLVLGIAPGLATLLLGTLSLKFRRSGRSSFLLMLAQASRMNIIILSFVLPTISAFLAWKYSHAYFLTNRLLPWGFYASLRSFSLYRPSPSKAFSPFGQRSDGLSCLKIMQHCNGLFLRLCATCGTKSRK

SEQ ID NO: 889 - protein, 638 aa, Zea mays
  VARIANT 499..638: note = Derived polymorphism lacks residues 499 to 638
  VARIANT 214..638: note = Derived polymorphism lacks residues 214 to 638
  VARIANT 175: note = Ancestral polymorphism is R, Derived polymorphism is W
  VARIANT 167: note = Ancestral polymorphism is R, Derived polymorphism is I
MGDTLIRPSGRKPHAQVEIKNGIFDLTLSNPDGIVTGVRYNGVDNLMEILNKEDNRGYWDLVWNPPGQKTGIFDVIKGTEFRIVYQDENQAEVSFTRNWDPSLEGKAVPLNIDKRFIVLRGSSGFYTYGIYEHKEGWPDFGLGETRVAFKLRKDMFHYMALADDRQRIMPMPDDRLPPRGQPLAYPEAVLLVDPINPELRGEVDDKYQYSCEDQYNNVHGWMSFDPPIGFWQITPSDEFRTGGPLKQNLTSHVGPTMLAMFLSAHYAGDDLSPKFTNGEYWKKVHGPVFMYLNSSWDASDPTMLWEDAKVQMMIEKGNWPYCFALSEDFQKTEQRGCVSGRLLVRDRYIDDQDLYASGAYVGLALPGEAGSWQRECKGYQFWCRADVDGSFYIRNIVTGNYNLYAWVPGFLGDYKLDATVTIASGDDIYLGDLVYEPPRDGPTMWEIGVPDRSAAEFYVPDPNPNYVNRLYVNHPADRFRQYGLWERYAELYPDSDLVYTVGQSDYSTDWFYAQVNRKIDDNTYQPTTWQIKFDLDSVSPSSTYKFRVALASSALAELQISFNDQDRAVPHFATGLIGRDNAIARHGIHGLYWLFNIDVASAWLVQGVNTIYLKQPRSQSPFQGLMYDYLRLEGPCGC

SEQ ID NO: 890 - protein, 51 aa, Zea mays
  VARIANT 15: note = Ancestral polymorphism is P, Derived polymorphism is S
MEKLRSLCACCMGPPRPASPACATAGVTVKVSDRYVSSPHLRPAFSSLRGV

SEQ ID NO: 891 - protein, 134 aa, Zea mays
  VARIANT 46: note = Ancestral polymorphism is A, Derived polymorphism is V
  VARIANT 70: note = Ancestral polymorphism is S, Derived polymorphism is I
MAEKEAAATWGGDDKLILRGLQFHGFHGVLQEEKTLGQKFVVDIDAWIDLAAAGESDCIADTVSYTDIYSIAKDVVEGTPRNLLESVAHSIAEATLLKFPQISAVRVKVGKPHVAVRGVLDYLGVEITRHRKKE

SEQ ID NO: 892 - protein, 367 aa, Zea mays
  VARIANT 24: note = Ancestral polymorphism is R, Derived polymorphism is C
MPVAPRPQDHSRPVIHSLLHVTIRFVILCYYAARCIADIRADAGSTTFLAGTLSLKEENEVHLIRFSPAESELVCDGLFYHPNEIWDLKSCPFDHRVFSTVYTSGEGYGASVWKIPELNGQSNSPQLEQLFELSGHTGKIRRVIWWPLGKHDKLISIDDRNIFLWNIDTSKKIAKVISQGSTDMLPNLRGGAWDPHNHNLVAAISDSSLQLWDLRSMEKSTAIEHAHIRDVDYNPKKQNIVATAEEEFGIRLWDLRMLKYPLKDLPGHSHWTWAVRHNPAYDELLLSAGTDSTVNLWLAKVSSDDPESDSPSALSNRQEVPLLNSYTDYEDSIYGIAWSSHDPSLFASLSYDGRVVLESVKPYLQRK

SEQ ID NO: 893 - protein, 238 aa, Zea mays
  VARIANT 51: note = Ancestral polymorphism is D, Derived polymorphism is N
MASHLRSISLPSRLHSSEAVVQQELCILEAVISSPSTCIVTMCESLRRLGDIYSNVEEMTHLPSNQVCSSQQRKMLDAEIESSLELLDLCNTMQEIFVELKAIIQDLQVALRKGDDATVQAKIQSYSRLVKKAKQSFKKACKKVTPASTDCAIIRLLTKAREITISLLESTLQLLSKQIEMPKQSLVSKAFSKRKAAVCEEDQLQVLESSIGDLESGAGHLFRILVQSRVSLLNILSS

SEQ ID NO: 894 - protein, 137 aa, Zea mays
  VARIANT 44: note = Ancestral polymorphism is A, Derived polymorphism is V
  VARIANT 65: note = Ancestral polymorphism is R, Derived polymorphism is C
  VARIANT 66: note = Ancestral polymorphism is K, Derived polymorphism is E
  VARIANT 67: note = Ancestral polymorphism is A, Derived polymorphism is P
  VARIANT 77: note = Ancestral polymorphism is L, Derived polymorphism is Q
  VARIANT 89: note = Ancestral polymorphism is E, Derived polymorphism is K
MARGSKCCIIKSGRSMSSLRSGMYLQRGRDKVVPLDQAHKIYNALKEKVLPIALVEYEGEQHGFREAENIKFTLEQQMVFFARLFGKFELCNSVVFVHDPKVLHRELKLHILLKDHKTMVLKFADLSLSHAIRFMEI

SEQ ID NO: 895 - protein, 277 aa, Zea mays
  VARIANT 191: note = Ancestral polymorphism is K, Derived polymorphism is N
  VARIANT 147: note = Ancestral polymorphism is G, Derived polymorphism is D
MAFHQRSVSLPSKSLTKEAEVEAELQSLEDAASPPSSSSSSSTVAAVRDGLTRLGDVYGHIEEIVHLPSNQACTVQQQRKELDAEMERSLDLIDLCNATQESLAELKAAVQDLLAGLRRRDDASVQAKVQSYVRLAKNARKQLRKAGRRAAAASGREERECSLVIRLLLRARLVAASLLGSALQCLAGVAKQVVTLTPRRSLVSKALQRRSKAVVCEEGQPARCWRWSASSLESLSVERSFCSGGWSRPESPSSTSLARRSSSSSCVARVLRLASAF

SEQ ID NO: 896 - protein, 234 aa, Zea mays
  VARIANT 170: note = Ancestral polymorphism is V, Derived polymorphism is A
MDRMLTAMAKERCSILPEVILIVISGQPTQPSLLVVVDLNSFIVGDGHRPTSDSESWFLNGVSRSTRARREEGTTGPANRFLHGFESGAPELGERRGRPELGVRGRATQESFIELRMAVQELLLLLPARRGDGAVAQLRAYFQITKKAHRQFKKVCCCRKSTSGEKGCRAVELLAEARSVAASVLQRTSCVPPVEAARRDAQTTVACLQNVPEGTSSSVRRGAIAGIGVRYQRS

SEQ ID NO: 897 - protein, 256 aa, Zea mays
  VARIANT 2: note = Ancestral polymorphism is E, Derived polymorphism is D
MEQQLRALRQHVLAAPSSSSPAAMAGDLEYVARVYDEHAESLAQSAARAGQVEDELEASVALLDACAAARDALGGMRARAVAAETAARRGDSAAAASAARAYARLAKRACADARRQRRRAGSRLSEKLDGGHALQEARRLTVAVLERVVVAMSRRVPAVGGAARRSSAASIWSARVATAFRKSARVACEDAAAAGDVMTAASLSSKDYSHDGEAALSAQRDLRALVDTTRQLEDGLELLFRRLVQSRVCLLNTRSF

SEQ ID NO: 898 - protein, 277 aa, Zea mays
  VARIANT 173..277: note = Derived polymorphism lacks residues 173 to 277
  VARIANT 145..277: note = Derived polymorphism lacks residues 145 to 277
MSSSSHRLTPLALWPGRCSLPLRLSLRPPSQNHRAPPHSTGCVGGRRKEGEGRRLSGEMSDSQAQITVRRRASVLLAASVRPSASLLPASREPLVTNIMWRNLFVQALYQVAILLIFDFDGVRILRLQNESRSDAEKIFNEFNARKPEEKNVFKGVTKNHLFMGIIGITTVFQILIIQFLGKFFKIVRLGWRLWLVSVAIGLDEVLYTIVPASETGGPSGAAKAEGRGTGERELGSQVKVPDRTKPAREGEAGEGAHVAVHGRQHQGPRQKGLKLEE

SEQ ID NO: 899 - protein, 126 aa, Zea mays
  VARIANT 74..126: note = Derived polymorphism lacks residues 74 to 126
MIIKTLKAPILRALKPSSLPAAGDGARSPTKPAHQCHDGDVLSNDASFFDAREPLDAWELVDDGARRRPATRYWGSPPSGGGRANIGTHDDNEGCDGFVSVSHIRLHVKHAPDLPDEQQDFGILIG

SEQ ID NO: 900 - protein, 257 aa, Zea mays
  VARIANT 175: note = Ancestral polymorphism is P, Derived polymorphism is L
  VARIANT 231: note = Ancestral polymorphism is C, Derived polymorphism is R
MDMEAAAVSGTGTASASSSPAPSSGSRGGRSVCRLPARVAGAVVRGLLTFVFAAVGMVLGAVTGALIGLATESGLVRGAGVGAISGAVVSMEVVDSSVAIWRSDESGIWSVLYVLDVLWSLVTGRLVREKVDPAVQSAVDSQMNAADSQDTAPTLADMFETAAAGMPAAAIAALPVTAVTESTVTDASGEPIGCPICLQDLMDILDPVGRSTIWFLQDFEAGETARRLPECGHTFHLPCIDVWLLRHASCPLCRRAV

SEQ ID NO: 901 - protein, 134 aa, Zea mays
  VARIANT 72..134: note = Derived polymorphism lacks residues 72 to 134
  VARIANT 54: note = Ancestral polymorphism is R, Derived polymorphism is I
  VARIANT 4..134: note = Derived polymorphism lacks residues 4 to 134
MSFRSAAREEPSFPQFSAFDGTKNTAPRMLTHQRSFGPDSTQYAALHRAQNGARVVPVSSPFSQSNPMFRVQSSPSLPNSTAFKQPPFAISNAVASSTVGSYGGTRDAVRPRTAQLTIFYSGSVNVFNNVSAEK

SEQ ID NO: 902 - protein, 522 aa, Zea mays
  VARIANT 42: note = Ancestral polymorphism is P, Derived polymorphism is S
  VARIANT 450..522: note = Derived polymorphism lacks residues 450 to 522
MPEDVQMNDSEPQSAAPAPAAAAAPALSTLHRKLPHSFLPLSQTLEFSIYHLCVAEAALMSDLKEIASVIEAGSLSKEVRRISRAFRLTVALRRRLAARDVSAFLAFALPASSEAYGRLIALVPKEDDTEMDVDAVAPATQISIKHGLPEIEIYCYLLALIFLIDQKKYDEAKVCASVSIARLKNLNRRTVDVLASRLYFYYSYVYELTNSLAEIRGNLLALHRMATLHRDELGQETLLNLLLRNYLHYNLYDQAEKLRSKAPRFEAHSNQQFCRYLFYLGKIRTIQLEYTDAKESLLQAARKAPTTARGFRIQCNKWAIIVRLLLGEIPERTVFMQKGMKKALTPYFELTNAVRVGDLELFRTVADKFASTFSADRTRNLIVRLRHNVIRTGLRNISISYSRISLADIAKKLRLDSENPVADAESIVAKAIRDGAIDATIDHANGWMVSKETGDVYSTNEPQIAFNSRIAFCLNMHNEAVKAMRFPPNSHKEKESAEKRRERLQQEEELAKHMAEEEDDDF

SEQ ID NO: 903 - protein, 145 aa, Zea mays
  VARIANT 84: note = Ancestral polymorphism is G, Derived polymorphism is V
  VARIANT 23: note = Ancestral polymorphism is V, Derived polymorphism is A
MAKLTAVVVLLMVLAAATAGAVVTNADGATATVPGRRHHQQTRRSSRFLLANSSPPSPYYACSKKSAAAVCFAPGSPGATCCGGRCVDTAASADHCGGCSKVCKHDRSTCCGGRCVDLLSDKGNCGACGNLCDKRCSNGFCDYAL

SEQ ID NO: 904 - protein, 140 aa, Zea mays
  VARIANT 84: note = Ancestral polymorphism is A, Derived polymorphism is V
  VARIANT 82: note = Ancestral polymorphism is R, Derived polymorphism is W
  VARIANT 44: note = Ancestral polymorphism is L, Derived polymorphism is P
  VARIANT 25..140: note = Derived polymorphism lacks residues 25 to 140
MEVVATTKPPPASVSSSMQSFASASGPAGGGEFTADDLAAADQLVQLSVSGGGDEVDHCCSSSARSVNNAENEEDAGGPVDRRARKRCRLVWELYAATSKQVKAAGAGGRKRKGRDGRSDRADTNAAAVLKFGAEFLSTA

SEQ ID NO: 905 - protein, 250 aa, Zea mays
  VARIANT 159..250: note = Derived polymorphism lacks residues 159 to 250
  VARIANT 177..250: note = Derived polymorphism lacks residues 177 to 250
MPIPACPPPPRNLSVDCPPPTSSAHAPRPPRLLSTNAPRPPRKPPRKPRERQPYLVSEFRDLVDAERWRSEIFREIGAKVAEIQNEGLVVTSYQEAQEGASHYALLVTTSLLSVLLFTFDLLCGVLGGASFNPTDFVVSYAAGLDSPSLFSIALRFSAQAVGVVGDALAISELMQAQYKHTLAGPSLKVDPHTGALAEGMLTFVITLTMLWVIIKGPSNIILKALLLSTSIVSVILAGAEYKGPSMNPAN

SEQ ID NO: 906 - protein, 254 aa, Zea mays
  VARIANT 15: note = Ancestral polymorphism is G, Derived polymorphism is V
MGRSPCCEKAHTNRGAWTKEEDERLVAYIRAHGEGCWRSLPKAAGLLRCGKSCRLRWINYLRPDLKRGNFTADEDDLIVKLHSLLGNKWSLIAARLPGRTDNEIKNYWNTHVRRKLLGRGIDPVTHRPIAADAVTVTTVSFQPSPSAAAAAAAEAEATAAKAPRCPDLNLDLCISPPCQQQEEEEEVDLKPSAAVVKREVLLGGRGHGHGGALCFGCSLGVQKGAPGCSCSSSNGHRCLGLRGGMLDFRGLKMK

SEQ ID NO: 907 - protein, 198 aa, Zea mays
  VARIANT 144: note = Ancestral polymorphism is G, Derived polymorphism is E
  VARIANT 121: note = Ancestral polymorphism is P, Derived polymorphism is L
  VARIANT 105: note = Ancestral polymorphism is G, Derived polymorphism is R
  VARIANT 43..198: note = Derived polymorphism lacks residues 43 to 198
  VARIANT 42..198: note = Derived polymorphism lacks residues 42 to 198
  VARIANT 38: note = Ancestral polymorphism is S, Derived polymorphism is L
  VARIANT 34..198: note = Derived polymorphism lacks residues 34 to 198
  VARIANT 28..198: note = Derived polymorphism lacks residues 28 to 198
  VARIANT 23: note = Ancestral polymorphism is A, Derived polymorphism is P
  VARIANT 15: note = Ancestral polymorphism is A, Derived polymorphism is V
  VARIANT 2: note = Ancestral polymorphism is T, Derived polymorphism is A
MTSRFGRATRQLGGAASVARVYADANAQRPKEYWDYESLDIQWGKQDGYEVLRKVGRGKYSEVFEGFWARSDERCVIKILKPVNKKKKINFAFTMLCCGGCHISRNQRYGWNHKSDTRGLPCRATLDYTNIKREIKILYNLYGGPNIVKLLDIVRDDESKTPSLIFEHVNNTDFKVLYPALSDYDIRYYIFELLKARI

SEQ ID NO: 908 - protein, 258 aa, Zea mays
  VARIANT 15..258: note = Derived polymorphism lacks residues 15 to 258
  VARIANT 42: note = Ancestral polymorphism is A, Derived polymorphism is T
MQVKYVFLDGVPPHWDEDKVREIFGKFGEIDIIQLARNMFTAARKDFGFIGFTARQSTLDCIKMVNKDGVGEGSGKVPIKSSLQRPRHAFKKHSRQGSSSLLGVRRGFVDKSSSGRGHHSDRYRHFSPVRRSYSDNHSRPPSYKYGRMHLETRISEEYAEGRYTSKYPKHRYAMHGTMERDAYRRIKYGHSYQERAHRTCPDCKLCGQNYNYPNGEEFSAISGCQEAYYQTDRDLIPSTSQVASHCEGSCCKVGINKH

SEQ ID NO: 909 - protein, 319 aa, Zea mays
  VARIANT 308..319: note = Derived polymorphism lacks residues 308 to 319
  VARIANT 209..319: note = Derived polymorphism lacks residues 209 to 319
  VARIANT 147..319: note = Derived polymorphism lacks residues 147 to 319
  VARIANT 119: note = Ancestral polymorphism is A, Derived polymorphism is D
  VARIANT 78: note = Ancestral polymorphism is R, Derived polymorphism is C
  VARIANT 72: note = Ancestral polymorphism is P, Derived polymorphism is L
  VARIANT 71: note = Ancestral polymorphism is A, Derived polymorphism is V
  VARIANT 57: note = Ancestral polymorphism is T, Derived polymorphism is M
  VARIANT 40: note = Ancestral polymorphism is T, Derived polymorphism is M
  VARIANT 37..319: note = Derived polymorphism lacks residues 37 to 319
  VARIANT 30: note = Ancestral polymorphism is T, Derived polymorphism is M
  VARIANT 28: note = Ancestral polymorphism is G, Derived polymorphism is S
MASRAHLPGSPASIAVLILSFFQGSVCGITFTFTNRCGDTVWPGLLSGSGTPPLETTGFALAPGQSRSLYAPQGWSGRFWGRSGCAFDASGKGSCATGDCGSGEVECRGAGASPPATLAEFTLDGDGGKDFYDVSLVDGYNLPMLVQPAAAGCPDTGCLVDLNERCPDELRADGGRACRSACEAFGSPEYCCNGAYGNPNTCHPSQYSQLFKSACPKSYSYAYDDATSTFTCNHTDYTITFCPESTPSSDRSKHSSRRPSHEQLEDSVWLASLKASGASSMKITSWWSAPTVFRSGLAIAVATLLGAQIAPDHPVVGLL

SEQ ID NO: 910 - protein, 576 aa, Zea mays
  VARIANT 379..576: note = Derived polymorphism lacks residues 379 to 576
MRRGGGRRFPKPSLAPSTAAEATPALDASVIRNLDSAFSRRDSDANSLCSSRPASTVGAILNFSDRATQVAALRVVNTFLAPAVTLRGPLPAARDIQAALRLLVDRLHLPRNDATFDDDLIQDLRLLGCPYKVTRSALKAPGTPHSWPVLLSVLHWLTLLCHSQGDDPDAPSGPSDDLLLYITQSYSHFLSGDDAAVETVDEEYASKARMTGEAYVATARALEKEAEELETQVNKLISGPSRREALESEKEAFNADIHKFDAVVNAWKTKFNEREQSFGDLEKELEAKVSDTQRAAAEIQDLLKQVDAQPVNVKDVDRMRREMQAIEDDIANAEKGKTALEDKVWELEAKLVTKLEELERHAEQCNQALKKLKPTVAFQYMIDSKGSSPAEMLGTGYKTVLKPALLAHAEENKRICLSNLENLNDLQKQLQGNAKVLEEERNNISSLQEKNDEIVARLNLLDREIINDDSRFTSEAAQMKDELEKKKNSLISAEKQADDFLKKSEKRLQDVTLKVEEETQAAAKELLELLDSMAEHKEFMETTIAQRRKDLYETADYIASVASKTVITQVPNPAES

SEQ ID NO: 911 - protein, 138 aa, Zea mays
  VARIANT 76: note = Ancestral polymorphism is P, Derived polymorphism is H
  VARIANT 61: note = Ancestral polymorphism is A, Derived polymorphism is V
MISAPLRVPAPKAAAGGSFLLGASSVESNPNPKPSRIRCAAATLYEVLGLRAGATGREIKAAYRRLARERHPDVAHAPGAAAEFARLHDAYATLSDPDSRARYDGGGAAPAAAVARRPWSGAVYGRPRRRTWETDQCW

SEQ ID NO: 912 - protein, 200 aa, Zea mays
  VARIANT 112..200: note = Derived polymorphism lacks residues 112 to 200
MGRQPCCDKEGVKRGPWTAEEDKKLISFILTHGRCCWRAVPKLAGLLRCGKSCRLRWTNYLRPDLKRGLLSTAEEQLVIDLHAKLGNSDTREELSLKDDNHHREVPLSTDSSEQSSWPEPGSNVGDQDPELLVNWPSETDLSVDESWLGFMSNGNELGDVEGTSPWDGTTDWLLDYQDFGMCSSNLVDDSMFRASNGLNF

SEQ ID NO: 913 - protein, 260 aa, Zea mays
  VARIANT 225: note = Ancestral polymorphism is R, Derived polymorphism is S
  VARIANT 218: note = Ancestral polymorphism is H, Derived polymorphism is Y
  VARIANT 140..260: note = Ancestral polymorphism lacks residues 140 to 260
  VARIANT 119..260: note = Derived polymorphism lacks residues 119 to 260
  VARIANT 101: note = Ancestral polymorphism is I, Derived polymorphism is N
  VARIANT 66..260: note = Derived polymorphism lacks residues 66 to 260
MEPASAFLERTRACCTAPVISRPPAGFISSLHLRRYNSPAQIDSSTTPVARLPSPWVSSQTGLLKQFNPHICSFSSVLVSLISVVSGYSLFICVIFSLDKIGKESLKVRDHIYSWKAAWVYAHHGDFFELKMFLALRFSYLLGAWIDYLDITPAPFGEHIYEPFCLCIKSAWLICFSSSSSWKRLLALIQQWEVSWDDTLDPAVSYKIGQVVDAKVIHLDYNNSRIFLSLKDVKVMVETTLGKEELKEAVLMCTSTNRVS

SEQ ID NO: 914 - protein, 138 aa, Zea mays
  VARIANT 24: note = Ancestral polymorphism is G, Derived polymorphism is A
MAEIDATPLESMRAPVDLFDRGSGRPRRRQGVGRHRAARGGGYGDEGRPGVEREGTKDVLARILLLNETVLSSAVAAIRAEEERSVFFQEATLQFFDSDRNLEVARRQMEVMEGMEAELLAKSVEVEYLRAELKQAEM

SEQ ID NO: 915 - protein, 329 aa, Zea mays
  VARIANT 27: note = Ancestral polymorphism is V, Derived polymorphism is I
  VARIANT 28: note = Ancestral polymorphism is V, Derived polymorphism is G
  VARIANT 54: note = Ancestral polymorphism is S, Derived polymorphism is F
MGDVAAGAAALSPPPMTKETNLFMQIVVNPDGTVTRPEVPLVPASAVAAGGVVSRDVPLDASAGTYLRLYLPDLSSAPAAKLPVVLYFHGGGFVILSAATVFYHGHCEAMAAAVPAIVASLEYRLAPEHRLPAAYEDAAAAVAWLRDGAPGDPWVAAHGDLSRCFLMGSSSGGNMAFFAALRTGGLDLGPATVRGLLLHQPYLGGVDRTPSEARSVDDAMLPLEANDRLWSLALPLGADRDHEFCNPVKAMAPEALAGLPRCLVTGNLGDPLIDRQREFARWLQDRGGAKAEVVVKLDVAGFHASELFVPEIAEVLFAAMREFVYTGDA

SEQ ID NO: 916 - protein, 557 aa, Zea mays
  VARIANT 69: note = Ancestral polymorphism is R, Derived polymorphism is G
  VARIANT 152: note = Ancestral polymorphism is G, Derived polymorphism is W
  VARIANT 433: note = Ancestral polymorphism is L, Derived polymorphism is H
MAAPPTEDCGWLLYLSLAAKCGDPSRLLGLAAVFVGACVVTSLLHWACPGGPAWGRYWWTRRGGLGIVRAAIPGPRGLPVVGSMGLMTGLAHRKLAAAAAAAGGQGSSRRRRLMALSLGETRAVVTGDPDVARELLGSAAFADRPVKESAYGLLFHRAIGFAPHGAYWRALRRVASAHLFSPRQVAASSAQRAVIARQMVDAVTTAAPAPAPAVVVARRFLKRASLHNVMWSVFGRRYDLLLLAADGEELKALVDEGYDLLGQLNWSDHLPWLARFDLQRTRARCSALVPRVNRFVGNIIDEHRARLGLGDTGGVTDFTDVLLSLQGVDKLSDADMVAVLWEMIFRGTDTVAVLMEWVLARLVLHQDVQSKVQEELDRVVGPPGQAASVTESDTASLVYLQAVIKEVLRLHPPGPLLSWARLATSDARVGGYHVPAGTTAMVNMWAITHDPSVWAEPTEFRPERFVGASAGAGAGAGAEDVPMIMGSDLRLAPFGSGRRSCPGKSLALATVGFWVATLLHEFKWLPPCRGVDLSEVLRLSCEMAAPLEARVVPRHAV

SEQ ID NO: 917 - protein, 630 aa, Zea mays
  VARIANT 86..630: note = Derived polymorphism lacks residues 86 to 630
  VARIANT 80..630: note = Derived polymorphism lacks residues 80 to 630
  VARIANT 11..630: note = Derived polymorphism lacks residues 11 to 630
MRGGAMKALRRSSTSSAPSPRVPSSPRSYSWIHRRSLLVTSPASPATSSVSESANLPAEGSDSAPASVVAASSSPSLAASSPNMEWWGYPVRISPRAAWVASKWGIIVGYLIFPNNDSRTYSQNYAVLLTSTYYFFSSTFHSRGGIKSPWSRRKRKRALTCQHWNRLFSANGKLRDGGRKFLKKVRSGGIEPGIRAEVWPFLLGVYDLNSSEEDRNTIKIKKRKEYEKLRRQCHRILHCNRENGLNVINEFMNEDFSDGAEGSESPYSNGVSKRVCVMPKELKSLGSKAEESESSNWDAVKCIDEDITSVDPCLVESESSESESSYEEDPDRTPVSTNMEENCGPKPKFARTASSKSEIIISDRTPEDFATWQRIIRVDAIRANTEWVLFARNQAEVSKEKALQSAISVGLKDFDHLEPYMIYHAARLVALLEAYALYDPEIGYCQGMSDLLSPIIAVMEEDHEAFWCFVGFMRKARHNFRLDEVGIKRQLKTVSQIIKRKDSHLYRHLQKLQAEDCFFLYRMVVVLFRRELTFEQTMCLWEVMWADQAAIRAGIGRSTWARIRLHAPPTDDLLLYAIAACVLQKRKLIIEKYSSMDEILRECNSMAGQLDVWKLLDDAHHLVVDLHDKI

SEQ ID NO: 918 - protein, 322 aa, Zea mays
  VARIANT 272: note = Ancestral polymorphism is V, Derived polymorphism is I
  VARIANT 237: note = Ancestral polymorphism is N, Derived polymorphism is Y
MTTSAAASATAALSTPSSVNPHRSSSALRLPASLRRSHPNRFLSSSPSRSPLVPVSAMASPAAAGETSSRKKLIIFDAEDDLAASLAKYTSELSAKFAAERGAFTVVLSGGSLVKALRKLAEPPYLEAVDWSKWHVFWVDERVVPKDHADSNYRLASDQFLSKVPIPADQVHAINDELSSEGAAGDYETRLKQLAKNGVIELSPVSGFPKFDLMLMGMGPDGHVASLFPGHPVVNENQKWVTFVKDSPKPPPERITFTFPVINSSAHIALVITGAGKAGAVHKALSEGQSTSDLLPVEMVSLQNGELVWFTDKPAVSMLSSI

SEQ ID NO: 919 - protein, 446 aa, Zea mays
  VARIANT 153: note = Ancestral polymorphism is S, Derived polymorphism is C
  VARIANT 162: note = Ancestral polymorphism is R, Derived polymorphism is S
  VARIANT 167: note = Ancestral polymorphism is F, Derived polymorphism is Y
  VARIANT 186: note = Ancestral polymorphism is T, Derived polymorphism is M
  VARIANT 218: note = Ancestral polymorphism is T, Derived polymorphism is A
  VARIANT 239: note = Ancestral polymorphism is C, Derived polymorphism is Y
  VARIANT 335: note = Ancestral polymorphism is N, Derived polymorphism is S
  VARIANT 365: note = Ancestral polymorphism is S, Derived polymorphism is A
  VARIANT 379: note = Ancestral polymorphism is R, Derived polymorphism is Q
MREILHIQGGQCGNQIGAKFWEVVCAEHGIDATGRYGGDSDLQLERVNVYYNEASCGRFVPRAVLMDLEPGTMDSVRSGPYGHIFRPDNFVFGQSGAGNNWAKGHYTEGAELIDSVLDVVRKEAENCDCLQGFQVCHSLGGGTGSGMGTLLISKIREEYPDRMMLTFSVFPSPKVSDTVVEPYNATLSVHQLVENADECMVLDNEALYDICFRTLKLTTPSFGDLNHLISATMSGVTCCLRFPGQLNSDLRKLAVNLIPFPRLHFFMVGFAPLTSRGSQQYRALTVPELTQQMWDAKNMMCAADPRHGRYLTASAMFRGKMSTKEVDEQMLNVQNKNSSYFVEWIPNNVKSTVCDIPPTGLKMASTFIGNSTSIQEMFRRVSEQFTAMFRRKAFLHWYTGEGMDEMEFTEAESNMNDLVSEYQQYQDATADEEGEYEDEEEGDLQD

SEQ ID NO: 920 - protein, 193 aa, Zea mays
  VARIANT 172: note = Ancestral polymorphism is T, Derived polymorphism is I
  VARIANT 149: note = Ancestral polymorphism is P, Derived polymorphism is L
  VARIANT 130..193: note = Derived polymorphism lacks residues 130 to 193
  VARIANT 124..193: note = Derived polymorphism lacks residues 124 to 193
  VARIANT 98: note = Ancestral polymorphism is S, Derived polymorphism is F
  VARIANT 90: note = Ancestral polymorphism is I, Derived polymorphism is M
  VARIANT 82: note = Ancestral polymorphism is T, Derived polymorphism is N
  VARIANT 59: note = Ancestral polymorphism is G, Derived polymorphism is S
  VARIANT 40: note = Ancestral polymorphism is P, Derived polymorphism is L
  VARIANT 8: note = Ancestral polymorphism is M, Derived polymorphism is R
MDLCVANRLLPDTPSGYPCKPKGLVSSDDFYSDALARPGPVIAPFNTSLASAAVKQLPGLNGLGISATRVDVQPGGVVPMHTHPEASELIFLLEGTLFAGFISAETNKAYVKILKKGDLYVFPQGLLHFQFNTGNTTATAIAAYSNQNPGLQIAVYALFGNTLTVETVNKTTFVTKEEVMRLKDLFGQSSVPS

SEQ ID NO: 921 - protein, 129 aa, Zea mays
  VARIANT 69: note = Ancestral polymorphism is N, Derived polymorphism is Y
  VARIANT 75: note = Ancestral polymorphism is A, Derived polymorphism is D
  VARIANT 80: note = Ancestral polymorphism is F, Derived polymorphism is L
  VARIANT 85: note = Ancestral polymorphism is T, Derived polymorphism is I
MHTHPEASEVMFVLEGTFSAGFISAETNKAYVKSLKKGDLYVFPQGLLHFQFNTGNTTATAIAAYSNQNPGLQIAVYALFGNTLTVETIAVYALFGNTLTVETVNKTTFVTKEEVMRLKDLFGQSSVPS

SEQ ID NO: 922 - protein, 203 aa, Zea mays
  VARIANT 17: note = Ancestral polymorphism is E, Derived polymorphism is K
  VARIANT 20: note = Ancestral polymorphism is S, Derived polymorphism is R
  VARIANT 25: note = Ancestral polymorphism is L, Derived polymorphism is P
  VARIANT 26: note = Ancestral polymorphism is E, Derived polymorphism is K
  VARIANT 39: note = Ancestral polymorphism is R, Derived polymorphism is W
  VARIANT 95: note = Ancestral polymorphism is R, Derived polymorphism is H
MAPSSYEMAASTLLCGEASSSILDLEAVAQEEEEVLLARSRTRREPSVVFPVPSEDCVAGTCYLGFRPSEIAAAVDAAVAGEEHAVDIDKACTHHVHEERVSRCLEAIQATVALLALGTVPAQPLKAEGPSSGHSRASSSSATVPRSPTGVLDAGCLSYRSDDVDGRSASCALRPLPSPRSALSAIARASSSASMEGPRVRSP

SEQ ID NO: 923 - protein, 90 aa, Zea mays
  VARIANT 78: note = Ancestral polymorphism is A, Derived polymorphism is V
  VARIANT 76: note = Ancestral polymorphism is M, Derived polymorphism is I
  VARIANT 68: note = Ancestral polymorphism is E, Derived polymorphism is K
  VARIANT 59: note = Ancestral polymorphism is A, Derived polymorphism is T
  VARIANT 58: note = Ancestral polymorphism is P, Derived polymorphism is S
  VARIANT 53: note = Ancestral polymorphism is G, Derived polymorphism is R
  VARIANT 48: note = Ancestral polymorphism is G, Derived polymorphism is R
  VARIANT 40: note = Ancestral polymorphism is D, Derived polymorphism is G
  VARIANT 22: note = Ancestral polymorphism is S, Derived polymorphism is L
MPPRPSPRRALLAVAAAAAKKLWIPAFKSDAEFINPPWLDGSLPGDFGFDPLGLGKDPAFLKWYREAELIHGRWAMAAVLGIFMGQPRAK

SEQ ID NO: 924 - protein, 91 aa, Zea mays
  VARIANT 10: note = Ancestral polymorphism is L, Derived polymorphism is P
  VARIANT 79..91: note = Derived polymorphism lacks residues 79 to 91
MEAITESRMLYLFRSQPFWRMNEHRERVREEADTAGTCPSQWRCSGDGDRHWHGEAAKPTAAEPHPEEGWIRIKTITGWEFEPLSDLDSNY

SEQ ID NO: 925 - protein, 377 aa, Zea mays
  VARIANT 96..377: note = Derived polymorphism lacks residues 96 to 377
MAVPPNRTPSLHGSSRPSSDAMLPPPALAKKDAQDTLFAEEEFKALQNGQRESPSFSANNLLQSSLLFRQIQAHLLCMDDLDDPISDDHIERPAEQFSSPRTNDQAGKKSMSSPPWPSCIADDDDEDPRPHWDDQAGKKRMSSPPWPSCIADDDDEDPKPRWDDQAGKKRMSSPPWPSCIADDDDEDPRPRSDDQASKKRMSSPPWPSCIADDDDEDTPPPIKKARTKPKSRSKRKHAAARATRLQLRREHRLQRWHNTIATLILKRRFRAPELSHGRTALRCLCPDLKLADDDPRGFGCCALHQDALPGHRAWMYSDEGDAPPLIGGLGEVLVPRLSAGYSKEEVRQYARWRGSVSMPSRFYVQQRAMEKGARSVA

SEQ ID NO: 926 - protein, 368 aa, Zea mays
  VARIANT 96..368: note = Derived polymorphism lacks residues 96 to 368
MAVPPNRTPSLHGSSRPSSDAMLPPPALAKKDAQDTLFAEEESQALQSGQRESPSFSANNLQKSSLLFRQIQAHLLCMDDLDDPISDDHIERTAEQFSSPRTNDQAGKKSMSSPPWPSCIADDDDEDPRPRWDDQAGKKRMSSPPWPSCIADDDDEDPRPRSDDQAGKKRMSSPPWPSCIADDDDEDPPPPIKKARTKPKSRSKRKHAAARATRLRLRREHRLQRWHNTIATLILKRRFRAPELSHGRTALRCLCPDLKLADDDPRGFGCCALHQDALPGHRAWMYSDEGDAPPLIGGLGEVLVPRLSAGYSKEEVRQYARWRGSVSMPSRFYVQQRAAEKRARSVARRRLDDAWNTESPSTLDRVDR

SEQ ID NO: 927 - protein, 234 aa, Zea mays
  VARIANT 34: note = Ancestral polymorphism is Q, Derived polymorphism is R
MAVFAGARARPLLVLGALLLSALLVLTVTAADSQNNPADQLVALINSNRTASKSASVSDNQGLGCIALQYIKAYEGHCDQVDDKKPMESSFTDTFAPTCGVQAATLSRITGRLVACQSKYATPAEALGILVNGAKKGLQTLHGKNHTEVGAAVSGTDGGGPYFWCVLFSDGKPAASFEVVDGEVPKAAIHPGCFSGSNDDCMGPANGGGAVSTNAGASRLVAALLLAVACAFTL

SEQ ID NO: 928 - protein, 889 aa, Zea mays
  VARIANT 776..889: note = Derived polymorphism lacks residues 776 to 889
MPRPRSRDKAASPPSPAGARQRTPAPSPSTSLHLGIGPASPDNDLGVGSLDLKQPAAAPPRHSLLLAGAALRLGLGPASPDDDRGARSPNLSPPAAAPPRRSLRLAGSRNTLSVSGRGEKGARRAHARVSASSLATTVSPRAGNSSSDDSGSGADTALASGERYGSAVPFTTRSRIVKRRAEASPQAGGEVGIGSAGRGQVPDEMLHRDVGTPSKRCRTVLVGGVETVYMSDTESDSDEDCMMLGPSGTELNPIAVDMTENGSLDDPANASDVESLQTHNLLGTTNVGVVEQSVYPSGSASSFEARISADMYVSSHYSSRKGSKVNGKLVLENNSSRADANVGSAVGTSPRKFNPYSKGKGKMVAEDTLSSLVSSEDEPDLDPVHSKETQVNPGSVSASMVSYRRQKAKERAIRLAPEFAFFKADKDEHSEDDDEELEPGPDSQDWPGSFVTAARMYEEREAKLRARELNSSKLNKSANRVIVWSPSKDEKNPARAQAAPSLTSLCLNTLAKHSECIGTLEGIPEELKNRLFKILCHSRKMNTYLLNELLCDSPTELHLSECSWLSEDDFEKTFGKCSIESLQDLQLDISGRCMPDYILPTTLAKVPNCMPLLRKISLKGNYRLSDNGLVTIISAAPSLCSINLCECSLLTSSGINILANKLHSVLRELYIDDCTNVDAMAILPALQKINHLEVLSMSGIQSVCDKFVKGLIPVHGSNLKELAFAGCLELTSASIKTVGEYCQELTSLDLRNLNRLRDSALWHLRGCRLLRKLRLQRNAFSDEAVSQYLEESGGGLTELMLNNVKKVGDLTALAISRKCSVLLNALDLSFCRELTDDSLGLIVDSCPSLRILKLFGCTQVTDLFLKGHSNTSVEIVGIEGSILAQMDNR

SEQ ID NO: 929 - protein, 245 aa, Zea mays
  VARIANT 87: note = Ancestral polymorphism is L, Derived polymorphism is R
  VARIANT 11: note = Ancestral polymorphism is P, Derived polymorphism is L
MPVDVEAAMAPPQAASACSSSSIGRDSDECSPPGKEEEGEGEVQSAYEGGGGGSLAGLEALEEALPIRDYSVGVILPLLSTNGTLLRFALNERSISKFYNGKSKSFVCLKEAITFSGSAKDITKSENAYSRKRKNLFAYIIMYGNSHEPRAAQVYETAAPKRHASLSRNSLVTLASSSSRSSSSISIEEHELPEHLDSPRSPDGFISAPRSGSCVPDASVPRSLSMMDLHRLNRSSSSVRLKDGK

SEQ ID NO: 930 - protein, 385 aa, Zea mays
  VARIANT 44: note = Ancestral polymorphism is Q, Derived polymorphism is R
  VARIANT 6: note = Ancestral polymorphism is E, Derived polymorphism is K
MPAVPEVDKFVKHEESTSATLSPVVETGNGHTTLLMEAKSQHSRGNVASHAVGLSESSSQPTVSTVCKSTAGHIRADEDMRQRSCDTNESCGALPSSSNPTVEPLPSNSLGNAIVDGMSQGSAEMDYSDDDVNTVSRIPTTNKPHDESMGNVAISKDGINTNNNLSIELKKEHDSDLHQDCSSMTNKVTIDGDKCIKTKVGVFSHAGQQGLQNEVSASENSKDKRSLNSEKNTPVNNTDNSMQDAKTAAGSSTTDLQKSSALPKSASPIMQPTKQPPKTLDSCLGKTRSPDIKSEMSQNGMQAGSCSENHAKLAALKTEHQNESEELCLIEAFLSIVSNLLDFKFGSKVEITATLVDPVCIVQAQSKFAYHIKFYPNLQQSLFFR

SEQ ID NO: 931 - protein, 143 aa, Zea mays
  VARIANT 81..143: note = Derived polymorphism lacks residues 81 to 143
  VARIANT 45..143: note = Derived polymorphism lacks residues 45 to 143
  VARIANT 41: note = Ancestral polymorphism is G, Derived polymorphism is D
MEEGFIGARRRSCNGYQRLRAPPPPTPGRGTCRLERRAVLGSGGWRFVRLRRCRAIAPRWSSPLQLLSRILDTYITSMLSQPLNILKPLNMPPPKLRRDASPGTGSSRRRDAGGSGRGVLLAEAAPENATTDGGGGDSSSRKA

SEQ ID NO: 932 - protein, 385 aa, Zea mays
  VARIANT 7: note = Ancestral polymorphism is G, Derived polymorphism is E
  VARIANT 12: note = Ancestral polymorphism is A, Derived polymorphism is T
MSYAVQGRFLRALAAAAGAVVVAPSPSRSPLPAAGADDGAPRIAAAGLFSRGRALPVELAGLFSRGAVQQRKRTLVAGGQEAEAVVIARMAGSSGTISPGSAPTPPKVPSDEAVRGQAGDVERHLLDAPCLLHPRLGVAHGGLAEPEQGRRGAPRVRDHDALHVAVVLQGGAGGGLPVHGVPDGVRLDAGQVRVLDVHHQAHAGLGSAAGMEKFASVPCGGGGGVGCEVDNEKMELLLSQLSSKDITELIPAGREKFALVPCGGGGMTMISPDLFSNNLVASKTHAFFFSIGIWRIQVALFCMCMGGIMYFLEYEPDTMAPFLRGLIRRFLASKISNPSPLPPNRNASYSYLQTLNALEQSRTQPGVDNGLTTSEKYNLESIPRL

SEQ ID NO: 933 - protein, 88 aa, Zea mays
  VARIANT 15: note = Ancestral polymorphism is F, Derived polymorphism is L
MRDRRKPSWRMSCAFVGKCHNSLEFLCITISNLFFPNQGTQLLYCSSLSRRSHCRISNVWSFLHSANFIMIIWKNVMKITEQLSKTGD

SEQ ID NO: 934 - protein, 150 aa, Zea mays
  VARIANT 26: note = Ancestral polymorphism is A, Derived polymorphism is V
  VARIANT 37: note = Ancestral polymorphism is P, Derived polymorphism is T
  VARIANT 38: note = Ancestral polymorphism is A, Derived polymorphism is V
  VARIANT 42: note = Ancestral polymorphism is A, Derived polymorphism is V
  VARIANT 43: note = Ancestral polymorphism is G, Derived polymorphism is A
  VARIANT 86: note = Ancestral polymorphism is S, Derived polymorphism is C
  VARIANT 90: note = Ancestral polymorphism is S, Derived polymorphism is C
  VARIANT 107: note = Ancestral polymorphism is A, Derived polymorphism is P
  VARIANT 111: note = Ancestral polymorphism is K, Derived polymorphism is N
  VARIANT 123: note = Ancestral polymorphism is S, Derived polymorphism is A
MAPKAEKKPAAKKPAEEEPAAEKTTAGKKPKAEKRVPAGKSAGKEGGEGKRGKKKGKKSVETYKIYIFKVLKQVHPDIGISSKAMSIMNSFINDIFEKLAGEAAKLARYNKKPTITSREIQTSVRLVLPGELAKHAVSEGTKAVTKFTSS

SEQ ID NO: 935 - protein, 160 aa, Zea mays
  VARIANT 109: note = Ancestral polymorphism is H, Derived polymorphism is D
  VARIANT 13: note = Ancestral polymorphism is L, Derived polymorphism is R
MALPFFVAFSGILLVGRYLPSALPANARAVLAGNDVTPATRAAMCAVSVAFAGLVLLVSSMPQCPGGRQGQGQQRQCPAEVTTEVRALCFNSAAMFLGMVLGGAAVALHPLARRRPIVDVAVEHLTSFTETIAITAFAHDVRIFFKVVGNTRRSAGAVNL

SEQ ID NO: 936 - protein, 254 aa, Zea mays
  VARIANT 78..254: note = Derived polymorphism lacks residues 78 to 254
MVPLISVSFSLSLFWLTLLLAEAKGDMDLAASRGGSDQNCAHAFHACAAGATACRSPMRQAASAVLVAPAATRSAVLRSAAVQRPLRAAPAAAPAAFPAAAARRHQAAAIADPSAAAAALVVAAARTARAPAPAPRAAAAPASSPVRGARLAASALSTGVSAACRRAAVRCDLPAASASRRAARGVRPAAAPARERAAAVRASVPRRRRARSAPAAACAPAPGAKEDAAARPVVVIPAVPVDACARSEYYITTS

SEQ ID NO: 937 - protein, 159 aa, Zea mays
  VARIANT 8: note = Ancestral polymorphism is A, Derived polymorphism is E
MASEEMTATEVAALLDLKPHPEGGFYTETFRDGSITLTTSQLPPHCKSVWFIFLEKRLPCLIQLNKTIFSKGGAIRKEAGSGSGDLSDRESTLAGLLSSSSVGDVSHLHDERDQACWTGWRCNKDEQGGGVKKGSGLDNNTHREGDNDGQRREQGIGAN

SEQ ID NO: 938 - protein, 933 aa, Zea mays
  VARIANT 17..933: note = Derived polymorphism lacks residues 17 to 933
MRREIFNTVLHGQRLFQQFAVDTYIKLETTRLNYILFNQSRIRADLYQGLMDSVYAGEHRASALGKLWVLPASFIGGPRDMRRRYMDAFALVQKYGKPDIFLTMTCNPNWEEITSELEPGQKSQDRCDLVVRVFKAKLDNLKHQLFKKHILGVMAAHVYVIEFQKRGLPHAHFLLIMQTGSKLIVPDQYDAVISAELPDKNRFPELFDMVVKHMMHGPCGHLNMQNTCMKNGSCKCHYPRLFGETTLQGKDSYPIYRRRDDGQKVRVRGHDLDNRWVVPYNPTLLRMYDCHINVEVCSSIKAVKYIYKYIHKGHDRASVTVIDVDGGQSINEIENFRDARWVSPQEALWRIYSFDLHGISPPVLQLQLHLPGMHLVSYNINDDMRQVLNKDNIDKSMLTEYFRANQLFDWASNYLYREFPEVARWWPGAKKWTARQQRMQVGRIVSAHPAEGERYYLRVLLNHVRGATSFESLRTYDGNVYPTFREATEKRGLIEADNNIDECLTEASGFHMPPSLRRLFATILVFCEPTDVVGLWNKHLEAMSDDFCRTHSNSNVVEQLVLLDIRDMLQTMGKDIRLFPLPAIKDEHDNMADVVREIFEEMNIPEDPEAEFVVSSLNHEQRHAYDVILSSVENISGGVFFVDGPGGTGKTFLYKALLATVRRSGKIATATATSGVAASIMPGGRTAHSRLWNSRLNTKKGHQETNHLADEDGGSSCDVEIIKTPCELPISLNASSQVQPFISSCALPATLTSTNTQELMSALCTYIMEIDDAEYLEKHWIQSTKPYPISLSLQQLKNILDVNKPMDKDCFNIAVRMIACSDALFLLENKYHYMDLQFCSITNYGQDPRLRAKLDTNVLANLFECWPDMEYTISDCSQILLPFCFLGHFSLYVFNMNTRSIYIMDSMPLPSWFKDFKCTEDQILGRVDEVPGQ

SEQ ID NO: 939 - protein, 631 aa, Zea mays
  VARIANT 148..631: note = Derived polymorphism lacks residues 148 to 631
MDGSAAELEAAERVVMRWDSSSAGAGADEPMLFDGGGDRAEADRFLRAVDDLRRLAPPSPAAVGSPRRLSSSSVAASGAVQVAMARLEDEFRHVLSTRALDLEIEALADLSSLSINSDRTNSASSADLPAADEDDSVSSSIGRRSTAYRSLRSIREIDLLPDDAVADLRAIASRMAAAGYGRECAQVYASVRKPAVDASLRRLGVERLSIGDVQRLEWDALEAKIRRWIRAARAAVRGVFASERRLCFHIFHDLPISTTTISAASASATHDIPFAEAVKGAALQLFGFTEAISIGRRSPEKLFKIIDLHDALSDLLPDVSDIFAASKVAESIYVQAVEIRSRLADAVRGILSEFENAVLRDPPKTAVPGGTIHPLTRYVMNYSSLICDYKVTLSELIISRPSASARLSAEGNELAPSLADLELPELENQLPLASHIVWIIVVLEHNLEGKAALYKDPALSHLFMMNNVHYIVHKVKDSPDLWSMIGDNYLKRLTTKFTMAATNYQRTSWLKILNCLRDEGLHVSGGFSSGISKSALRERFKSFNAAFEDAHRVQSGWCVPDNQLREELRISIAEKLLPAYRSFLGRFRHHIENGKHPELYIKFSVEDLEIAVSDFFEGVPPSPHNRRKSHG

SEQ ID NO: 940 - protein, 304 aa, Zea mays
  VARIANT 145: note = Ancestral polymorphism is R, Derived polymorphism is S
  VARIANT 119: note = Ancestral polymorphism is L, Derived polymorphism is F
  VARIANT 114: note = Ancestral polymorphism is D, Derived polymorphism is Y
  VARIANT 98: note = Ancestral polymorphism is S, Derived polymorphism is C
  VARIANT 80: note = Ancestral polymorphism is P, Derived polymorphism is S
  VARIANT 54: note = Ancestral polymorphism is E, Derived polymorphism is V
MDRGTVEDLIRRLLDGKKHKATGKKVQLTETEIRHLCVTAKEIFLSQPNLLELVAPINVCGDIHGQFSDLLRLFEYGGLPPTANYLFLGDYVDRGKQSIETICLLLAYKIRYPDNFFLLRGNHECASINRIYGFYDECKRRFSVRLWKIFTDCFNCLPVAAVIDDKILCMHGGLSPDLDNLNRIREIQRPVDVPDQGLLCDLLWSDPDRDSSGWGDNDRGVSFTFGADKVTEFLNKHDLDLVCRAHQVVEDGYEFFADRQLVTIFSAPNYCGEFNNAGALMNVDASLLCSFQILKPYRGKAQTE

SEQ ID NO: 941 - protein, 372 aa, Zea mays
  VARIANT 16..372: note = Derived polymorphism lacks residues 16 to 372
  VARIANT 49: note = Ancestral polymorphism is R, Derived polymorphism is L
  VARIANT 222: note = Ancestral polymorphism is A, Derived polymorphism is G
MSSVQEELNNTQDMLQGYVELYNYSLSYVKTMAIGCAIQLGIPSAIHRRGGAATISDIITETGVDPSKLPYLRRLMRVLTVSSILATTGTDETETESDDSTVYKLTPASRLLVSGAGAPTSCDISPMLDLLMRPTTSVATYFSLEEWFKDAGATATLFEVAHGMSPWSLTKNDALYNKTLNDGCAADSNFAMDTLLREPRAAGIFRGLGSLVDVGGGHGAAAMAIARAFPHIRCSVLDLEQVVSGAPDDGTVKFIAGDMFESIPAADCVLLKYVLHCWDDESSVKILRQCKRAIPARDAGGKVVIMNMVVGYGSSDRFVKETQVMCDMWMMRYVGVEREEHEWKRIFLEAGFSDYRITPTALGFQSVIEVFP

SEQ ID NO: 942 - protein, 158 aa, Zea mays
  VARIANT 48: note = Ancestral polymorphism is S, Derived polymorphism is N
MAGRGGGSKSSLYAALGVASDCSDAELRSAYRKLAMKWHPDKCAGAGSSGGGADAAKARFQKIQGAYAVLSDPNKRILYDVGAYDGEGDDDGAGEILGDILEAMSQAGPAADNGKGESLEDLQRQFEELFLRPSPSSFSPVGILLTRLCFLSVASLAS

SEQ ID NO: 943 - protein, 159 aa, Zea mays
  VARIANT 149..159: note = Derived polymorphism lacks residues 149 to 159
  VARIANT 111: note = Ancestral polymorphism is T, Derived polymorphism is I
  VARIANT 56: note = Ancestral polymorphism is R, Derived polymorphism is Q
  VARIANT 41: note = Ancestral polymorphism is M, Derived polymorphism is T
  VARIANT 30..159: note = Derived polymorphism lacks residues 30 to 159
MEAINAAKLTKDDVDVRLKWLSLFHRYKHQYTPTDSTPPATVVVAVGRSDLASMTRTKQPSVPVDLCNYVICSLRKDANDRSSTQALLDHPFLSVYDDLHTTYLVSRFFITLTLKDQSILVNGDINEGYKVTKQVYEVVKFSFQCKSSWTTPCHKAVCF

SEQ ID NO: 944 - protein, 125 aa, Zea mays
  VARIANT 11: note = Ancestral polymorphism is C, Derived polymorphism is Y
  VARIANT 31: note = Ancestral polymorphism is S, Derived polymorphism is F
  VARIANT 36: note = Ancestral polymorphism is T, Derived polymorphism is M
  VARIANT 56..125: note = Derived polymorphism lacks residues 56 to 125
  VARIANT 63: note = Ancestral polymorphism is K, Derived polymorphism is N
  VARIANT 76: note = Ancestral polymorphism is R, Derived polymorphism is C
  VARIANT 87..125: note = Derived polymorphism lacks residues 87 to 125
MKRNPRVTSSCRKCRKAHFTSPSSVRRVLMSVGLSTELRHKYSVLSIPIRKDDEVQVVRGTYKGREEKVVQVYRRRWVIHVERITREKVNGSTVNMGIHPSKVIVTKLKLDKDRKVLLDRKAQNN

SEQ ID NO: 945 - protein, 141 aa, Zea mays
  VARIANT 19: note = Ancestral polymorphism is T, Derived polymorphism is I
  VARIANT 31..141: note = Derived polymorphism lacks residues 31 to 141
  VARIANT 37..141: note = Derived polymorphism lacks residues 37 to 141
  VARIANT 41: note = Ancestral polymorphism is E, Derived polymorphism is G
  VARIANT 48: note = Ancestral polymorphism is G, Derived polymorphism is D
  VARIANT 54..141: note = Derived polymorphism lacks residues 54 to 141
  VARIANT 119..141: note = Derived polymorphism lacks residues 119 to 141
  VARIANT 124..141: note = Derived polymorphism lacks residues 124 to 141
MAESMLVPQFVTASVVVAIELILNFLNYFGWLSRTLWLLWEDYIIAGGLVVLPQVMWLTFVPFIHNSVLHGIISGSLAVAMMVSVPSYYGDAGAVAVAYGMVKEPVPMRPGPWGGEGGWEWDDWVYTGVKCCAESSCQDMQ

SEQ ID NO: 946 - protein, 319 aa, Zea mays
  VARIANT 274: note = Ancestral polymorphism is S, Derived polymorphism is F
  VARIANT 271: note = Ancestral polymorphism is L, Derived polymorphism is S
  VARIANT 268: note = Ancestral polymorphism is R, Derived polymorphism is M
  VARIANT 253: note = Ancestral polymorphism is G, Derived polymorphism is D
  VARIANT 236..319: note = Derived polymorphism lacks residues 236 to 319
  VARIANT 206..319: note = Derived polymorphism lacks residues 206 to 319
  VARIANT 157: note = Ancestral polymorphism is A, Derived polymorphism is T
  VARIANT 134: note = Ancestral polymorphism is D, Derived polymorphism is Y
MTLCSSTASKLSPSPPQNPSSVPPLPFSLLPLSRQLRIVAARSHGEKLCGLPEKAKSSCDCGDCRWEAPPALGNARRWCMHDEAVVHYIDMIDQTTLGHRMIKKQFNKTPRAGWQIDPFGHSAVQAYLLGAEDDILMFDYNVEERVNDFVVVAIEQANFTRTNHIMWTMGDDFSYQYAESWFRNMDKLIYHVNKNESINGIMLDISFREAQVIAASSSTLCPVFLFFSWAHIFVRQSNFKLRADLSTPFIMIGPETGLAPFRGFLQERLALKQSGAELGTSILFFGCRNRNMDYIYEDELQTFLEEGALSELIVAFSRP

SEQ ID NO: 947 - protein, 132 aa, Zea mays
  VARIANT 82: note = Ancestral polymorphism is V, Derived polymorphism is F
  VARIANT 66: note = Ancestral polymorphism is Y, Derived polymorphism is H
MAKGGLSKLRCMIKRWHSSSRIARAPPSPGPGEDDRCAARGASFHGADEVPEGLHPVYVGKSRRRYLVAEELVGHPLFQTLFDRIGGGGTGAAAAGTVVGCEVVLFEHLLWMLENADPPPESLDELVEYYAC

SEQ ID NO: 948 - protein, 133 aa, Zea mays
  VARIANT 79: note = Ancestral polymorphism is L, Derived polymorphism is Q
MAKGGLSKLRCMIKRWHSSSRIVSRAPSPSSAHDGATSGDAHCASFHGADEVPKGLHPVYVGKSRRRYLVAEELVGHPLFQTLVHRTGGTTGGAAAGTVVGCEVVLFEHLLWMLENADPQPESLDELVDYYAC

SEQ ID NO: 949 - protein, 749 aa, Zea mays
  VARIANT 5..749: note = Derived polymorphism lacks residues 5 to 749
  VARIANT 71..749: note = Derived polymorphism lacks residues 71 to 749
  VARIANT 85..749: note = Derived polymorphism lacks residues 85 to 749
MPQIQNTMRQNCTLLAVLCGEFAEKRQTPASLAPDTKRLRLSYPFPELASSGRLEVHTLINPTLEQFREAQQAVHPVFLYLQGQQQENEEEIGTLVWGDTDLSDPQMFVSLITPPFPTMVYLEVPTGEKLAQSLHSKGIPYVVYWRNLFSSYTASHFRHALMSVIQSSCSHTWDAFQLAHASFRLYCVRNNHVQSVKLGPCLLGDAPKTNVIPAGDEVNEEQGCSEGFPDIRIYDEDVSMKFLLCGVPCTLDACLLGALEDGLNALLNIEIRASKLQNRASAHPPLQAEDLPHGVVTMRCDITTCSSAHVSFLVSCSAQTCFDDQLLGSRIKNEIIEKRQLVRALLNNEDNKPSSYEPLPSMCVACGASTFEVWITMPKWAAQVLKHLAPEISYRSLVALGIAWVNGTPVSSFDRQDADRLLFFCSNQCGDQAIQNGSYAHVSSWSAPLTKDRTTGSLESKQMSFGAKGVVGDNTISLSSLKPRLKPATMRPLPHSRKQQMHPFMGFPQSIIHDASQVKPSLPAPPVKHNAVPVTAVTPRKSSSGSPSSWSRVQLPIPLNPLPIKKHECNRLPIHSCSEEDFLKDVMQFLLQRGHIRLVPQGGLAEFPDAVLNSKRLDLYNLYKEVVYRGGFYVGNGINWKGQIFSKMHNHTVTNKMTGVGNTLKRHYETYLLEYELAHDDIDGECCLICHSGALGDWVNCGLCGEWAHLGCDRRKGLSTFKDYSKADGMEYICPQCSLAKYKPPLPAP

SEQ ID NO: 950 - protein, 186 aa, Zea mays
  VARIANT 108: note = Ancestral polymorphism is C, Derived polymorphism is W
MLPRRQSIFHLGEEGGAAAVHHRVSVVGAASSSMAMGGGGGRRARERERLVVGLQILVHHHGRHGHGHAHAANVVLKQMVRPRAAAGSRHGHGSHAFSCSFLKACYLCKRELSPDKDVYMYRGDQGFCSEECRWQQILVDEAREREAAAVMSNKELQRRAQARHHSPHRTPMPIRGRPPRKTLAVA

SEQ ID NO: 951 - protein, 681 aa, Zea mays
  VARIANT 21: note = Ancestral polymorphism is D, Derived polymorphism is E
MSLLSRFFYKRPPDGLLEFLDRIYVFDSCFSTEVLPQGMYPVYLIGILTELHEEHVESSFLAINFRDGDKRSQLADILREYNIPVIDYPRHFEGCPVLPLSLIQHFLRVCEHWLSSGTNQNIILLHCERGAWPLLAFLLSCLLIYKKLNSAEHKTLDIIYREAPKGFLQLFSALNPMPSQLRYMQYVARRNISPQWPPMERSLSLDCLILRAIPSFDSDNGCRPLVRIFGRNLLGKNASMTNMTFSMPKKKSLRHYRQEDCDVIKIDIQCLVQGDIVLECVHLDLDPEKEVMMFRIMFNTAFIRSNVLMLNSDDVDILWGSKERYPRNFRAEVLFCEVGGISPPRAPTTTLNGDVKGGLPIEAFSAVQELFNGVDWIANSDDAAYWLLKEFSANSLQEKFQKLMLNDMKELSRIQAKVGLQMPLMSPLDSDEEKYSVASDSVSSADHEKVQHGGNSSDSENIDCDHTTEDFESSDTLSTNSSSLPPQPQPPVPPHMVPSTLYALPVLVTVPSEPLIESLQELPRKKAPVPPPPPPQAPKPPGVVPPPPPPSSKISNAPAPPPLLGRGRGNTTGPTKGRGIGLAQQSNPPKKASLKPLHWVKVTRAMQGSLWADAQKQGNQARSPDIDLSELESLFSTAVVTSTSEKGATRRGSAINKPEIVHLLLVILPYWLTCDEQTIVR

SEQ ID NO: 952 - protein, 764 aa, Zea mays
  VARIANT 77..764: note = Derived polymorphism lacks residues 77 to 764
  VARIANT 518..764: note = Derived polymorphism lacks residues 518 to 764
MATAGTLSSYSRPDFPRRRIGCSLRSNLPLSIIADPSNILCFLVLAFLVRPPAISGSGLWASRDRVRRILVALTQHWHPLVLGLGVNSAMRKHGWQLPYHPLQVVAIAVFSALGFAFYVFFVPFVGTKPFQIVAMAIYTPLITCVVVLYIWCAATNPGDPGIFDSTKNLKLDKNEKHSYVNSDQGINHGGRPLSETFGTADNSEKLSSMLERNDSPSWPRFSGIISLVCLPFSCLCKRCLHSDSLSSEHKMCEEGMFFCSLCEAEVLLTSPFPIPCTALMYSMYCSWGYSIQTSASDSTVLKNSKHCRVCDKCVDGFDHHCRWLNNCIGKRNYKGFFVLMASAVILVSVDLLTNDKLTQIGMFLTGLHGLYNLIQLVMQWLSGGLVLILCIVKRGEFSRQVVTKLGSSFSTVAFVIVVATCTILAMVATVPLAQLLCFHVLLVKKGISTYDYIIALREHEEQQEVPGHQSPQMSIVSSVTGFSTASSFGPLHRGSWCTPPRLFLEDQLILIAWSSLSQFDAIPPEIGISRNSGSKKTKEEEGARRKAGAVKISPWTLARLNAEEVSKAAAEARKKSKILKPVGKHGAPENSSKPDHLPSYKRRLDRRGFPAELSLDPLATLSASGTESNYSDAATEICGSLAPLQLEARSAFQPSTAASTRNVASSPESSFDSPNLHPFRTSSATADEMQGAMMHTAHRGIEFKRSSSDGYEASGGEDSDRIPSRIVHRSSNWASVFLHSGQGDPPADLLTTSAEGFVANDSGS

SEQ ID NO: 953 - protein, 196 aa, Zea mays
  VARIANT 81: note = Ancestral polymorphism is A, Derived polymorphism is G
MTTTAGEEKEKQAGGSSMETEEETTPKAKKRPQSLLGSLREAITKVRFLLSSSATRWMLLRSLARGGGSGGAPARRLSFDARPGLLDTIAASPTSSCSSRTSRSASLGTATTRTLSRASSAASPEALTRASSSSGGRSPASSAGDDDVDQRAELFIANFYRQLRMERQVSLQLRYVRGNSWDRTPGATPSPASSRG

SEQ ID NO: 954 - protein, 555 aa, Zea mays
  VARIANT 44: note = Ancestral polymorphism is A, Derived polymorphism is T
MVSPTEPQAETTVFRSTLPDIAIPDHLPLHDYVLERLAERRDRACLIDGATGETLTFGDVDRLSRRVAAGMRACLGVRSGGTVMLLLPNSVEFALAFLACSRLGAAATTANPLHTPPEIAKQAAASGATVVITEPAFVGKVRGLAGVAVVATGDGAEGCVSFSDLASSADDGSAALPEAAAAATAIDVANDVVALPYSSGTTGLPKGVMLSHRGLVTSVAQLVDGDNPNLYFREDDVVLCVLPMFHVYSLHSILLCGMRAGAALVIMKRFDTLRMFELVKRHGITIVPLVLPIAVEMVKSDAIDRHDLSSVRMVISGAAPMGKELQDLLRAKLPRAVLGQGYGMTEAGPVLSMCMAFAKEPLPVKSGACGTVVRNAELKIIDPETGLSLHRNQPGEICIRGKQLMKGYLNNPEATAKTIDSEGWLHTGDIGYVDDGDEIFIVDRLKELIKYKGFQVAPAELEAMLIAHPSIADAAVVQMKDDSCGEIPVAFVVASGGSGITEDEIKQYVAKQVVFYKRLHKIFFVEAIPKAPSGKILRKDLRAKLASGFSNGSSC

SEQ ID NO: 955 - protein, 127 aa, Zea mays
  VARIANT 108: note = Ancestral polymorphism is T, Derived polymorphism is I
  VARIANT 103: note = Ancestral polymorphism is D, Derived polymorphism is N
  VARIANT 90: note = Ancestral polymorphism is P, Derived polymorphism is L
  VARIANT 88: note = Ancestral polymorphism is P, Derived polymorphism is S
  VARIANT 76..127: note = Derived polymorphism lacks residues 76 to 127
  VARIANT 63: note = Ancestral polymorphism is G, Derived polymorphism is D
  VARIANT 46..127: note = Derived polymorphism lacks residues 46 to 127
  VARIANT 9: note = Ancestral polymorphism is M, Derived polymorphism is K
MYPRHHFAMQQQQQSSVAGGSSAAAMPLLHGRQPTCASVAMPGGSQFIGAPSLCDTSIDWAGGGGGSEDVSFAQVYRFVGDMFDADAPVPVEAHLQKLKEMDNITTKTVLLVLRNLENNLSAPQFEP

SEQ ID NO: 956 - protein, 218 aa, Zea mays
  VARIANT 159: note = Ancestral polymorphism is G, Derived polymorphism is S
  VARIANT 152: note = Ancestral polymorphism is P, Derived polymorphism is L
  VARIANT 148: note = Ancestral polymorphism is A, Derived polymorphism is V
  VARIANT 143: note = Ancestral polymorphism is P, Derived polymorphism is L
  VARIANT 129..218: note = Derived polymorphism lacks residues 129 to 218
  VARIANT 128: note = Ancestral polymorphism is F, Derived polymorphism is V
  VARIANT 125: note = Ancestral polymorphism is Y, Derived polymorphism is N
  VARIANT 117: note = Ancestral polymorphism is D, Derived polymorphism is V
  VARIANT 110: note = Ancestral polymorphism is G, Derived polymorphism is V
  VARIANT 106: note = Ancestral polymorphism is Y, Derived polymorphism is H
  VARIANT 101: note = Ancestral polymorphism is T, Derived polymorphism is I
  VARIANT 90: note = Ancestral polymorphism is T, Derived polymorphism is I
  VARIANT 89: note = Ancestral polymorphism is A, Derived polymorphism is S
  VARIANT 21..218: note = Derived polymorphism lacks residues 21 to 218
  VARIANT 2: note = Ancestral polymorphism is P, Derived polymorphism is L
MPFASWWFLLLSGHLEATMLQNEIFLPSSIFAEVAAAKRSLSVLSSRTDFTRAFLFFGLLKQVKVLFLEQLLIFPSVRSLHAKNNNVRATEFTIKQGWLHTGDIGYFDEGGQLFVVDRLKELIKYKGFQIAPAELEGLLLSHLEIMDAVVIPLPNAKAGEVPIAYIVRSPDSSLTEVDVQKFIEKQVTTTSPTGTHKLANPKGEVATARAAAACNTIM

SEQ ID NO: 957 - protein, 1174 aa, Zea mays
  VARIANT 70..1174: note = Derived polymorphism lacks residues 70 to 1174
  VARIANT 58: note = Ancestral polymorphism is H, Derived polymorphism is Y
  VARIANT 42..1174: note = Ancestral polymorphism lacks residues 42 to 1174
  VARIANT 15: note = Ancestral polymorphism is A, Derived polymorphism is D
MLLLVLLVKTRATPAGLCFAGSSRPACTELLSLEGEKGIFCSLLYQIFGDKMKLVLWHQFFLFFVLVSTSQGMSSDGLALLALSKSLILPSPIRTNWSDSDATPCTWSGVGCNGRNRVISLDLSSSGVSGSIGPAIGRLKYLRILILSANNISGLIPLELGDCNMLEELDLSQNLFSGNIPASLGNLKKLSSLSLYRNSFNGTIPEELFKNQFLEQVYLHDNQLSGSVPLSVGEMTSLKSLWLQENMLSGVLPSSIGNCTKLEDLYLLDNQLSGSIPETLGMIKGLKVFDATTNSFTGEISFSFEDCKLEIFILSFNNIKGEIPSWLGNCMSLQQLGFVNNSLYGKIPNSLGLLSNLTYLLLSQNSLSGPIPPEIGNCQSLQWLELDANQLDGTVPEEFANLRSLSKLFLFENRLMGDFPENIWSIQTLESVLLYSNRFTGKLPSVLAELKFLKNITLFDNFFTGVIPQELGVNSPLVQIDFTNNSFVGSIPPNICSRKALRILDLGFNHLNGSIPSSVVDCPSLKRVILQNNNLNGSIPQFVNCANLSYMDLSHNSLSGNIPASFSRCVNITEINWSENKLFGAIPPEIGNLVNLKRLDLSHNILHGSIPVQISSCSKLYSLDLSFNSLNGSALRTVSNLKFLTQLRLQENRFSGGLPDSLSQLEMLIELQLGGNILGGSIPSSLGQLVKLGTALNLSSNGLMGDIPTQLGNLVELQNLDFSFNNLTGGLATLRSLGFLQALNVSYNQFSGPVPDNLLKFLSSTPYSFDGNPGLCISCSTSGSSCMGANVLKPCGGSKKRGVHGQLKIVLIVLGSLFVGGVLVLVLCCILLKSRDWKKNKVSNMFEGSSSKLNEVTEATENFDDKYIIGTGAHGTVYKATLRSGDVYAIKKLAISAHKGSYKSMVRELKTLGEIKHRNLIKLKEFWLRSDNGFILYDFMEKGSLHDILHVIQPAPALDWCVRYDIALGTAHGLAYLHDDCRPAIIHRDIKPRNILLDKDMVPHISDFGIAKHMDQSSTTAPQTTGIVGTIGYMAPELAFSTKSSMESDVYSYGVVLLELLTRRTAVDPLFPDSADIVGWVSSVLDGTDKIEAVCDPALMEEVFGTVEMEEVRKVLSVALRCAAREVSQRPSMTAVVKELTDARPASASSGSRSLSKSREGKPGLQSSSSAYWQ

SEQ ID NO: 958 - protein, 320 aa, Zea mays
  VARIANT 50..320: note = Derived polymorphism lacks residues 50 to 320
  VARIANT 81: note = Ancestral polymorphism is R, Derived polymorphism is L
  VARIANT 108: note = Ancestral polymorphism is G, Derived polymorphism is S
  VARIANT 123..320: note = Derived polymorphism lacks residues 123 to 320
  VARIANT 156..320: note = Derived polymorphism lacks residues 156 to 320
  VARIANT 251..320: note = Derived polymorphism lacks residues 251 to 320
MAVAVVDPHGTAAVWCVCRGSASGGERDDPDLPHRVRGVQRERECVTVSQSNTGDRAGYDPVFEVTVWYACRCAVPAVRLRSEGFASSVPVDPRLFRRAGRDYLVADGRRIELGADARFRYAWDRAFRMTAAAVVDVPNVSWKDIGGLENVKRELQETVQYPVEHPEKFEKFGMSPSKGVLFYGHPGCGKTLLAKAIANECEANFISVKGPELLTMWFGESEANVREIFDKARQSAPCVLFFDELDSIASQRGSNLGDARGVADRVLNQLLTKMDGMNAKKTVFIIGAINRPDIIDPALLRPGRLDQLIYIPLPDEQYRL

SEQ ID NO: 959 - protein, 822 aa, Zea mays
  VARIANT 268: note = Ancestral polymorphism is K, Derived polymorphism is N
MVSKTSSPSASNGELSTSPVEARRIVVTYRLPLRAEPNLDSPHGFDFSLDADALPLQCTRGLPRPVVFVGALPSAAASISESDDLAADLFTRFACSPVFLDPSLHNDFYNSFCKRYLWPILQLQYLLPFTRSSDSGCLSFNEDLYRAYLTANTQYADRVFEHLNTDEDLVLIHDYHLFALPTILRRKSPRARIGFFLHSPFPTSELFRAIPVREELLRALLNADLVGFQNYDYGCHFISACSTLLGITSRAHGDYICIDYFGRAVVVKILSVGVDMVRLREVLSSPETAAKAKEVATKFAGRQVLIGVDDVDLFNRIDVKLLAMERLLESRPELIGQVVLVQINNPARSPGRDTDTVLAEVQLLMDRINARFAKPGYDPIVMIDDPLTMHEKLAFYTSADICIVTAVRDGLNRTPYIYTVCREHGPISSGVAGAPRESAIVLSELVGCSTFLRGAVRVNPWNVDDVVEGMSSALRLNERDKKILHAKHYMYVVKHDIAYWGRSLDQNLQKASMDHASMNFLSVGLAMNFRIVVLDPNFQKLSPEHINPSYHRTGNRLILLDYDGTVMVPQGLITRHPSQELVSVLNELCSDPMNTVFVVSGRSKDELAGWLAPCEKLGISAEHGYFTRWSRDSPWESPKLLLDNDWKNIVEPVMKYYCDVTDGSYIEAKETALVWHYEEADPVFGPRQAKELQYHLRDVLSEEPVYVKSGHQIVEVNGNPQEVVGKGTAVQGLIAALGARGRMPDFILCVGDDVSDEDMFEAISAPSSKFAFPEAAEIFACTVGNKPSLAKYYLEDPDEVLKMLKGLIDSFEENHSTVEANK

SEQ ID NO: 960 - protein, 282 aa, Zea mays
  VARIANT 186..282: note = Derived polymorphism lacks residues 186 to 282
MAIRMSNNVIGALNLVTLLLSVPILVSGIWLRSRADGTECDHLLSTPAIALGAVLMAVAVAGLAGACFRATWLLWLYLLAMLVFIVALLCFTVFAFAVTNRGAGEAVSGVGYREYRLGDYSTWLRRHVESRKDWARIRSCLADAHVCRRLEERERESKDAAGLVRLGLSPVESGCCKPPTSCNFTYTGGTEWTRTAAGSAPAGRDCSAWGNDEDDLCYGCQSCKAGVVDALKRDWKRAAIVNVVILSFIVVVYSVGCCAFKNSRRDNYAYHSGRGWKRGGDA

SEQ ID NO: 961 - protein, 144 aa, Zea mays
  VARIANT 36: note = Ancestral polymorphism is D, Derived polymorphism is Y
MATDELAHAVAPAPAGGDHSPAFSFSIWPPTQRTRDAVVRRLVETLAGDTILCKRYGAVPAADAEPAARAIEAEAFDAAASTGGAAAASVEEGIEALQFYSKEVSRRLLDFVKSRSADAKAGDTPSEEARAPGAPEAEAAQPAA

SEQ ID NO: 962 - protein, 158 aa, Zea mays
  VARIANT 9: note = Ancestral polymorphism is I, Derived polymorphism is V
  VARIANT 16: note = Ancestral polymorphism is M, Derived polymorphism is T
  VARIANT 19: note = Ancestral polymorphism is S, Derived polymorphism is W
  VARIANT 26: note = Ancestral polymorphism is E, Derived polymorphism is G
  VARIANT 33: note = Ancestral polymorphism is D, Derived polymorphism is N
  VARIANT 71: note = Ancestral polymorphism is A, Derived polymorphism is P
  VARIANT 79..158: note = Derived polymorphism lacks residues 79 to 158
  VARIANT 81: note = Ancestral polymorphism is A, Derived polymorphism is V
  VARIANT 82: note = Ancestral polymorphism is E, Derived polymorphism is K
  VARIANT 98: note = Ancestral polymorphism is D, Derived polymorphism is N
  VARIANT 116: note = Ancestral polymorphism is E, Derived polymorphism is K
  VARIANT 123: note = Ancestral polymorphism is D, Derived polymorphism is N
  VARIANT 134: note = Ancestral polymorphism is R, Derived polymorphism is H
  VARIANT 136: note = Ancestral polymorphism is L, Derived polymorphism is R
  VARIANT 144..158: note = Derived polymorphism lacks residues 144 to 158
  VARIANT 147..158: note = Derived polymorphism lacks residues 147 to 158
MKSPNFEYVDNGGCSMLASLQRWTDEHLHTSKDRDVEENKWEKNGSALMEIDSICEVDSNFEDPQLCVAMASDIYMHLREAEMKKRPSTDFTEMIQKDVNPSMRAILIDWLVKVAEEYRLAPNTLYLTINYIDRYLSGNKINRQRLQLLGVACMLIAA

SEQ ID NO: 963 - protein, 112 aa, Zea mays
  VARIANT 35: note = Ancestral polymorphism is L, Derived polymorphism is V
MEKKDLLAVRKRLPAAAAKRRHKVVTPAKAGAGRLAKVIAGYLASDSYMYAPLISAPPSLPPPPPASSVAPSATPLISTPEKEITGAKIQRLFASYIHCLEVSVDMFLELCF

SEQ ID NO: 964 - protein, 144 aa, Zea mays
  VARIANT 48: note = Ancestral polymorphism is G, Derived polymorphism is E
  VARIANT 52..144: note = Derived polymorphism lacks residues 52 to 144
  VARIANT 54: note = Ancestral polymorphism is G, Derived polymorphism is R
MPLVRFEVRNEVGLGDPGLYGGGASAAAGEEEEPNALLEGVAVAGLVGILRQLGDLAERGRFISKQEATMESGFPLYLMESGFGASLFSCDFGIPAPFPFMEGMRCCWSAHWNGTDIDRTFRFISKELRLTDLWISLDALTKVN

SEQ ID NO: 965 - protein, 80 aa, Zea mays
  VARIANT 9: note = Ancestral polymorphism is A, Derived polymorphism is G
MVTLAGKGGRTSRGMVSLRRRRPFQLMVLRRLRELKKIVPAGARRRKADVDVVLRRTAEYICALELKVALLRRLSHMYGV

SEQ ID NO: 966 - protein, 107 aa, Zea mays
  VARIANT 74: note = Ancestral polymorphism is I, Derived polymorphism is T
  VARIANT 69: note = Ancestral polymorphism is W, Derived polymorphism is C
  VARIANT 66: note = Ancestral polymorphism is H, Derived polymorphism is Y
  VARIANT 59: note = Ancestral polymorphism is P, Derived polymorphism is T
MEPVVGIVVSNKMQKSVVVAVDRLFHYKMYNRYVKRTSKFMAHDEADSCNIGDRVRLDPSRPLSRYKHWVVAEILRRAKVYVPPAATASSQSSEHNSKSQKAGVATK

SEQ ID NO: 967 - protein, 833 aa, Zea mays
  VARIANT 99: note = Ancestral polymorphism is A, Derived polymorphism is V
MHCRPCPSQLSLVFLLLLSLAPIISALPFPEPALPMACSGLRLSLPAAVLALLLLPSALASEPLNPEVQALIAIRQGLVDPHGVLRSWDQDSVDPCSWAMITCSPQNLVIGLGVPSQGLSGTLSGRIANLTHLEQVLLQNNNITGRLPPELGALPRLQTLDLSNNRFSGRVPNTLGRITTLRYLRLNNNSLSGPFPASLAKIPQLSFLDLSFNNLTGPVPLFPTRTFNVVGNPMICGSNAGAGECAAALPPVTVPFPLESTPGGSSEHSSFLPLCLSFISTASQAGQLARLAASRAQCFSALSRSAWRGVHACVAAAAAFVPLPRRGSGRGDTVLSAWGRRRSRLRPGIPVVGCMPVCSAGGAVWPEPCICCCSRLGISVWLLCVCARAGTGTGAAAAGRSKAAGARLPIGVGTSLGASSLVLFAVSCFLWRRKRRHTGGRPSSVLGIIHERGGCDLEDGGGGGVVAAAARLGNVRQFGLRELQAATDGFSAKNILGKGGFGNVYRGRLADGTTVAVKRLKDPSASGEAQFRTEVEMISLAVHRHLLRLVGFCAASGERLLVYPYMPNGSVASRLRGKPALDWATRKRIAVGAARGLLYLHEQCDPKIIHRDVKAANVLLDEHHEAVVGDLGLAKLLDHGDSHVTTAVRGTVGHIAPEYLSTGQSSEKTDVFGFGILLLELVTGQRALQLGKASGALHSQKGVMLDWVRKVHQEKMLDLLVDQDLGPHYDRIEVAEMVQVALLCTQFQPSHRPKMSEVVRMLEGDGLAEKWEATNRPGVAAGAPCHDALGYDHRNDSNGSVFFNDFHDNDSSLSSDEARSIDMVEEMELSGPR

SEQ ID NO: 968 - protein, 499 aa, Zea mays
  VARIANT 381: note = Ancestral polymorphism is G, Derived polymorphism is V
  VARIANT 11..499: note = Ancestral polymorphism lacks residues 11 to 499
MLSSATARSLKAMWAPQAALTTSTAPPAVRRRSTRLIAPPPPPPPPCQDDDQNQPACSETALLTSSQPQRRSTILIRVRRSVSLPSPPMSASTPPREAEADAPSPSGAVTPRPRRSVRVQLRVRSLPSEASSSTLRSRRRSPKAPSTTSIVAKAEEWGKEKAAAGAPEEECVLPFLRKGAPRKVECLICSKSILPDERTQCSVNHCDVTLHKACSEETDGCCPRHENRMIGSEDPSRTMISWSTWPSTSEDAGPTDDIKEAFRRLPLPYIDQEFNIDPINKQDLKSESEPPPYVHIMRSILYVYVVKKKSEGRPIKGGCINCDHGSTCGSSCSCRSSMTSCSLGCPCSVKCSNKPFRREKKIKIVKTRQCGWGAIALETIGKDDFVIEFVGEVIDDAMCEDRLQDMRQRRDQNFYMCKVDKDFVIDPTFKGNACRFFNHSCQPNCRLEKWQVNGKTRLGVFASQTIEVGMPLTYNYRFRTSFGPEKECFCGAPNCQGKL

SEQ ID NO: 969 - protein, 175 aa, Zea mays
  VARIANT 139: note = Ancestral polymorphism is H, Derived polymorphism is L
  VARIANT 9: note = Ancestral polymorphism is T, Derived polymorphism is I
MGSTSSMLTQYDIEEVQDHCNHAFSQQEIVSLYHRFCQLDRNGGGFVSADEFMSVPEFAVNPLSQRLLRMLDGLNFKEFVAFLSAFSPRTSLQEKIEFIFRVYDTDCNGKVAFDDILSILRDLTGSFMTEQQRQKVLTHVLEEAGYTKNSHFTLPDFMKVRLFLLTLGCYGKLAA

SEQ ID NO: 970 - protein, 408 aa, Zea mays
  VARIANT 25: note = Ancestral polymorphism is A, Derived polymorphism is V
  VARIANT 173: note = Ancestral polymorphism is G, Derived polymorphism is D
MTVVDAVVSSTDAGAPAAAATAVPAGNGQTVCVTGAAGYIASWLVKLLLEKGYTVKGTVRNPGMHASCLLLYISSLLCRPARAWQQMERLTCLYMFMAADDPKNAHLKALDGAAERLILCKADLLDYDAICRAVQGCQGVFHTASPVTDDPEQMVEPAVRGTEYVINAAAEAGTVRRVVFTSSIGAVTMDPKRGPDVVVDESCWSDLEFCEKTRNWYCYGKAVAEQAAWETARRRGVDLVVVNPVLVVGPLLQATVNASIAHILKYLDGSARTFANAVQAYVDVRDVADAHLRVFESPRASGRHLCAERVLHREDVVRILAKLFPEYPVPARCSDEVNPRKQPYKFSNQKLRDLGLQFRPVSQSLYDTVKNLQEKGHLPVLGERTTTEAADKDAPTAEMQQGGIAIRA

SEQ ID NO: 971 - protein, 586 aa, Zea mays
  VARIANT 81..586: note = Derived polymorphism lacks residues 81 to 586
MLPFDSFLPSKPSTSDTATDHSSDSDFATTNSNEDTAILGMTGDGAFAISFADRFTASASAALFVEKRMVHGSKSMAVPEQGIPPNVVEDGEPFRHTSVNIDPSHTVSVPHGSVPEAPQSDSHVYSVDSNANGNLILAILDKLKEEREQQEGKYGEEDVDGSCISEEEDGDWDVDEPDEEDIIYPLSNDWHTAILPCYLKSMYKSNGIYKNAKVAFCIHNIAYQGRFARADFDLLNLPDSFLPSFDFIDGHVKPVLGRKINWMKTGIVESDLVLTVSPHYVKELTYGPDKGVELDGVLRTKPLEIGIVNGMDVYEWDPSTDKYTSVKYDATTVTEAKALNKERLQAEVGLPVDSSIPVIVFVGRLEEQKGSDILIAAIPEFVGENVQIIVLVCFNLEVISILSHDTVHNLIVAERKKIVLQGTGKKKMEEELMQLEVKYPNIARGIAKFNVPLAHMMFAGSDFIIVPSRFEPCGLIQLQGMRVSSSLCYSSDLSARKINISSHLFLSCYILIPVKQKVFPSVHHLEDLLTRLRRGVTGFHMGSFNVEGPAKKWEEVLLGLGVEGSQAGIDDAEEIAPLAKENVATP

SEQ ID NO: 972 - protein, 195 aa, Zea mays
  VARIANT 57..195: note = Derived polymorphism lacks residues 57 to 195
  VARIANT 47: note = Ancestral polymorphism is E, Derived polymorphism is K
  VARIANT 34: note = Ancestral polymorphism is G, Derived polymorphism is V
  VARIANT 27: note = Ancestral polymorphism is A, Derived polymorphism is T
MSLGRDSLHGGGVTLNREPLQGRRLHAISVYVSGMLTVRETLLFATEFRLPYALSSERKRARVDQLGLFCAADTIIGNEGHHGTSSVAASCTRCVLVMQVAAWAWAAYTRSCTTTSLVYASRPLGGGSSGGSSGSPSTAPTGDKRSAHFPMVLVQMPMYNELEVHKLLAAACELQWSKDMIIVQVVDDSTDPFIK

SEQ ID NO: 973 - protein, 230 aa, Zea mays
  VARIANT 152: note = Ancestral polymorphism is E, Derived polymorphism is G
  VARIANT 205: note = Ancestral polymorphism is L, Derived polymorphism is S
MRLVGLTGGIASGKSTVSNLFRDSGVPVVDADVIARDVVQKGTRGWKKIVKAFGNDILLESGEINRALLGQIVFSDPSKRQLLNRLLAPHISYSIVWEIAKLWMKGCKVIILDIPLLFETKMDRWTNPIIVLWVDPKVQIERLISRDGCSEGQAQNRINAQLALDWKKSEADIVIDNSGSLDDTKQQFQEVLMKVSEPLTWKERLRSRDGLISVVVFTAVGVLLAQKNLL

SEQ ID NO: 974 - protein, 317 aa, Zea mays
  VARIANT 42..317: note = Derived polymorphism lacks residues 42 to 317
  VARIANT 72: note = Ancestral polymorphism is S, Derived polymorphism is F
  VARIANT 208: note = Ancestral polymorphism is C, Derived polymorphism is Y
  VARIANT 228: note = Ancestral polymorphism is Y, Derived polymorphism is H
MVYSGLVHTDRAADKVLWSTAATSASAGDRAVLLNTSNLQIQSTGGSSSPDVVWQSFDYPSETIIQGQNFTSAATLYSFDRRFAMRLGSNYFDLYIEPPPSSGGVAAAMYFKHTAMEAKAQIVADGGPTYARVEPNGFLAMYQREGPPADVLSFDTFNRGAVRRRGVEPVNKELLRSEQAASATDCEARCERNYSCWGAVYSNGTGVCYVMDYPAQLLVAGDDRKMGYFKIRSLEEEGTRGHGGGRASGVKAALLVVGVAAVVAAAAFGAYRVWDRRRRSAVDARRQMGAADDGLSPGPYKNLGSFSSVELTNSFRR

SEQ ID NO: 975 - protein, 181 aa, Zea mays
  VARIANT 56: note = Ancestral polymorphism is T, Derived polymorphism is A
  VARIANT 51: note = Ancestral polymorphism is L, Derived polymorphism is V
MAMQVVRNLDLERYAGRWYEIACFPSRFQPKTGTNTRATYTLNPDGTVKVVNETWADGRRGHIEGTAWRADPASDEAKLKVRFYVPPFLPLIPVTGDYWVLHIDADYQYALVGQPSRNYLWILCRQPHMDESVYKELVERAKEEGYDVSKLRKTAHPDPPPESEQSPRDGGMWWVKSIFGK

SEQ ID NO: 976 - protein, 404 aa, Zea mays
  VARIANT 283..404: note = Derived polymorphism lacks residues 283 to 404
  VARIANT 209: note = Ancestral polymorphism is G, Derived polymorphism is V
  VARIANT 174: note = Ancestral polymorphism is H, Derived polymorphism is Y
  VARIANT 145: note = Ancestral polymorphism is A, Derived polymorphism is V
MPSPIAACFRCAAAPSSGAGAAGPSLTTSVYETHLGLVALSWSRTSLGLSLRAVLRLSPPPSPGFSSASGAGYLDDDADEETLAFRVRPWLLWRWRGSKRFRADDRIVDLAWDLSRARFPGSGSPEPSSGFFVAVIIDGEMVLAVGDLSDAAYRRTRARRPSGPRPVLLSRREHVSLRDAGAGRGRSHTTCVTVQGKEREISVDLVARGLGTDRVAAGREKAKDRADVGMSVSVDGERVLHVRRLRWKFRGSERVDLGGGNGVQVSWDLHNWLFRPREPGPAEASTHAHAHAVFVFRFDVSSGGEDLGKDPCPDNATGRNTDVVWGGYLARWRQRDWSETGSNAERRKGRGRRLAKESSSSSASVASSTASWASGSTVMDWGSPEEAEMQRGDGLTLLIYAWKS

SEQ ID NO: 977 - protein, 292 aa, Zea mays
  VARIANT 251: note = Ancestral polymorphism is L, Derived polymorphism is S
  VARIANT 179: note = Ancestral polymorphism is S, Derived polymorphism is P
  VARIANT 139: note = Ancestral polymorphism is A, Derived polymorphism is S
  VARIANT 27: note = Ancestral polymorphism is N, Derived polymorphism is T
MGSCFSRLDAGVISSGRSVLERTRLVNISIVEFGIWELCIVFFVIGRVWRFVFVVKRMQSAGLFFANLGPTKAVSKEVERIDQFFYTYADNSSVMIDPEGIETLCSHLEVPHTDVRILMLAWKMGCEKQGYFTLDEWRAGLKALRADSISKLKKAFPELVQEVILSPQIISYVQVTRPSNFQDFYIYAFRYCLTEDKKKCIEIPVACELLNLVLGLQFRPQVDKLSNYLKAMDSTFLCGSTHPFFMKTRCSIDMLYLDCVSINFPSLDNYDSDLAWPLILDNFVEWLRENKS

SEQ ID NO: 978 - protein, 371 aa, Zea mays
  VARIANT 2: note = Ancestral polymorphism is S, Derived polymorphism is F
MSTLPWNVLIVLSLSASTWEIRTLYTSGSSSPKCVVTLMLEIAPSFWGRWKRRHSNFDKSIPFALLSQVAGIREYFAANPALTSELPSTVVKSKASETLIIQSEHEDSELGDEFYDALTRALVETSELVTNSSPVTVDPSHFHGTLHRAKTQNDQNSWSAPGGEKFMIRGKTYLTDYHKVVGGDPLLELLAVDWFKVNERFDSVALHPKSLVQSEAAKKLPFILVINLQVPAKPNYNLVMYYAAERPVNKDSLLGRFIDGTDAYRDARFKLIPSIVEGYWMVKRAVGTKACLLGKAVTCNYLRQDNFLEIDVDIGSSSVARSIIGLVLGYVTSIVVDLAILIEAKEEKELPEYILGTVRLNRVNPDSAVSI

SEQ ID NO: 979 - protein, 113 aa, Zea mays
  VARIANT 37: note = Ancestral polymorphism is E, Derived polymorphism is G
MKEIYIPASPPPAVGQKCSFVSLQIFKAKKLLIRTLEVILETHLKHMNGDMFGHLTFNIYAGIRIFEDISITNPKVRDIKVGKVILLKSVGVVEIQEGFCFLSTMVSWTRWSI

SEQ ID NO: 980 - protein, 207 aa, Zea mays
  VARIANT 77: note = Ancestral polymorphism is A, Derived polymorphism is T
  VARIANT 47: note = Ancestral polymorphism is S, Derived polymorphism is N
MATAARLPTVPPSAAAGDVSEVELSEAGSPDLGSRSSGSGSGGSGRSTAEYSGWVYHLGVNSIGHEYCHLRFLVIRAKFVAMYKRDPHDNPGLEPIRKGAVSHTLMVEELGRRRVNHGVVLQDVYVLRLYNRLNQTKKGEIACATPGEARKWIEAFEQAKQQADYDLMRGVNWNRLQNENEINLDGHRPRVRRYAQGLGKFVRIGKG

SEQ ID NO: 981 - protein, 621 aa, Zea mays
  VARIANT 60: note = Ancestral polymorphism is E, Derived polymorphism is D
MPPKPAPRLFQYISNKSRKPPPPPAARSAAPGSHDGTASDADVGEVYRIVTSAATPSAMESALAASAVSLSSPLLDAVMRRFRFAHGDPLRALSLLSLAADRGGIAPSPYAIDTALYVLGRARRFPHMWNLVANTRRICPDALTPRTAMIVLGRVAKVCSVRETVASFRCLARLFHTVDPAVLFNALLRTLCQEKSMSDARNVFHALKYEFRVNRHTFNILLSGWKSAEDAEAFVTEMRELGVEPDLVTYNSLIDCHCKNRDVQKAYKLLDEMRHKDISPDIITYTSLIGGLGLIGQPDKAKDLLKEMYELGCYPDVPAYNAAIRNFVIAKRLGDAFALMDQMVSKGLMPNPTTYNLFFRCYYWAFDIGSAWRLYERMRSEGCYPNTQSCMFIIRLCHRYGKVALALELWSDMVSSSFGSLTLVSDVLLDLLCDEGKLEDAERCFCQMVELGQKPSNVAFRRIKILMQLAKQEESIARLTEKMIQFGRLPPVDCQRVQHSVESRPSNVIHLAVGIQQEAMQMELSNILQQKNGRPFHHCLYAILQQENLLALSKLGGIPRPSFYILGRDGDYKSPAWAAQSYDEVGPSHFTEQSASRALEPHATTVSPSSLPKTRKRRRVV

SEQ ID NO: 982 - protein, 527 aa, Zea mays
  VARIANT 195: note = Ancestral polymorphism is L, Derived polymorphism is R
MMAAVLKTSGSFCSTQQQHFQQSRRDQFLHGSYSNFKHCKSKKIIKPAPLCARVTSSKVELDVKDPYWKQKFQEDWESRFDLPSITDIYDLKPRPTTFSLKKNRTLTGDENVDMWNGYVNNDDRALLKVIKYSSPTSAGAECVDLDCSWVEQWVHRAGPRKEIYYEPEEVKAAIVTCGGLCPGLNDVIRQIVFTLETYGVKNIVGIPFGYRGFFEKGLKEMPLSRGLVENINLNGGSFLGVSRGGAKTSEIVDSIQARRIDMLFVLGGNGTHAGANAIHEECRKRKLKVSVVAVPKTIDNDILLMDKTFGFDTAVEEAQRAINSAYIEARSAYHGIGLVKLMGRSSGFIAMHASLSSGQVDVCLIPEVPFTLDGEFGVLRQLEHLLKSKGFCVVCVAEAAGQDLLQESGATDASGNVILSDIGVHMQQKIKMHFKDIGVPADVKYIDPTYMVRACRANASDAILCTVLGQNAVHGAFAGFSGITSCICNTHYVYLPITEVITAPKRVNPNSRMWHRCLTSTGQPDFH

SEQ ID NO: 983 - protein, 88 aa, Zea mays
  VARIANT 70..88: note = Derived polymorphism lacks residues 70 to 88
MGSSAAWSFRSRVVVGYLLRSTLEKRVSPAVTIDGLRERNSLPELLCMVRYRSECMNKTISKYDNIKQIQRLPDNAFWKLNLTRNASE

SEQ ID NO: 984 - protein, 296 aa, Zea mays
  VARIANT 45: note = Ancestral polymorphism is G, Derived polymorphism is D
  VARIANT 150: note = Ancestral polymorphism is T, Derived polymorphism is M
MGRPPCCEKAGLKKGPWSPEEDLLLVSYVQEHGPGNWRAVPCSTGLMRCSKSCRLRWTNYLRPGIKRGSFSDQEEKLIIHLQELLGNKWSAIASYLPERTDNDIKNYWNTHLKKKLAKTGARESGASAKTTKKSDRAAAPKGQWERRLQTNIHTARQALREALSMDDTAPPAIKPEPLPLPLGQLPAPASQAMYASSIDNIARLLEGWMRPSVSGNASAESMSSFSAFSGGGDGASASHIGTAHTPEGFTGTRKEEGAGPGPASLPMFENWLLDDGMGNGDASLICVPLADPCEFF

SEQ ID NO: 985 - protein, 299 aa, Zea mays
  VARIANT 67: note = Ancestral polymorphism is R, Derived polymorphism is C
  VARIANT 42: note = Ancestral polymorphism is T, Derived polymorphism is M
  VARIANT 5: note = Ancestral polymorphism is P, Derived polymorphism is Q
MGRPPCCEKGGVKKGPWTPEEDLVLVSYVQDHGPGNWRAVPTNTGLMRCSKSCRLRWTNHLRPGIKCGNFSDQEEKLIIHLQALLGNRWAAIASYMPERTDNDIKNYWNTHLKKKFTRTGAAGAEARSGRWAAPRGQWERRLQTDIHTARQALREALSLDPAPLSTKPPEQLPQPTAPASQATSYASSAENIARLLEGWWSMHPGAAGKVSSGSRSSSVSVSVFSDDDGVISASNSGGTAAARTPEASIRMTKADGEGTAGPGPGPSFSMLESWLLDDAMGHGDTGLVTVPMGDPCDFF

SEQ ID NO: 986 - protein, 134 aa, Zea mays
  VARIANT 108..134: note = Derived polymorphism lacks residues 108 to 134
  VARIANT 107: note = Ancestral polymorphism is G, Derived polymorphism is S
  VARIANT 106: note = Ancestral polymorphism is R, Derived polymorphism is H
  VARIANT 105: note = Ancestral polymorphism is P, Derived polymorphism is A
  VARIANT 93: note = Ancestral polymorphism is V, Derived polymorphism is I
  VARIANT 86..134: note = Derived polymorphism lacks residues 86 to 134
  VARIANT 83: note = Ancestral polymorphism is G, Derived polymorphism is D
  VARIANT 66: note = Ancestral polymorphism is A, Derived polymorphism is V
  VARIANT 54..134: note = Derived polymorphism lacks residues 54 to 134
  VARIANT 49: note = Ancestral polymorphism is R, Derived polymorphism is C
  VARIANT 39: note = Ancestral polymorphism is G, Derived polymorphism is R
  VARIANT 37: note = Ancestral polymorphism is A, Derived polymorphism is T
  VARIANT 34: note = Ancestral polymorphism is R, Derived polymorphism is W
  VARIANT 30: note = Ancestral polymorphism is S, Derived polymorphism is N
  VARIANT 23: note = Ancestral polymorphism is A, Derived polymorphism is T
MEAGTVAGGRVACDLLLVFGDAAAVLQGCSLYARCPAPGQKNVVTTQGREDPNQSTGIVVQGGKVAVAADLASLVANVSSYLGRPWKRYSCAVFAQTKMEALVHPRGWLEWNATFALDTLYYAEYMNRVCCKPI

SEQ ID NO: 987 - protein, 392 aa, Zea mays
  VARIANT 49: note = Ancestral polymorphism is R, Derived polymorphism is G
MEERNGTNMEKSDEILMPGFRFHPTDEELVSFYLKRKVQQKPISIELIRQLDIYKYDPWDLPKLASTGEKEWYFYCPRDRKYRNSVRPNRVTAAGFWKATGTDRPIYSSEGTKCVGLKKSLVFYKGRAARGMKTDWMMHEFRLPSLADPSLPKRPIDKTIPLNDSWTICRIFKKTSSLAQRALSHTWGPPLLGATEADDMINALQSVQASEFALESSLQVAPAAPAAGQFSSRHGLHVHGQHQQKKGTNSPSLDGSSSCKLINFTSSSPSEEGRPQSLSFPVTFPFEVQGTHKTAAAAPVFFGAHPDHHLGGFVVDSSADVNGGIVGGRSQDSSTRKPSNNGFSTSSGDWETAGRVSFPFDLGADSSEEWRCNIPWESLLTPAAVQAELLPH

SEQ ID NO: 988 - protein, 394 aa, Zea mays
  VARIANT 276: note = Ancestral polymorphism is K, Derived polymorphism is T
  VARIANT 211: note = Ancestral polymorphism is P, Derived polymorphism is L
MASTVTFSLISTQAGLIHKPRNLGATSYAGLKVPSFGSESSFLGRNASLRAAVTTRIVPKAKSGSQISPHASYKVALLGAAGGIGQPLGLLIKMSPLVSELHLYDIANVKGVAADLSHCNTPAQVLDFTGPSELASCLKGVDVVVIPAGVPRKPGMTRDDLFNINASIVKSLVEAVADNCPEAFIHIISNPVNSTVPIAAEVLKQKGVYNLKKLFGVTTLDVVRANTFVAQKKNLKLIDVDVPVVGGHAGITILPLLSKTRPSVTFTDEEAEELTKRIQNAGTEVVEAKAGAGSATLSMAYAAARFVESSLRALAGDPDVYECTFIQSEATDLPFFATRVKLGKSGVESIVSADLEGVTECEAKALDALKAELKGSIEKGVAFASKQQEAAASV

SEQ ID NO: 989 - protein, 570 aa, Zea mays
  VARIANT 286: note = Ancestral polymorphism is W, Derived polymorphism is C
MGGVRGHSSAAGVSEEAAAAAAWVWAAADLPVRVDWAGAAAQCASLWAHARALLVVPAVRLLVALSLAMTVMVLAEKLFVCAVCVAVRAFRLGPHRRYRWEPIAAAAAAVGYPVVLVQIPMYNEREVYKLSIGAACALEWPPERFVIQVLDDSTDPVVKDLVETECQRWKSKGVNIKYEVRGNRKGYKAGALKEGLKHDYVADCEYIAMFDADFQPDSDFLLRTIPFLVHNPEIALVQARWKFVNSDECLLTRFQEMSLDYHFKYEQEAGSSVYSFFGFNGTAGVWRISAIDDAGGWKDRTTVEDMDLAVRAMLQGWKFLYVGDIKVKSELPSTFKAYRFQQHRWSCGPANLFKKMMVEILENKRVSLWSKIHLWYDFFFVGKVAAHTVTFIYYCFAIPVSVLFPEIQIPLWGVVYVPTVITLLKALGTPSSFHLVILWVLFENVMSLHRIKAAVSGLLDAGGRVNEWVVTEKLGDTSKAKPGTNGSDTAVKVIDVKLTEPLVPKLVKRRARFWERYHCSELFVGTCIILCGFYDLLFANKGYYIFLFLQGTAFLVVGFGYVGTLPPCTA

SEQ ID NO: 990 - protein, 80 aa, Zea mays
  VARIANT 19: note = Ancestral polymorphism is L, Derived polymorphism is P
MSAMIRWTLTFSRKVTIIPGMTESCTHMGSFGCSDNTSLDGLLGDYLPYAGWLTIVMTEKPVLKYLLIGALGLLVVASKE

SEQ ID NO: 991 - protein, 56 aa, Zea mays
  VARIANT 17: note = Ancestral polymorphism is M, Derived polymorphism is T
MWCNDSDKIHGGRMKEMKIFSGIKERNNQTPIAFLKFVCSNAEKFLVIPPNVAPRL

SEQ ID NO: 992 - protein, 435 aa, Zea mays
  VARIANT 69..435: note = Derived polymorphism lacks residues 69 to 435
  VARIANT 370..435: note = Derived polymorphism lacks residues 370 to 435
MEEEVESSSAVALLLVLVALVVVPSMALLVTSCWRPPSPRAAHAAAAVGTMVVFHVLGTWDLQIPFPRQLFSVAIYKMATQGGIGPAGHSIDDLYVLDLTNDKFKWHMVVVQGAGPGPRYGHCMDLAAQRYLVTVSGNDAHDVPVRVKNSYNPKAPGTLITRQRDMDKVVLTSIVLKSNVNMLDILSTRMLGQYGFPGKGMLNTEPFLTDGILGAKEQRTITSKERPMLLLQGAILDEMMDNGFPLTTEPNILKEMITPPNIVNKMLNVVTSKSSTLGSKLPDAAASFVPWRRTTVKDASNEVYVNIVEELDACVNSTLTFDQTSNVQKLKKTPIYVKPQLTSDSGNCRVSVMVGIRNDRGKPIDSITVQFQLPPLIVSVDLTANYGTVDILADKVSVLPTISSTVTPLIPDLVTSQDLFVDNWADTKRQSTNTL

SEQ ID NO: 993 - protein, 290 aa, Zea mays
  VARIANT 271..290: note = Derived polymorphism lacks residues 271 to 290
  VARIANT 250: note = Ancestral polymorphism is G, Derived polymorphism is R
  VARIANT 229: note = Ancestral polymorphism is R, Derived polymorphism is W
  VARIANT 225: note = Ancestral polymorphism is C, Derived polymorphism is F
  VARIANT 216: note = Ancestral polymorphism is P, Derived polymorphism is L
  VARIANT 203: note = Ancestral polymorphism is A, Derived polymorphism is T
  VARIANT 164: note = Ancestral polymorphism is C, Derived polymorphism is Y
  VARIANT 136: note = Ancestral polymorphism is I, Derived polymorphism is N
  VARIANT 40: note = Ancestral polymorphism is R, Derived polymorphism is S
  VARIANT 34: note = Ancestral polymorphism is V, Derived polymorphism is L
  VARIANT 23: note = Ancestral polymorphism is I, Derived polymorphism is S
MAPGARDNSDPASYIHTVIKYPICGRSSWVMAQVQHLIERCMTFGMSMEEYMEALAKRADVQPVVTSTVWKELENTMVSVVPIRWPRSRDEVWKANIPHPCLTAEKSDQRWMVVNGDKINFPGGGTDFHTGAGKYIVHLAQMLNFPNGTLNNGGNIRNVLDVGCGVASFGAYLLSHDVLATSLAPSDVHENQIQLALERGISAALGVLGTRRLPYPSRSFEMAHCSRCRIDWLQKDGVLLLEVGRVLRPGGCFVYSSPEAYALDPFNRKIWRQMSDLARRMCWRVASKKN

SEQ ID NO: 994 - protein, 196 aa, Zea mays
  VARIANT 134..196: note = Derived polymorphism lacks residues 134 to 196
  VARIANT 54..196: note = Derived polymorphism lacks residues 54 to 196
MGDPGAESATLTRDRSHGGERLAAVRGEGDNTTGRRSEAVGVRGEVCGGIAAIEGEDGRRGWWRGGGEAPRQSSRPNDERSLRAVAAGRQSGRPNDGWVSTSSLGGMEGRCRRWEPCRRRREIPQSCPAAAPVRDTNGSELIRLIWRNESLLGLCCILERVDDGWVDSVTLSKQVSRLGYRFGSLWTMSCCKPNTL

SEQ ID NO: 995 - protein, 364 aa, Zea mays
  VARIANT 256: note = Ancestral polymorphism is D, Derived polymorphism is G
MPAAMPSPPGRLLASIPLRCHAPTQQPSTTAARGLLLRGACSPVVKRVPDGGGWLLWHQSGPRVALSTSMDGLRWSAPVSPDPLLPSEDWWTFDTACVRPSDVLLVSSPAASSRRFPSSAVYWLYYMGSTDERFGSPFPDADVPALPGLAISQDGRHWARIEGDHHTGALFSVAEEGEKSRGWEARCIVAPKVVMHADGDLRMYYHSFDEMSQRHAIGLARSRDGIRWKKTGKVLEGGRAGCFDECGVQHGHVVRDRAARQYVMVFEGVDADGRVSIGMAVSEDGLKEWRRSSEMPVLCPSYDDEGWDAAGVGSPYLVQMDGAYDWRLYYMGVGRDGEASIGMAYSEGQALLKFEKCDAIAYKM

SEQ ID NO: 996 - protein, 377 aa, Zea mays
  VARIANT 139: note = Ancestral polymorphism is K, Derived polymorphism is T
MGRSPCCEKIGLKKGPWTPEEDQKLLAYIQEHGHGSWRALPVKAGEYSTIFPMNIVREISTNSLAGLQRCGKSCRLRWTNYLRPDIKRGKFSLQEEQTIIQLHALLGNRWSAIATHLPNRTDNEIKNYWNTHLKKRLAKMGIDPVTHKSISGTRIGTTNDKSTKAAASLSHMAQWESARLEAEARLARESKIRTATPTPTALHAQPTILPASAASPCLDVLHAWQGAKIDLESPTSTLTFTGSNSGTLPTPRTNRLDVSESNCAVWHQRSDDLEDEENDWQIFSKHQLLELDSKEREEDFIGCEEPWFSEMAGVGAGFTGMLLGVSNEHDASECWGESNNGQTERSNQASDEEDKNYWNGVLDMVNSELTPKSPPFV

SEQ ID NO: 997 - protein, 350 aa, Zea mays
  VARIANT 145: note = Ancestral polymorphism is S, Derived polymorphism is Y
  VARIANT 134: note = Ancestral polymorphism is G, Derived polymorphism is E
  VARIANT 129: note = Ancestral polymorphism is G, Derived polymorphism is D
  VARIANT 126: note = Ancestral polymorphism is F, Derived polymorphism is V
  VARIANT 112: note = Ancestral polymorphism is R, Derived polymorphism is M
  VARIANT 103: note = Ancestral polymorphism is T, Derived polymorphism is M
  VARIANT 73: note = Ancestral polymorphism is H, Derived polymorphism is R
  VARIANT 52..350: note = Derived polymorphism lacks residues 52 to 350
  VARIANT 33: note = Ancestral polymorphism is A, Derived polymorphism is V
  VARIANT 4: note = Ancestral polymorphism is G, Derived polymorphism is R
MQRGQEQRAMELVLPPGFRFFPTDEELLTCYLARKAMDGSFTTAAIREVDLYKTEPWDLPCEQQAAAAGGDLHEGYFFCTRGSKSPSGIRARRATQLGYWKSTGKDKPVHSRSGRLVVGTRKTLVFYRGRAPRGEKTDWVMHEYSMGERRSSALLRGAQSEWVICRVFTRKQHPVISNDRKLPEMEEAAVHGHGHRSPGHLLATEAADDGFDSEQESAPPVVVTETQHTSGSHIGGAQAMEGDDDHYQHRQIAHEELLTTMHHHHGSSRVVSPACWLNQHDDRLGSHYYCPALPVMQSDDADYYLPELLEYSGPLDTGGEEDCRLRAETQFTAVGSSDHIDDGLYWDIGF

SEQ ID NO: 998 - protein, 393 aa, Zea mays
  VARIANT 50: note = Ancestral polymorphism is G, Derived polymorphism is R
  VARIANT 59..393: note = Derived polymorphism lacks residues 59 to 393
  VARIANT 93: note = Ancestral polymorphism is T, Derived polymorphism is I
  VARIANT 206..393: note = Derived polymorphism lacks residues 206 to 393
  VARIANT 220..393: note = Derived polymorphism lacks residues 220 to 393
  VARIANT 268..393: note = Derived polymorphism lacks residues 268 to 393
MFLSPNALRFLFCSFKSARWCLFFIQQEVYMVVSIGLDVKPGSTVKCEPGYGFMLHLSQKLAIGTLSVDKNPHIQFDLVFDKEFELSHTSKTTIVFFTGYKVEQPFKEDGYPFLFSIELVLFQVEVIRTFFVSLTSCLPSSTMDLDSEDEDEKLNVPVVKENVSWLFYENIVEVELAVDSYEVTLIFLQIFLIMTSVDPMHFLRIQITVSLSASTNTQAQNIFPLYVLLARPTSNISLEGSTTEARSEPHRLSPHGANHTGKADGKKQKSQEKAVPAASKSSPASKKSKDDDDSDEGETDDSNEDETDDSDEGEGLSPEEGDDDDSSDEDDTSDDEEEDTSTPKKHEVGKKRAAESSMLKTPLSDKKAKVATPSAQKIGVPLNGLTKLSSKIV

SEQ ID NO: 999 - protein, 280 aa, Zea mays
  VARIANT 48: note = Ancestral polymorphism is R, Derived polymorphism is C
  VARIANT 52: note = Ancestral polymorphism is K, Derived polymorphism is N
MAPSLLGVTFPPSHFLFFIQGFTKSLAMTVLSEIGDKTFFAAAILAMRHPRKLVLAGCLTALIVMTALSASLGWVAPNLISRKWTHHLTTLLFFLFGIWSLWEGFKEDGYRSVVAFQLTFCFMCFGVFVIDLSHLAKHCNSHFRDSEELAEVEAELDAAFKSNKGESKNKFKANDDMKKQQRPFLMQFFSPIFLKAFSITFFGEWGDKSQIATIGLAADENPFGVVLGGIIAQALCTTAAVLGGKSLASQISEKMVELSSGVLFLLFGIMSLLSGPEGEL

SEQ ID NO: 1000 - protein, 353 aa, Zea mays
  VARIANT 259: note = Ancestral polymorphism is A, Derived polymorphism is T
MWEGGGSHAHEALLLQAAGSGAADYGHAGPSLLRPWLGPAAASGFSYMAPNHAQPGPLGAEAAVASRFGFGGGGYSDGGVEQEQFVVIGSAETVPPRHSLQAAGVGGRTTALLPHGPRMVSGLLGTLQAELGRMTAKEIMDAKALAASRSHSEAERSRRQRINGHLAKLRSLLPNTTKTDKASLLAEVIEHVKELKRQTSAAARQRHLLLPTEADDLSVDAAEDGDDGRLVARASLCCEDRVGLIPDIARALAALSLRARRAEIATLGGRVRNVLLITTADDDDEEGEGHVEGGCAGASSNRRHELVASIQEALRGVMDRKTASSDTFSSSGGGGGGSIKRQRVSGLHEQGSL

SEQ ID NO: 1001 - protein, 357 aa, Zea mays
  VARIANT 187: note = Ancestral polymorphism is K, Derived polymorphism is M
  VARIANT 190: note = Ancestral polymorphism is L, Derived polymorphism is H
MAVSAASRAWRLSPVDQAPLRPLDPYASASSGVSAGHLDAVKPVGRVRVSMIEAYLRANKMFVDKHEPKTERVFSSYLELDLSEVEPCVLGPKSPHDRVPLKEMKSDWHACLDNEVGFKGYAVPKEQQGKVVKLDFHGRPAEIKHGSVVLATICSSTNTSNPIVMIGAGLVAKKAYELGLEVKPWVKTSLTPGSVVATEYLKHSGLQDYLNQQGFHVAAHGCATCVGNSGDLDGSVSAAITENISLLLRYCQPTETSRGRVNPLTRANYLASPPLVVAYALAGTVDIDFEKEPIGVGKGAKEVFLRDIWPSNQEIDEVVESSVQTHLLIQESVRLHHGTQILVVALVWRLEFMYTVS

SEQ ID NO: 1002 - protein, 196 aa, Zea mays
  VARIANT 73: note = Ancestral polymorphism is S, Derived polymorphism is I
  VARIANT 131: note = Ancestral polymorphism is R, Derived polymorphism is C
  VARIANT 141: note = Ancestral polymorphism is V, Derived polymorphism is L
  VARIANT 169: note = Ancestral polymorphism is S, Derived polymorphism is Y
  VARIANT 179: note = Ancestral polymorphism is S, Derived polymorphism is L
MPPNRTSNGPRSITTAAAELGPNIQILRGAATAVGDMEAAVPSRVALSAASRLPNPHAVTGDRSFIYKGRCQSLAIPMALSAAAPGKGGGVLDRPVEKTTPGRQSEFDVKKSRKMSPPYRVILHNDNYNRREYVVKVLMKVIPGMTVDNAVNIMQEAHVNGLSVVIVCSQSEAEEHCTSLRGNGLRSSIEPASGGC

SEQ ID NO: 1003 - protein, 240 aa, Zea mays
  VARIANT 171..240: note = Derived polymorphism lacks residues 171 to 240
  VARIANT 129: note = Ancestral polymorphism is P, Derived polymorphism is L
  VARIANT 126..240: note = Derived polymorphism lacks residues 126 to 240
  VARIANT 92: note = Ancestral polymorphism is R, Derived polymorphism is C
MPSTAMSWDGYGAQIFLADMSFHHQDTLEAVFQQPAETTLLQAPAGEKELPSNGSPPVVDDAGVQAAAVLRKRPFRTDRHSKIRTAQGVRDRRMRLSVGVAREFFALQDRLGFDKASKTVNWLLAQSKPAIDRLVDAADQAAVVTGGGPTLVKGRGEGSNSSTCCLTDSREELATEKGRSRAGDAGLDWPPPLIEEHGCGELGWIMSEATATPEQDGLECYYQYCLQLEELMRCNGGMPR

SEQ ID NO: 1004 - protein, 74 aa, Zea mays
  VARIANT 10: note = Ancestral polymorphism is R, Derived polymorphism is K
  VARIANT 67: note = Ancestral polymorphism is S, Derived polymorphism is F
MGRGKIEIKRIDNATSRQVTFSKRRGGLFKKAKELAILCDAEVGLVVFSSTGRLYHFASTRFDSCSSFASLIDE

SEQ ID NO: 1005 - protein, 121 aa, Zea mays
  VARIANT 4: note = Ancestral polymorphism is T, Derived polymorphism is A
MFYTNFHCRKLLGQQLSGLDVRDLQNLENQLETSLRNIRLKMGYLMHQENIELHNKVNLLHQENIKLRRKHNLIQAYGQGVNEHPTSTTVRHSILNTENEDVRINLELSVQGDKSETPSIG

SEQ ID NO: 1006 - protein, 119 aa, Zea mays
  VARIANT 46: note = Ancestral polymorphism is V, Derived polymorphism is G
  VARIANT 88: note = Ancestral polymorphism is R, Derived polymorphism is M
MALRGVWQLQKLVVNYCDWGGSSRGIRAFMEAHLPAFKEKNPHLEVVTELVRGQHPNLKGIYKNHNERVVCVRNLPPEEILLQATRLRNSLGRKVVKLRTRHVTKRPSVQGTWTTELKM

SEQ ID NO: 1007 - protein, 753 aa, Zea mays
  VARIANT 589..753: note = Derived polymorphism lacks residues 589 to 753
  VARIANT 568..753: note = Derived polymorphism lacks residues 568 to 753
  VARIANT 557..753: note = Derived polymorphism lacks residues 557 to 753
  VARIANT 539..753: note = Derived polymorphism lacks residues 539 to 753
  VARIANT 503..753: note = Derived polymorphism lacks residues 503 to 753
  VARIANT 188..753: note = Derived polymorphism lacks residues 188 to 753
  VARIANT 128..753: note = Derived polymorphism lacks residues 128 to 753
MVQPGRGGDDGEQPLSRIAMERVVDDAAHQGVCPDLCSCRSLKKREGNLKQVRFCLFFRLPWNSTTTSEQDKVGTVVEPASEFYSSRLKNREHKATLVDELLSDQSVKSYSTSVSSNLSGPLPANLTWTQWHVVSSGHVVNGISAPVGYHPMWMNFGNDMVVDNGVLEAPRADATASIMSSEMAMSPSLAISSSYALFLYGFCLWCLIYVEMVSVRWNEMHSEFVYALYISSSGDGLVILDGDIRSPTNPKNRKLLRAPDDSEVLMEDDAGPITQADLERWFVHDWDKGTPIKVSADECTNDFLMSGLSIKDMPVTKANLIDVLCDYIMAIQDDMTLQFTMSKGKKIKDIKHYMDMHFWRMVSFGKLPKYHEDPTTEELAKTLDCWPSMNYYITGCKYVLMPWKFTECYTLFVIDHVGQTLFYRVNTSYLVLQAMVMWGYGRRMEFVRDAKILRRNFVIDLLSYEDNSSTKLSISLQRNRLVYGCRYIARFHPIEPCWTTQPRPQGIAVEQSEPFVMPPPASLHAPPFYTVTQCYMGKWGIAYCVKGGPEKELKAMQYLERRECEYDQKISIDFYKEGDPLKPAVMGVLVFVSTPDPIGNKYYLGPAPLQNMARARELFYYLKGKQVDYGEEHSKACGHNRFGRIYHTGHYPVCYEHNPVHFVGHSAGAQVVRVLHQMLADKMRGAVVLAAKHAKTMVGKPLLYGIGTLLVMSLRTLYGVGCVFGARWFLYMTSVSPSLQIEFVSGPKQLGSY

SEQ ID NO: 1008 - protein, 122 aa, Zea mays
  VARIANT 80: note = Ancestral polymorphism is T, Derived polymorphism is A
  VARIANT 47: note = Ancestral polymorphism is A, Derived polymorphism is T
  VARIANT 33: note = Ancestral polymorphism is D, Derived polymorphism is Y
  VARIANT 12..122: note = Ancestral polymorphism lacks residues 12 to 122
  VARIANT 10..122: note = Derived polymorphism lacks residues 10 to 122
  VARIANT 9: note = Ancestral polymorphism is T, Derived polymorphism is I
  VARIANT 6: note = Ancestral polymorphism is A, Derived polymorphism is D
  VARIANT 5: note = Ancestral polymorphism is S, Derived polymorphism is L
  VARIANT 4: note = Ancestral polymorphism is A, Derived polymorphism is D
MIFASAVLTELCPRIVDHRAHHLFDETLPRTAYVFDRSTRATGQPPAAARFVLIRELHPLGTEMTRALSTANCHAAMEMTHGRTSGLCADGSTYGFAFGRGQQARGGNCITCDKLVRFLNKL

SEQ ID NO: 1009 - protein, 272 aa, Zea mays
  VARIANT 42: note = Ancestral polymorphism is R, Derived polymorphism is W
MTSASELFTARRAARGARLSDLDLDPHADALRDQHGLGARHRRRGCRPRRQLDAAGDVRQHLHTGAPPPRRRGSYTDQILSYIDNNNLGVGDSAARRNRLDRLMFRTNERLPGAVLQAQARVLERLRGISLGSSVSRPSISLDEFSASDVFRIIDFRNREARHEENRHHSSSFHPSSESDEERPTVGSTHSNRSTGLTKAAFLRLQVEIFEASKDDSREASPECSICLDGFYDGDELIRLRCGHRFHSTCLEPWARKCADCPYCRTNIRSRS

SEQ ID NO: 1010 - protein, 597 aa, Zea mays
  VARIANT 320: note = Ancestral polymorphism is T, Derived polymorphism is I
  VARIANT 322: note = Ancestral polymorphism is S, Derived polymorphism is L
MEERRLDTPAMRRISEWILSLEFPSDITIQVGEATFNLHKLPLASRCGYIREQVSGINGSRVTHIDITGLPGGAAAFELVTKFCYGENFELTEDNVAMLRCAAEHLQMTDDDSRGGNLAGRTEAYLEAVALMSLAGAVTVLRRSEDLLPVSEEVDLVGRCVDAIAYFTCNDSQFSMSNGNGMDVSSSKVIIDDWLADELTSLRIDTFQRVVIAMKARGFKGIALGTLIMLYAQKSLRTLDTHGREKQKMEPRQEHEKRVVLETIVTLLPKERNSMSVSFLSMLLRAALCLDTTLACRLDLEKRMAAQLGQAVLDDLLIPIFLPDAGNTFDVDAVQRILVGYLEHEAEADRLDYNTDDDFTSTASPPNDVGMVGKLMESYLAEIASDVDLPVDKFTGLAEMIPERARFNDDGMYRSIDIYLKAHPYLSEAERKTVCRVMDCQKLSREACAHAAQNNRLPVQTVVQVLHHEQRRLREAPTSSFYGGESPTPAPSLQGRHGRSVPDEMSQLQRENEELKMELLRLKMNLRDPSAPPQHSDAPPSGRRPLPKKAAGGSGGFINNVSKKLGRLNPFLRPDAVGGAKVRTKPSRTKDRRHSIG

SEQ ID NO: 1011 - protein, 495 aa, Zea mays
  VARIANT 381..495: note = Derived polymorphism lacks residues 381 to 495
  VARIANT 21: note = Ancestral polymorphism is V, Derived polymorphism is M
MGSVPPAEGDRRQPQQQPHVVMIPYPAQGHVTPMLQLAKLLHTRGFHVTFVNNEFNHRRHLRARGPGALHGAPGFRFTAIDDGLPPSDADATQDVPKLCYSTMTTCLPRFRDLIVRTNAEAEAEGRPAVTCVVADSIMSFGLRAARELGLRCATFWTASACGFIGYYYYRHLVARGIVPLKNEAQLTDGYLDTVVDWIPCAPKDLQLRDFPSFVRTTDPDDIMLNFFIHEVEAMSQASAVVINTFDDLDATLLHAMAKLLSRPIYTVGPLLLTVRNNVPADSPVAAIGSNLWKEQEAPLRWLDGRAPRSVVYINFGSVTVMSNEQLVEFAWGLANTGYTFLWNVRPDLVKGGDSAGAGLPPEFLAATEGRSMLSTWCPQAEVLEHEAVGLFLTHSGWNSTIESICGGVPMVCWPFFAEQQTNCRYKRTEWGIGMEIGNDVRRGEVKALIREAMEGEKGRDMRRRVTELKGSARTEHTQLAHRTVYRTCPVHHRTA

SEQ ID NO: 1012 - protein, 299 aa, Zea mays
  VARIANT 199..299: note = Derived polymorphism lacks residues 199 to 299
  VARIANT 131: note = Ancestral polymorphism is G, Derived polymorphism is R
  VARIANT 76: note = Ancestral polymorphism is A, Derived polymorphism is V
MAEIPVIDLRVAGSAAEESARLRAACERLGCFRVTGHGVPSVLLAEMKAAVRALFDLPDDAKRRNADVITGSGYVAPSPTNPLYEAFGLLDAAVPTDVDAFCALLDAPPNIRETVKAYAEKMHDVIVGVARELASSLGLVEEHSFQDWPCQFRINRYNYTRETVGSSGVQTHTDSGFLTVLHEDECVGGLEVLDPGTGEFVPVDPVAGSFLVNIGDVGTAWSNGRLHNVKHRVRCVAPVPRISIAMFLLAPKDDSVSAPAAFVDADHPRRYKVFNYNDYRRLRLSTGEHAGEALARMAA

SEQ ID NO: 1013 - protein, 892 aa, Zea mays
  VARIANT 9: note = Ancestral polymorphism is G, Derived polymorphism is S
MIDQQRKMGLAVKRVFLLVLLLLSFEVLEGALLRLVTHEVSAVAVTRDAGPGFVSRFRMLLAGLDRHGSRHPHRRHRKGSAPAAPAPAPAPAPAPAPAPAPAPAPVQVQEGRAAPTPTPAPPPPPPHESHRLRNPSHIAPVRSVARRLGGGGHARLPTAAVVALAVAGACLLLLGVAMAAAAAAASLRRSRKLHKKPFKLFSHGSRAHRPTCVTVKVSSHPSADLLCPASAVQSQDYPSLKESTESKTLPVLPTPSISAELIIGEYALKTSTNLQSDEAADDSFRSLPSSHSSGASITESPLQICDKPITDPSPPDSPSSSSYRSLSPDCRSPFCPKTTFTAPSAICHLPENQNEEKTATATDNSGHPEALKVEQANAKIRYLPSGCNSNSCASEATPSETNPASRVSNTDVNLDPKESMRNEAKSKAPGATSTPKTPPPPPPPTKPTSSLNKGQSSGQPPLPPPLPVQLQVGTDGLPLPRLKPLHWDKVRAAPNRSMVWNDIKSNSFAFEFDEQMIESLFAYNFQGQTKNEDPKSKILATSKHVIEHHKLQNTTILLKTLNASTEQVCSSITEGAGLSTQQLEALVKMRPSEEEEKKLLDYGGDTNMLDPAENFVKVLLTIPMSFPRIEAMLYKETFDDEVAHLRMSFALIRGACSELRSSKLFLRLLEAVLKTGNRMNVGTIRGGANAFRLDALLKLSDIRGADGKTTLLHFVVQEMERSQGSKASDKPSGTSGSCQATLAEREGCSEMGTEFVSELSNELGNVKKVASIDLDTLKSSISNLSRGLARLIRLVGKDLTCNDRNQNFLQCMRSFQTHAENTMLELKVDEAEVLQQVRELTEYYHGEVGKNECNLLHIFVIMRDFLGLLDRVCREMRGSKHMQPLNIVLPLR

SEQ ID NO: 1014 - protein, 799 aa, Zea mays
  VARIANT 204..799: note = Derived polymorphism lacks residues 204 to 799
MDEVATAALAAARGRWTQWEEVVVSNDRGSRLVHYYLRGNGEAKELAVVGRERSPRHMSYAVQGRFLRALAAAAGAVAVASSPSRSPLAAAVADGGAPRRWRSRREVVEWLSSLVSGKFSVPGLCLLDLVVDFDDFERGLARLVLFLARFGVTFCVEIALVLGPIEGGSCSGSLLFVFGAFYAVEHEYGEYRCVSVEAAAGFLWANCVTLAFGNRDKRSSSMNVCSIRCCFDLPLLWPSLMALWSRFTSYSYGSSMANRCNGDSYDDSVINCSQVTVSKDVSSREASNDFTWLGASWKCQRSLKHYKSFCRRGITISVHSFVYIMGEEMKRLIAYVEDLYEDTNSCNMVKVQWFGKADEVGVLLPMDFDDREIFFSLGRQDLNVVCIDGLAAVLSAQHYEKFKSDTRYSLWQPYFCYRQIDNGEAKPFDVTQLQGYWSQEVLRTMFNATSCLKVRFKVPKSGPNSDGGLKRKRDAFNNDANRQKFICSGAFTSRFYGENIEHLCPGCHVEVLSQDSGIRGCWFRCLILNRHKDKIKVRYLELQDADETGNLEEWVLLTRIAKPDQLGVRFLGRPMVRPQHVEESKASCFDVGAIVDAWWHGGWWEGIVLCQGGRGRLQVYFPGEKRITEFGEDELRYSLEWVGNKWNPLKGRKDIAHKLTSTADRGSEYLIGKQDHLNFDVLLKPEPQLEGLQYDKRGIEKSSVTTISRDQKRVLADLTNDLKLDSLRWRPRKRSRRSGSRKQSDTSSGSSSGDMDLSSPGPSGFCQLNLVPDDETCKSSGEQPFMGVPVQVPNLVMSR

SEQ ID NO: 1015 - protein, 520 aa, Zea mays
  VARIANT 285..520: note = Derived polymorphism lacks residues 285 to 520
  VARIANT 113: note = Ancestral polymorphism is P, Derived polymorphism is T
  VARIANT 27: note = Ancestral polymorphism is A, Derived polymorphism is D
MNKQVSDETMAERIRHLREEVSGMFQACKNVVDKTNLVDVVQRLGIDHHFEEQIATALASIHSAGLFNSSSLHEAALRFRLLRQQGFWVPADELVKFIKNEDGSFIDGITNDPKGLLSLYNAAHLVTHDEGTTTLEDAIAFARQHLEAARRCSLKSPLAEQVGRALGIPLPRTLKREEAIAFIPEYSSQQDQQVYSPVILELAKLDFNLLQHLHQEELKEISQWWKDLSGEIGLGYVRDRIVECYFWSYTVHYERGQARARMILAKVFMLTSLLDDTYDVHATLEEARELNKAIQRWDESDVSLLPEYLKKFFVKVISNFREFEDELESHEKYRNVYNIKGFQTLSKHYLQEAEWFHHGCTPSFKDQVNVSVITGGAQVLSIGLLVGMGHEATREAFEWAIGDTDAIWACGEVSRFMDDMSAFKNGRNKMDVASSVECYIKEHNVPSEVALARINSLVEDAWKTINQAPFKYPALFPVVQRVTSLAKSMTLLFLDKRDAYTYSKDFQTTLETHFVRHIPL

SEQ ID NO: 1016 - protein, 158 aa, Zea mays
  VARIANT 25: note = Ancestral polymorphism is P, Derived polymorphism is H
  VARIANT 15: note = Ancestral polymorphism is R, Derived polymorphism is H
  VARIANT 14: note = Ancestral polymorphism is R, Derived polymorphism is C
  VARIANT 11: note = Ancestral polymorphism is V, Derived polymorphism is G
MVAAAAAVRPVSFRRLGVLLRAPLPCGLTTSRVAAPFPRRTADSMKICQLQLTATRFSKQNNSGEDDELLSELKDKWDAMENKSSLALYGAGAILAVWISLVVVRSLDSVPLLPGILELVGLSYSGWFVYRYLLFQENRKELAGVIDDIKRRIVGDDE

SEQ ID NO: 1017 - protein, 227 aa, Zea mays
  VARIANT 17: note = Ancestral polymorphism is V, Derived polymorphism is G
  VARIANT 24: note = Ancestral polymorphism is Y, Derived polymorphism is C
MGNSMGGKRRRARVMTVDGTTYKYRAPAAAGDALREHPGKGNHLLESEEVRRLGLRARPLDPDAPLKPGKLYFLVELPPPSSAAHHHRRARAPQRTWSGALHYGAVAGAGERLESLMLARRSASDVAASSSVGDGGALRLRVRLPKADVQRLVDDSRDAADAAERIMQLCVARDQQRRHRSAPATPLAVPVPPAVVSVTSTSSSRKDDGSGGSNKPAAATTGKKERT

SEQ ID NO: 1018 - protein, 88 aa, Zea mays
  VARIANT 25: note = Ancestral polymorphism is E, Derived polymorphism is K
  VARIANT 37: note = Ancestral polymorphism is A, Derived polymorphism is E
MDNDKSEVSPAARVQCEGVVFTVTKGNEVARVTKGGEARVVLSSESYFDADTCTRHHFVDVQGKAEAMLFFVSVREDLNRIVSVRRFS

SEQ ID NO: 1019 - protein, 105 aa, Zea mays
  VARIANT 1: note = Ancestral polymorphism is M, Derived polymorphism is R
  VARIANT 5: note = Ancestral polymorphism is A, Derived polymorphism is T
  VARIANT 8: note = Ancestral polymorphism is Q, Derived polymorphism is P
  VARIANT 17: note = Ancestral polymorphism is D, Derived polymorphism is N
  VARIANT 58: note = Ancestral polymorphism is V, Derived polymorphism is L
MDLQAKVQRQSIDREMDNEGNDKSEVSPAARVQCEGVVFTVTVGNEVAMVAMGGTARVLSSESYFDADTCTRHHFVDVQGKAEAMLFFVSVREDQSRIVSVRRFS

SEQ ID NO: 1020 - protein, 88 aa, Zea mays
  VARIANT 24: note = Ancestral polymorphism is V, Derived polymorphism is A
  VARIANT 40: note = Ancestral polymorphism is R, Derived polymorphism is H
  VARIANT 43: note = Ancestral polymorphism is S, Derived polymorphism is N
  VARIANT 73: note = Ancestral polymorphism is S, Derived polymorphism is F
MDNDKGEVSPAARVVQCEGVVFTATEGNEVARVTKGGAARVLSSESYFDADTCTRHHFVDVQGKTEAMLFFVSVREDLNRVVSVRRFS

SEQ ID NO: 1021 - protein, 366 aa, Zea mays
  VARIANT 248: note = Ancestral polymorphism is P, Derived polymorphism is L
  VARIANT 101: note = Ancestral polymorphism is G, Derived polymorphism is R
MLHSQYASQTSKQNPGTNQQLEIEMTAEKSRRLITSDCGGGGADAKPEAPVSEGVVNGDKWPRFADLGGMEQVLDQLLVEVLVPLRRLELPNYLGVRPVAGLLLYGPPGCGKTTLAHAIANETGVPFYKISAPDIVSRVSGFMQKTSHNACVLAGGSEENIRGLFQKAYRTAPSIVFIDEIDAIASKRENREMERRIVTQLMTCMDEFHQNIGGDGSDVDSSKKKPGYVIVIGATNRPDAVDQALRRPGRFNRDIYLGVPDVNLRKQILMMLAWKLRLEGQFDFLKIARATPGFVGADLKALVNNAGYLAMKRLINKRRAQYCSEVKVKWWKQLSWDAGEMESVHVTMNDFEVYLFHIELTIRFLF

SEQ ID NO: 1022 - protein, 181 aa, Zea mays
  VARIANT 116: note = Ancestral polymorphism is G, Derived polymorphism is R
MFASRPVVHPLEVAAPAHPVQQPAPGVLMKDLPGMPGTPGGLGLRVLQLLFAAISLAVMSSTADFASVSAFCYLITTTVLQCVWSLTVAIVDIYALLVKRCLRNRRAVTLFSIGDGITWLVSLSGACAAAGITVLIDADLIMCSENPCASFQTAVAMGFMCCFSLLPSFLLNFYSIASSHG

SEQ ID NO: 1023 - protein, 220 aa, Zea mays
  VARIANT 93: note = Ancestral polymorphism is G, Derived polymorphism is C
  VARIANT 75: note = Ancestral polymorphism is E, Derived polymorphism is V
MGRQPCCDKVGLKKGPWTAEEDQKLVSFILGNRQCCWRAVPKLAGLLRCGKSCRLRWTNYLRPDLKRGLLSDAEEKLVIDLHAQLGNSNYYPGFCTDEVPMMDPDEIMVPLDDGRTAPPTSTIFSTTTTTSYSAASDSVSSSLSRDEDPLFPLMDLEFPDIAFQMGLLDDMVASWDDSLAQQPLSPSPVYDDDYANQLQIRSGVAFDQEPGNKIVLFSSY

SEQ ID NO: 1024 - protein, 106 aa, Zea mays
  VARIANT 3: note = Ancestral polymorphism is I, Derived polymorphism is K
  VARIANT 59: note = Ancestral polymorphism is G, Derived polymorphism is C
MKKEVIGNDLGLPMTSRINVVGASNGRATRTVVMTPEFSPRGRGSSSRPLSNRFNNRGCLQAGRGRGQFQGRGRGRGRGRGRKPEKTADELDKDLESYHAEAMKTD

SEQ ID NO: 1025 - protein, 862 aa, Zea mays
  VARIANT 508..862: note = Derived polymorphism lacks residues 508 to 862
MRRTRSQSASGVNPPPAAGPSAEVAGRRRASPAANGKSPATKVETASPLRDARRKGRPKTESKDNASVKPCSAGSCEKNNLEEQTESLDNIDATEMDWEEGHVEHIEDSVELRETMTVEFNDIPSSTKKKSVRRPSAEEKELAELVHKVHLLCLIARGRVVDKACYDTLIQASVLSLVPCHLLWSLVDVPNLKAVNLRSLVSWFHRTFCVTAQSTDRGSFESNLAFTIQDHVGTAEEICALSVALFRALNLPARFVTNLDVAGLKTDTKVKGTFSQDASRLCTRALPCGSPLSGDNVISSPALLKDNSQGSASMNQQTGDLGKLKQTSACKRSLYKTLSSIKSDHESSCASTSKDKSSSNQFPSTSSNNAEVLKRKGDVEFELQLEMALSATAAETQNNKLATHMNQLTVSLQDSSSPLKKLRQNVEALSSSSAVWSRSAGAPLYWAEVYCGGQASTGRWVHVDVVNNLIDAEQNVEASSAVCKKPLRYVIAFAGNGAKDVTRRYCLQWHRIAQGRVNSEWWDNVLAPLKQMELAATNNYEDMELQTRALTEPLPTSQQAYKDHHLYALEKWLHKNQIFHPKGPVLGFCKGHPVYPRSCVQTLQSRHGWLREGLQVRENELPAKVVTRPKRTFNAQSVQSSGNEDGLKPTLELYGEWQLEPLQLPHAVNGVVPKNERGQVDLWSDKCLPPGTVHLRLPRLFQVAKRLGIDYAPAMVGFDYRSGRCLPVFDGIVVCTEFRSAILEAYAEEEEQRRAVEKKQEEAQALSRWYQLLCSIVTRQRLKDSYKTPSHGIGNEGLPENDNVHRSTLSSRSSEREPSSSKLQTDHDHDHEFPKEDQSFDEETFVRTKRCPCGFSIQVEEL

SEQ ID NO: 1026 - protein, 343 aa, Zea mays
  VARIANT 210: note = Ancestral polymorphism is D, Derived polymorphism is A
MLGGQSETVKYRVFAGTWNVGGLAPPDDLDLEDWLDTKNDSYDIYVLGFQEIVPLNARNVLGPKQRRAAMKWQLLIGDALNSTRHGAAGMHGQGQGGAFRCLMSKQMVGIFVSVWTRSSLCRHVRHPGVCSVGAGVLGRLGNKGAVSVRFLLHGTSFCFVCCHLASGGEKGDALRRNADAAGILSRTSFLGFGGVAAAPGEVPKKILGHDRVVLLGDLNYRIAMDDDEARQLVRARKWGMLLEGDELLLELSSGRQFHGWHEGHVTFAPTYKYSRNSDHLHWCADGVAAGREKQHRAPAWCDRILWRGKGMKQVRYERCGCYRLSDHRPVRALFHAVCELADG

SEQ ID NO: 1027 - protein, 158 aa, Zea mays
  VARIANT 121: note = Ancestral polymorphism is T, Derived polymorphism is M
  VARIANT 95: note = Ancestral polymorphism is L, Derived polymorphism is P
  VARIANT 90: note = Ancestral polymorphism is S, Derived polymorphism is N
MNPAPAVVPADIASLNRAWIQPPMHAHGALALRDAGSPRALSSVDRASCRCSWNSRSMPQRLMLIFVPKAVRAIGRCAIKLERAAERCISVLLELIKIKVNYVVQEAIIVIKDIFRRYPNTYESIIATLCESLDTLDEPEAKASMMIIGEYAERIDNG

SEQ ID NO: 1028 - protein, 875 aa, Zea mays
  VARIANT 12: note = Ancestral polymorphism is S, Derived polymorphism is R
MMRVAVVGGGLSGLVAAHELARSGGARVTVYEKEDHLGGAKTVAVNGGSGPVLVDLDFMVFNRVTFSNMMEWFERLGVEMEKSDMSFSASLRLNEGKGFEWGTRNGISSVLVQKSNLLSPRFWLMINEIFKFKNHALKYQEDYARNPDKNETFGQFIQSHRYSQLFQDAYLIPMCACIWSCPPQNIFGFPAGFVLSFFCDNHLLELFSPLQWLNVKGGSGCYVKKVREELESMGCQIKTGCEVRSVSRFNGETGYRILEADGSEEMYDRIIFCVHAPDALKILGEEATPHERRVLGAFQYIYSDLYFHCDESFMPRNSSAWSAMNFLGTTSSGVCVTYWLNILQNIESAGPFLATLNPPRVPDHVLLKWHTRHPIPSMAAARATLELNSIQGKRGIWFCVPYQQGYGNHEDSVKAGKAVTLGLLGKKCDLLVNPKPMIVPSWTEAGVRYMVAKNLGKFITIGNFSMLEDGGTSLSFGKTCERCQLKCVIRVHNPQFYWKIATEGDPGFAYSYINGYISFVDKKEGIQNIVEIIIANRGERKRLSSTRARNKSGYVKKGWWTPLFKKNGAAMAKYVLHEVLRRNTISKARKNISAHYDLSNDFFALFLDPTMTYSCGIFKAEDESLEAAQLRKLDNLINKAKVDPGHHVLDIGCGWGSLAIRLVKRTGCKCTGITLSEEQLKYGKRKVKEFGLEDHITLLLCDYRQIPNGQKFDRIISCGMLEHVGHEFYEDFFASCEYHLAEHGLLVLQSIAVPEELYDKMRTKPDFLKEYIFPGGCIPSLARIASAMSNASRLCIQHVENIGYHYYPTLIHWRENFEANEEKVLALGFDEKFIRTWEYYLNYCAAMFKSHMGLDYQIVFARAGDAKLPSYVAIA

SEQ ID NO: 1029 - protein, 406 aa, Zea mays
  VARIANT 339: note = Ancestral polymorphism is S, Derived polymorphism is F
  VARIANT 373..406: note = Derived polymorphism lacks residues 373 to 406
  VARIANT 381..406: note = Ancestral polymorphism lacks residues 381 to 406
  VARIANT 396: note = Ancestral polymorphism is Y, Derived polymorphism is C
MQIREGPARRQAPSAAGALRSPMSAMMLAMFATMASFYVAGRGNFVDFWNFRLWQDAQNRLHLIKELDRRTGQGQSAISVDDTLKVVACRQQGKRLASLEMELAAAKHKGFVGKYTPETNGTHSGKKPLIVIGIMSSFGRKNYRDAVRKSWLPTDTPRAQHLCEIVVDASLIVPLCTGSMLKKLEEEKGIVVRFVVGRSANRGDTFDREIDDENRSTKDFLILDDHIESDEELPKKTKSFFANAAETFNAAFYAKVNDDIYINVDTLSAMLETHWDRPRVYIGCMKSGEVFSDLAPLNTEPTSGTNQTGGNLVMGNRMYFRHASGEMFVISRAIAQFISINKSALRTYAHDDVSVGSWMIGLAVNHSFGGGLYEPVHTDYWIGYLVFLFQRKGLAYFLCKATTLES

SEQ ID NO: 1030 - protein, 361 aa, Zea mays
  VARIANT 113..361: note = Derived polymorphism lacks residues 113 to 361
MVAAPVAIVPGCHGPWVAVVPLGGQDASACTNFLDADFRTKIDMGKGKDKVDGDNCTRERTILWDEDQTKFMLGWYMDFIKDQHAGFKVKKQHHFKCAESLNRQFNMGVTATQVERHFRHYKENWKFIATALNKSGNTFDTTRSMVIISESEKEKLKDRARRLLSKPIKFFNEMQELFLDSSADGSLAMDATTCLNESQPVDDNDNDDDICNDVSNYGQPEDDLGDDSDTLPSPKIPSQVIDQSSSSSGIKRPRGDAIPVKRDVRPRSRMAKIGDEINTTLMDLRNELKQPPPPPIIPSLNSDAELWQRLEKMTLTTDQKLIVGTFLASKDQKGMRGFLSASAETTFQSWVFKFLSDSTLL

SEQ ID NO: 1031 - protein, 928 aa, Zea mays
  VARIANT 113: note = Ancestral polymorphism is L, Derived polymorphism is Q
MAAMTRHFRDSSTSSDPAAATPPLPPPLPDLGVALSAADLRVTAYELLVAASRATGAKPLTYIPQPTTAASKLKGAFGLGSSPPSKVGRAAVLELVRVRMGVTEQADATIRRLLLRVAAGQLGRPAESMVLPLEFLQKCKASDFPDPLEYEAWQMRNFKLLEAGVLVHPLIPLKKSDIPAKRMQRIIHKAYVGQVEAGRNSESMQILHNTVMSLACRSLCETSNECHWADGFPFNLHIYKMLVEACFDVEEGTVVDEIDEMMELLKKTWPVFGVTQMLHNLYFTWVLFNHFVILGQEDNGLFSAIENLLVEVAKDAKITKDPDYCDVLSSTLISIMGWEEKRLLAYHETFGGSNLYSMQYTISIGISAAKILFEDVSYEYHSGTNRDIDVVRSRIETYIKSSIRTTFAQKMKEAGSNRSSRNRTPVLSILAKKTTELAIKEKNVYSPILKKWHPFAAGVAVATLHGCFGNELKKFIVGLTELTPDTAQVLKAADKLEKDLVHIAIEDSMDVGDSGKSLISQMPRYEAGTVMDNLVKSWAKEQLDRLKIWTDQKLQQQTWNPEDKDKDNFAHSSVEMLHRIEETMDAFVRLSIPIRSTLLADLTAGLDKCLHYYVSNVKSGCGTRSSLFPQLPHLTRCDVGSKLFKKNEKPQFLMKRGSQVGSTTGNEASSLRGLCFRINTIYYIQTELENLHMKTKECLQKVELFQPDNADDLNINFGLSQAACQEGIRQLCETTAYMVMFNDLSHVLLNTLYVGSPASNRILPLLKELGPILRIISDTVHNEVQNRLITALMKASFDGFLLVLLAGGPTRAFSCQDYQVIEDDFRALRGLYLSYCDGLPEELVGKASSEVKNILPLLRTDTETLIERFKQLISESYEPTTASRFPMPPVPARWSPDNPNTILRVLCYRNDEIATKFLKKTYDLPKTL

SEQ ID NO: 1032 - protein, 409 aa, Zea mays
  VARIANT 54: note = Ancestral polymorphism is A, Derived polymorphism is V
  VARIANT 70: note = Ancestral polymorphism is P, Derived polymorphism is L
  VARIANT 84: note = Ancestral polymorphism is E, Derived polymorphism is G
  VARIANT 87: note = Ancestral polymorphism is T, Derived polymorphism is I
  VARIANT 114: note = Ancestral polymorphism is P, Derived polymorphism is S
  VARIANT 132: note = Ancestral polymorphism is C, Derived polymorphism is F
MASHPEHPAEPRAPPAPTTIGDLSDDLLREILLRLPSLPSLVCASLSCRAFLAAVRSSRTFRRRFRALHPPPLLGFFFDPDGNENPTFMPIRRGSDRGHAAAVRGLDAFLTRVPHEDDVFPGWQIMECRGGCLLLLNWRTKQLAAYNPLTGALDLVPKLPDDICKGHRGKFISGDFFLVVPDDEAPDRRSFRVVSSCHDKYRVRVAVFSSATRKWQILPWSEPVPTQPASGKYWLLSGRQVSGFLCWSHHKNAYKVLLDTATLQFSVIDLPYGLSGQGHLYRTGDTKDGKLCIVAAIDFSLFVWFRTPDAGGIDRWVLRHVLQLEDEVLEATEGSRNELEQLKVFAILDGIVYMTTFETFRDATLPCWYLSFCLETRKLEKLFYVKANGHAHPYFMPWPTALVGNNLSP

SEQ ID NO: 1033 - protein, 256 aa, Zea mays
  VARIANT 15: note = Ancestral polymorphism is A, Derived polymorphism is S
  VARIANT 6: note = Ancestral polymorphism is R, Derived polymorphism is P
MDEWIRQAEVWVRQSESWIRQQPPEQIYVAATVVAVTILLLIVASYLKSSKPSTIVLSGLSGSGKTTIFYQLRDGSSHQGTVTSMEENSDTFVLHSEQERKGKVKPVHIVDVPGHARLKPKLDEVLPKAAGVVFIVDAQDFLSSMQAAAEYLYDILTKASVVKKRIPVLIFCNKTDKVTAHSKEFIKKQLEKELNKLRESRNAISSADISDEVQLGVPGEAFNFSQCQNKVAVAEGAGSTGNVLAVEQFIREHVRA

SEQ ID NO: 1034 - protein, 408 aa, Zea mays
  VARIANT 208: note = Ancestral polymorphism is R, Derived polymorphism is L
  VARIANT 209: note = Ancestral polymorphism is S, Derived polymorphism is C
MVVAAMRDEGEEGRRRAVVAIRDYDPKTDRDGTEAVERECEVGPAAAAGGMSLHADLLGDPVARIRHSPHYLMLVAETSGPDGRIVALVRGTVKSVASGKSRPGAPAFARVGYILGLRVAPSHRRMGIARQLVHRLEQWFELMGAEYAYMATDRSNEASLRLFTGRCGYSKFRTPSLLVHPVHSHRLRPPPRATVVRLGARDAERLYRSRLAHVEFFPADIGAVLGNALSRGTFLATVGGYEWGGVDRFLACPPASWAVASAWDCGGVFRLQVRGASRLRRAAAAATRALDRAAKWLRVPSVPDFFRPFAGWFVYGLAGSGGRDAAMAAEAVFASIVNMARGRAAAVAVEVAAMDPLRGRIPHWRRLSCTEDLWCMKRLGAGGGGHADGWDWARSAPGRSIFVDPREV

SEQ ID NO: 1035 - protein, 579 aa, Zea mays
  VARIANT 153..579: note = Derived polymorphism lacks residues 153 to 579
  VARIANT 5: note = Ancestral polymorphism is S, Derived polymorphism is R
MDLLSRGAVFKALVFLCFIRSSQGGDLNLPPLVKASRFQSEAYDYIIVGGGTAGCPLAATLSHKYKVLLLERGGSPYGNRNITLLENFHICLADVSPQSPSQAFISTDGVINARANVLGGGTCINAGFYSRAKPSFVQQAGWDAELVNQSYPWVEERIVHWPKVAPWQAALRDGLLEAGVSPYNGYSYDHLYGTKVGGTIFDDTGRRHTAADLLAAGNASNLRVLLHATVDKIVLARKHGGGRKQPRATGVRFRDENGAHHQAFLTRKRGSDVIVSAGAIGSPQLLLLSGIGPRGQLSRHNVSLVHANEHVGEGMSDNPMNSIFVPMKSPTKQSLIETVGITDAGVFIEASSGFSQSDDSIHCHHGIMSAEIGQISTIPPKQRSLDQIQEYVRNKHSLPKEVFDGGFILEKIDGPLSTGSLVLADTDVDSNPSVSFNYFQHPQDLRRCVYGIQTIERILKTNHFANLTANGAGYPMETLLNLSVSANINLIPKHTDDTTSLEQFCRDTVTTIWHYHGGCHVGKVVDRHYRVIGISGLRVIDGSTLFSSPGTNPQATVLMMGRYMGVKILRERLGRAAGV

SEQ ID NO: 1036 - protein, 189 aa, Zea mays
  VARIANT 77: note = Ancestral polymorphism is R, Derived polymorphism is P
MMLGKRSGRPSPAARQHMRRTTSMTEFAAPHVLVDVAEEEEDEELQLLPAHAEATGEAAEQEDPYGWAIGGAAAAGRADWLAAYRARAAPALAGLRRNSADFSAAETAAFLRACGLCNRRLGPGRDTFMYRGDTAFCSLECRQQHITIEEWKEKCALATPPTAPASDPVVPLPPSGAGSDKPGTLAAAS

SEQ ID NO: 1037 - protein, 114 aa, Zea mays
  VARIANT 62..114: note = Derived polymorphism lacks residues 62 to 114
  VARIANT 60: note = Ancestral polymorphism is E, Derived polymorphism is K
  VARIANT 50..114: note = Derived polymorphism lacks residues 50 to 114
  VARIANT 41: note = Ancestral polymorphism is R, Derived polymorphism is W
  VARIANT 9: note = Ancestral polymorphism is P, Derived polymorphism is S
MESLCVGVPMLCWPFFVEQQTNCRYTCMKWGVAMEIGQDVRQEAVEEKIREAMGGEKGMEMQRRAGEWQQTGLRATRPGGRSYANLDKLVADVLLSGGGKSSQEGFSSHTATVQ

SEQ ID NO: 1038 - protein, 635 aa, Zea mays
  VARIANT 600..635: note = Derived polymorphism lacks residues 600 to 635
  VARIANT 208..635: note = Derived polymorphism lacks residues 208 to 635
MSTSEAAATNGTAAATPPEIDNNHLKRKSSDIGWEWGCLCDPNDKNRVKCLLCGQGSTAGIYRLKQHLAHVGTSIVKCPKVTEEVKQKCKRNLDETAKKKKDKQQHDKEVRENVQLATCEEEVTEVESLAGSSSTPRKLGPMDKFTRPIDPKLSNAEAKRQQNINDALWKERTHQVQQYVARWVYTHAIPFHAIDNDEFKEMVEAIGQFGPGFQPPAQHDLRGRLLEEEHARTKSLLQDREDEKIKHGCSIMTDAWTDMKRRSIMNLCTNTSEGTTFIKSMEMSDVSHTSEVIYEMVDKAIEDVGAENVVQIVTDNASNNMGAKALLHLKRPNIFWTSCATHTINLMLQGIGNLPKFKKTIDLAKSFTIFVYGHHRTLACLRSSTLKREIIRPGVTRFATAYLTLQSMMEKKDCLKKMVVDSKWYDLPDVKSKKGKDATATVLNPRFWRGVSLCLKVFEPLVKVLRLVDGDVKPSMGYVYRELLKAKREIKEAFGNVENKYREVMAIVDKKMKDRLDSPLHVAAYMLNPYYSYNNLAIFSDSNVVEKFMQCVETFYDGNDEKEYRAVNEDLDKFQKRQGSFSKKMARSCERFEFQPASWWRLYGGGAPDLQYMAIRILSLTSSSSGCERNWSTFE

SEQ ID NO: 1039 - protein, 372 aa, Zea mays
  VARIANT 90: note = Ancestral polymorphism is P, Derived polymorphism is L
  VARIANT 142: note = Ancestral polymorphism is A, Derived polymorphism is T
  VARIANT 148: note = Ancestral polymorphism is A, Derived polymorphism is V
  VARIANT 162: note = Ancestral polymorphism is V, Derived polymorphism is L
  VARIANT 170: note = Ancestral polymorphism is A, Derived polymorphism is T
MTKQGMVVPVPEAAVAVPPNSAPLFQYPPPRAAPGVAVRKKCLQMGAGAGRIGGWVESMRASSPTHAKAAAALAAGVEEERYAAWMVKHPSALAMFDQLVAASKGKQIVVFLDYDGTLSPIVDDPDAAYMSDTMRRAVRSVAKHFPTAIVSGRCRDKVFEFVKLAELYYAGSHGMDIKGPAKGSRHTKAKGGGVLFQPASQFLPMIEQVHDSLVEKTKCIPGAKVENNKFCVSVHFRCVDEKSWITLADMVKSVLKDYPKLKLTQGRMVFEVRPTIKWDKGKALEFLLESLGYADCTDVLPVYIGDDRTDEDAFKVLRKRGQGVGILVSKHPKDTCASYSLQEPAEASIPRVMEFLLRLVEWERLSKARPKW

SEQ ID NO: 1040 - protein, 157 aa, Zea mays
  VARIANT 28: note = Ancestral polymorphism is L, Derived polymorphism is H
  VARIANT 88: note = Ancestral polymorphism is S, Derived polymorphism is Y
  VARIANT 95..157: note = Derived polymorphism lacks residues 95 to 157
MRTPAMLRWATALAVLLAVVAPVAGFYLPGVAPTDFAKILNASVAKRFGNDAVDNRNLGEFVSANVPTVGKFISDFSRSEAPSVPALSVISYVMRCLQRYSYGGKLLLATTKLQDPGTCRLCGSPRQYELQLMSSLPTFSMKLEMTPQIMYPAAGLG

SEQ ID NO: 1041 - protein, 267 aa, Zea mays
  VARIANT 158: note = Ancestral polymorphism is H, Derived polymorphism is D
MRARDLLGFPPAGAAMSSAAALLLLPLLTVAGQGPVCQRPPVAAVILQQASTCRAVDAPGLRGHRAGFVEGDDGALQKAVALVLQNREDFVAILFYASWCPFSKIFRTDFQKLSSFFPTIAHFSFEESNIKPRVLSRYGVRAFPTIFLLNSTVRVRYHGSRAMNSVAMFYKDVTGLNPVSLDATCLERMEDSVTIVDHGKKAEKDDSLLSWARSPDRLLHQDTCLALASSFVLLRLLHFLLPKLNACMKQAWRMRLYELNRLFPSLS

SEQ ID NO: 1042 - protein, 166 aa, Zea mays
  VARIANT 64: note = Ancestral polymorphism is R, Derived polymorphism is H
MAMSLSRFSQWIWPGSRTRNPRGREPPAGSTALTEGLFPDSPSGFRDPDPGSGAAQRRKGKSRRRGGRVEAKVDGEHGMVIVQSDGDGCLSDSDSDGSDWSIGWLEPLAPDLQSDVDSEGSFAVLVRCYRRGRADRPDRPDGKFPAPGGVAHGHGGVSGNKNFVEQ

SEQ ID NO: 1043 - protein, 92 aa, Zea mays
  VARIANT 58: note = Ancestral polymorphism is R, Derived polymorphism is G
MEERRRPRGSASGWRRPSSRAAGAALRRKVRELRRLVPGGEEAPAGALLVRTADYIVGLRARVDLLRALAAVYGVGVGAVVADAADADACAS

SEQ ID NO: 1044 - protein, 126 aa, Zea mays
  VARIANT 13: note = Ancestral polymorphism is G, Derived polymorphism is E
  VARIANT 15: note = Ancestral polymorphism is R, Derived polymorphism is W
  VARIANT 18..126: note = Derived polymorphism lacks residues 18 to 126
  VARIANT 19: note = Ancestral polymorphism is S, Derived polymorphism is R
  VARIANT 72: note = Ancestral polymorphism is T, Derived polymorphism is I
  VARIANT 92..126: note = Derived polymorphism lacks residues 92 to 126
  VARIANT 109: note = Ancestral polymorphism is P, Derived polymorphism is L
MASNGSDMVMMYGTRRCWSHPSSPSQRLSPSRYHNSWIPNLRRMLMLTITACTQSRAFYRDEIMSAIEKHITAWTFFLGGSATLELQSVLIQTEIMFGCSEGYNAFLFPMQMEVMLLQNGSHVTTK

SEQ ID NO: 1045 - protein, 148 aa, Zea mays
  VARIANT 55: note = Ancestral polymorphism is K, Derived polymorphism is M
MQQEGTPMPAVMDPQAENFDALVTAKISMDASLAGGIMGKGRVNTKQTSRVTCVKLSIRNHESNPKLKNIELEGNFNQINQTNDFARSHHDHQCKHAGEKPICCRARQREGEAAALGQEQQLQDEVVRDLREGCLYFRRPVPLRPWRE

SEQ ID NO: 1046 - protein, 142 aa, Zea mays
  VARIANT 81: note = Ancestral polymorphism is V, Derived polymorphism is M
  VARIANT 94: note = Ancestral polymorphism is L, Derived polymorphism is F
  VARIANT 106: note = Ancestral polymorphism is L, Derived polymorphism is M
  VARIANT 116: note = Ancestral polymorphism is V, Derived polymorphism is M
MSYLLPHLHSGWAVDQAILAEEERLVIIRFGHDWDETCMQMDEVLAAVAETIKNFAVIYLVDITEVPDFNTMYELYDPSTVMFFFRNKHIMIDLGTGNNNKINWALKDKQEFIDIVETVYRGARKGRGLVIAPKDYSTKYRY

SEQ ID NO: 1047 - protein, 50 aa, Zea mays
  VARIANT 30: note = Ancestral polymorphism is R, Derived polymorphism is H
MARTGSGKTAAFLVPMLQRLRRLDPSAGVHALILSPTRDLASRDADAQVL

SEQ ID NO: 1048 - protein, 115 aa, Zea mays
  VARIANT 31: note = Ancestral polymorphism is P, Derived polymorphism is Q
  VARIANT 42: note = Ancestral polymorphism is G, Derived polymorphism is S
  VARIANT 45: note = Ancestral polymorphism is H, Derived polymorphism is Y
  VARIANT 49..115: note = Derived polymorphism lacks residues 49 to 115
  VARIANT 50..115: note = Derived polymorphism lacks residues 50 to 115
  VARIANT 51: note = Ancestral polymorphism is A, Derived polymorphism is V
  VARIANT 55: note = Ancestral polymorphism is M, Derived polymorphism is L
  VARIANT 107..115: note = Derived polymorphism lacks residues 107 to 115
MERLISVGADLIVRSLLVAELVMFSSCAEEPLLVRAARGEDGIPHWMMRQAGRYMAEYQASAKGKLTFGHQVRGASSCEVLRWDFDLKVQGDAYGVDVRYRDNKTGQHVGTGSEP

SEQ ID NO: 1049 - protein, 166 aa, Zea mays
  VARIANT 83: note = Ancestral polymorphism is L, Derived polymorphism is F
MSSRHIPTKRSTRVVVPYNPETSVGLQAALVAPASAHLHVAEPVRRSARIITLQAVTTTDRRRNTPYCMMTSSRFCVDDGSLFCKLCDRRMHDRIIYMYMSMGFCTEECRNEYFLDYRCRLTMATVEAEGRSEARKPVEAAAATTEGQGVGYRRIFFTCAEVESFP

SEQ ID NO: 1050 - protein, 539 aa, Zea mays
  VARIANT 143..539: note = Derived polymorphism lacks residues 143 to 539
MAGGGAAPPPKQEELQPHPVKDQLPSVSYCITSPPPWPEAVILGFQHYIVMLGTSVIIPSALVPQMGGGNEEKARVIQTLLFVAGINTLCQSFFGTRLPAVMGGSYTIVAPTISIIMAGRYSNEADPREVVEFSEKFLRTMRGTQGALIIASTIQIVLGFSGLWRNVVKLLSPLSAVPLVSLAGFGLYELGFPGVAKCVEIGLPEIILMLIFSQYLPHAVHAAKPVFDRFSVIFTIAIVWLYAYILTVSGAYKSARTKTQLHCRVDRSGLVGGAPWISVPYPFQWGAPTFDAGESFAMMVAAFVALVESSGAFIAVSRYASATMIPPSVLGRGIGWQGIGTLLGAFFGTANGTAVSVENAGLLALTHVGSRRVVQISAGFMIFFSVLGKFGAIFASIPLPIFAALYCILFAYIGACGLSFLQFCNLNSFRTKFIMGFSLFMGLSVPQYFNEYTSVAGYGPVHTGARWFNDMINVPFSSKPFVAVLVAFLLDNTIQVRDSGVRRDRGYHWWDKFRSFKTDSRSEEFYSLPFNLNKFFPSV

SEQ ID NO: 1051 - protein, 186 aa, Zea mays
  VARIANT 48: note = Ancestral polymorphism is R, Derived polymorphism is L
MGNCQAAEAEAVVIQHPGGKVERLYGAATAAEVMRGNPGHYVALVVLRVSAGGGKQGADPDPSAGAVSAGAGAGTRITKVKLLKPRDVLLLGQVYRLITSQEVAKAIQARREDKMRRCGAGEVVVVDDQRGPGRHAAAAGSQGQGRSSDDQEVKRPEKSDRQHRTGGRARGRHWQPSLRSISEAAS

SEQ ID NO: 1052 - protein, 270 aa, Zea mays
  VARIANT 19..270: note = Derived polymorphism lacks residues 19 to 270
MSLASGLFGTNGGAFVVSQAVDQHAKRGAVADGEHADGSEPKPATQACCSPCWVTRILTTSYGIKEGGWSSLLLLPLLGDSSCYTGLLMKRCIDSSPNIGTYPDIGQAAFGVVCRIFVSVVLYLELYASCVEYITLLGDSMSSVFPLAHFDLNAHTLFAITTALAILPTVCLRNLSLLSYLSAGGVMATIAVIVFLFWVGSCSALVMALLGSVFTMLVALILPCACYLSIKKGAVPLWEIILCIVIIMIGAVCACVGSYTSVSQMISSTR

SEQ ID NO: 1053 - protein, 478 aa, Zea mays
  VARIANT 408..478: note = Derived polymorphism lacks residues 408 to 478
MRRRSTSCSPPRCSAAASRAPWSLRPWSWPARRSSRPPRSPSHPRPFTIAGAAWWRRSCSRSRGGVRGNRPGLARRGEACGGAASVTEGGVPRGRLRNSPRRRSRSRGGVCRSVSFPFRPSRRPPLPRAAAARTAAPSATPRGRLPPPLVLLYSVGTGFGEFFFQALLYGVAWASWVPYFSSSLGIIYVLAKPAIYAIISGEVLSTDQGKAQGFIATVQSVAILLAPQFMSPLTSYFISEEVPFDCKGFSFIVASFFLGFAIGSAALVSLALFGAFISRAGVKVVHVLSPKVFIGLIVGAMLPYWFSAMTMKSVGSVTLKMVEEVRRQFNTIPGLMEGTAKPDYATCVKISTDASIKEMIPPGALVMLTPLIVGTLFGVETLSGVLAGALIAIFAPNTGGAWDNAKKYIEAGASEHARTLGPKGSDCHKAAVIGDTIGDPLKDTLGPSLNILIKLMAVESLVFAPFFATHSGLLFKYL

SEQ ID NO: 1054 - protein, 426 aa, Zea mays
  VARIANT 265: note = Ancestral polymorphism is D, Derived polymorphism is Y
  VARIANT 67: note = Ancestral polymorphism is P, Derived polymorphism is L
MAAALASSRYCWSRPSLPPQPTRGRRSVTSCALSGREKRNSFSWRECAISVALSVGLITGAPTFGPPAYASSLEPVLPDVSVLISGPPIKDPGALLRYALPIDNKAIREVQKPLEDITDSLKVAGVRALDSVERNVRQASKALNNGRSLILAGLAEPKRANGEELLNKLAVGFEELQRIVEDRNRDAVAPKQKELLQYVGTVEEDMVDGFPFEIPEEYSNMPLLKGRATVDMKVKIKDNPNMEDCVFRIVLDGYNAPVTAGNFVDLVKRKFYDGMEIQRADGFVVQTGDPEGPAEGFIDPSTGKIRTVPLEIMVDGDKAPVYGETLEELGRYKAQTKLPFNAFGTMAMAREEFDDNSASSQVFWLLKESELTPSNANILDGRYAVFGYVTENEDYLADVKVGDVIESIQVVSGLDNLVNPSYKIVG

SEQ ID NO: 1055 - protein, 940 aa, Zea mays
  VARIANT 321..940: note = Derived polymorphism lacks residues 321 to 940
MVGTEGSELDISTIIADLFDQKGGHLSPEALKHYLSAGEKLYKMSSKIYKEICYFEASIKRPFFNVKTLDDDQLENWHQYLDFVEKNGDFDWAVKLYERCLIPCANYSEFWIRYSEYVDAKGGREIANHALGRASSCFAKEVPAFCMYYALFKEQIGDALVARSVFTKTRSYFTSGFYANINRLANMEKRMGNTKAASEIYETAIEDAMQKNNIELLPDLVCITLLHFPFLFYFRLTCCSIQASHSIIQAKQVFVDGINRAPCKPLIKGFIQFMSTHGGPKDIPLLDSVISNAVTPGSDVSTALSREDREDISLLFLEVREFPIAKQLFPLHFVDLYGGIKELRKAWARHSILFPHSTGNISRHYSTMGNSLQETKKRRNTEPLMIARDHSLEDTMKLKQTLKTDDFSLIVDKESEPQVDKDIVDSGKRHGDAGAQKALDLVNSHKETITTAQECTDMVYSEHILDKNRIEKQMNSHAKEDINQDLILHEQNDEKTNSHEAETPVAESGDCDSPSKAIASSENINFQGKVIEVSASSHLETVCSKYDSPSGPNMHKEGSSSGPARISPELEERHHVEVQVKVDTEHHFSVSNANLEISFDGPNPTECDKEISAIGHGSQDYIQSSQSHQLSACAKPWSLDSAKTKSDTVSIQAQLRNQLENAQTYQSNNLSQNMQQQELTMPHNVQTSAQIQDQLLAQPNHRNQQYLQMMQGYATQMGEYYQQQLYYLQAQHNQQMQSLQQQQLPTEHLQQTFMQQVQQLNQQLVLWQQQVQQQPQVVLQQALPVQQLPDEKQGQCPSGDSKHGQNKQQQQAPQMDQQSQQLQQQQLLYLQQQQQMYLIQQQQMYQQQQAQQQQLLQQQLMQQQQYVLQMPQHQQDSVRQQQQQLFEQQQQQMMLLQRQQQHIMQQQIQPYVQQQQNQQGPKDQTYKSNHQVLTQVLIIQ

SEQ ID NO: 1056 - protein, 191 aa, Zea mays
  VARIANT 14: note = Ancestral polymorphism is G, Derived polymorphism is D
  VARIANT 116: note = Ancestral polymorphism is P, Derived polymorphism is A
MAPAAAFLSACAAGSIPRAPFLIPRPLLLPIPLSPARWDRSRSCSLFGVGANTRRAPTLRRNASTETVVPYVPGSGKYIAPDYLVKKVSAEEVQELVRGQRKVPLIVDFYATWCGPCVQMAQDIEMLAVEYEDNALFVKVDTDDEYEFAKDMQVRGLPTLYFFSPDQNKDAIRTEGLIPMDMIRNIIDNEL

SEQ ID NO: 1057 - protein, 288 aa, Zea mays
  VARIANT 142: note = Ancestral polymorphism is R, Derived polymorphism is L
MPGPTPSSTPPAAAANPSHNSRRKRKPRPKTAPPSALNPNWALLQSKLPHRPAATHLGKRKHDGATPAPAEPSPPPTAQEVRLEPTSDDTSLTKVVAIDCEMVGVGFDGGKSALGRVTLVNSFGNIVYDEYVRAVERIVDYRTWISGIRPKHMNKAKEFWAVQKEVAELIKGRILVGHALHNDLKVLLLSHPKKDIRDTSEYEVFRRERKRRSLKDLAAEVLGAKIQQNEHCPIEDARAAMLIYNKHKKAWEKNMKEQFRFKKKLKKRGKKKTTESNGNDPNVPTVLL

SEQ ID NO: 1058 - protein, 78 aa, Zea mays
  VARIANT 64: note = Ancestral polymorphism is Q, Derived polymorphism is L
  VARIANT 56: note = Ancestral polymorphism is P, Derived polymorphism is S
  VARIANT 35: note = Ancestral polymorphism is M, Derived polymorphism is V
  VARIANT 32: note = Ancestral polymorphism is D, Derived polymorphism is N
  VARIANT 4: note = Ancestral polymorphism is K, Derived polymorphism is N
MFLKDENRTSNDLEWMGQEFTIHHFSYEKGNDKYVIWGLTAGILIHAASVVYERPPDFAEKRAQFNLPKHSKECRSMP

SEQ ID NO: 1059 - protein, 423 aa, Zea mays
  VARIANT 32..423: note = Derived polymorphism lacks residues 32 to 423
  VARIANT 39: note = Ancestral polymorphism is R, Derived polymorphism is S
  VARIANT 55: note = Ancestral polymorphism is R, Derived polymorphism is H
MAVEKTLPGASAGRTVLVTGGAGYIGSHAVLQLLLAGFRAVVIDNLNNSSELAVRRVAALAGDHSRNLSFHKIDLRDKGALEMVFASTRFEAVIHFAGLKAVGESVQKPLLYYDNNVIGTINLLEVMSVHGCKKLVFSSSAAVYGSPKNSPCTENFPLTPNNPYGKTKLVVEDICRDIYRSDPEWKIILLRYFNPVGAHPSGYLGEDPRGIPNNLMPYVQQVAVGRRPALTVLGNDYATRDGTGVRDYIHVVDLADGHIAALQKLFENSSIGCEAYNLGTGRGTSVLEIVKAFEKASGKKIPLIFGERRPGDAEILFSETTKAERELNWKAKYGIEEMCRDQWNWASKNPYGYGSPDSIKQNGHQTNGSADSSKQNGHRTNGSTDSPKRNGHHAYGSADSPKRNGHCVFGSSDLKPNGNGHLR

SEQ ID NO: 1060 - protein, 240 aa, Zea mays
  VARIANT 93..240: note = Derived polymorphism lacks residues 93 to 240
  VARIANT 78..240: note = Derived polymorphism lacks residues 78 to 240
  VARIANT 47: note = Ancestral polymorphism is R, Derived polymorphism is H
MESPPLTAEAIAYTEKKMDMALEDIIKMSKKKNPGGKKPPRQPIKKHPFQNGNSNKGNGKVQSFMESRSTIRQGVLAQRRSNLGGNQFPATKQAAKKAAVMPMHKGAIRWNKPSHVFISINCYGQGRYMPEFELVLTTGSLAVFSVYLLNDECSVNLGASTLVQRRPVGGAFQNAKVKESNQAAPRTMDALFAQMKAQRLRTVPQQQANSSPWSHFNQHRRVQQQQRRGRGYGGRNVGNQ

SEQ ID NO: 1061 - protein, 609 aa, Zea mays
  VARIANT 332..609: note = Derived polymorphism lacks residues 332 to 609
MTGAGMKLKINKACDLSSISVLPPRRTGGSGGAGSSAAAAAVAAGSQQRSQPLSQQSFSQGAVGSGGASSLLHSQSQLSQASLDENLLTLHLASPARDQGFRLHDDSSKKMTSLPVTSASCVREESQLQLAKTSSNPVHRWNPSLPDSRYFIELHSFLFECLTGSGLTGVVPAEDVERKFQHMASSVHKVGMVLDSVQNDTMQLNRAMKEAALDSGSIQQKIVVLDTSMQKNLKGQGDLKVLVESNTKNIADQLAVLNSHSNKLVEISSALSVLPKQIERDLKQQQSDIFRIFRNNMEEIARAVKSLNSKIDAIQMPTEQRCTTNGRPLMNQLPVDRNERPQVNQTPEVTRVSQTTVASLVNQAPAANGRHLMSKTPAANGKSVMRQTPAENGRHLVSQTPAANGKTLKRQTSVTNGISLMSQVPAANGKPVVIQIPAPKGRPMMRQKTAESGRTEMNEIPVASGRPHTNKIPIAEVHPAPLVCPAKQVATDPKPKVDEEKLKALPQKLTSSRSRVAPKQEEAANTKVISRAAATEKVVIFIDDSDDDNDVRASCVILRPSGSGSLGERECDLMKVGAEESQEIPRRARKRRRREMQATVGVACMPLPA

SEQ ID NO: 1062 - protein, 102 aa, Zea mays
  VARIANT 11: note = Ancestral polymorphism is R, Derived polymorphism is C
  VARIANT 23: note = Ancestral polymorphism is A, Derived polymorphism is V
  VARIANT 33: note = Ancestral polymorphism is S, Derived polymorphism is F
  VARIANT 42..102: note = Derived polymorphism lacks residues 42 to 102
  VARIANT 67: note = Ancestral polymorphism is E, Derived polymorphism is K
MASSLSRALLRRVAELARGRLRANHRMLSSASSTAAIERASQLPAEAQAVRMTEGCVRRLKELHAKKPSAEGKMLRLSVEAGGCSGFQYSFALDDKKNADDR

SEQ ID NO: 1063 - protein, 242 aa, Zea mays
  VARIANT 61: note = Ancestral polymorphism is S, Derived polymorphism is L
  VARIANT 5: note = Ancestral polymorphism is T, Derived polymorphism is A
MASAAVHQLVVLLLTLALPAVMSACASEVFPSGKTYVTCQDLPELGTALHWTYYDYASGPLLSLAFVAVPAAPGGWVAWGINPTGNGMVGTQALLAFVPGASSSVPTVRTYNITSYAVGAASTPIAFPTAGFAADVASGGRIRLYATLQLDKGIKVVNQVWQVGPSVTRGVPDTHAMAPENLAAMGKLVLSVGTAASPPAHAGGTSSDTTPTPVIDLFKVTLKLFHHERTLATAASNSTGIC

SEQ ID NO: 1064 - protein, 329 aa, Zea mays
  VARIANT 126..329: note = Derived polymorphism lacks residues 126 to 329
  VARIANT 138: note = Ancestral polymorphism is H, Derived polymorphism is Y
MAIDHIVRAALRHRGNRKQSSAMPPYAPREQRHDGPPGEVPPMSAKDVTAIEALLGYCFIDKSLVELALTHGSFYWPNRPGDTYERLEYLGDGVLTCLMSREVFRTYRTLQPGPLTRLRAANVDTEKLARVAVHRGLHRFLRHKAPKLQDQICFFIEEMRKYPVHSNGLLDPPKVLCDIVESLIGAIYLDSNFDQEEVWRVFRTLADPLIGLETLGKHPVSELFEFCQKTHRGVKFLKDEWDKSLKVQVLIDGEVVGSAIYGPKKEIAQNRAAKDALDKLKDTHGHTQSESASVDVSEALDELDNTQSESASVDVSEALDELDIAGTLN

SEQ ID NO: 1065 - protein, 264 aa, Zea mays
  VARIANT 17..264: note = Derived polymorphism lacks residues 17 to 264
  VARIANT 100..264: note = Derived polymorphism lacks residues 100 to 264
MVNVTGGVLSEAQVISEFQRLVSNKWNWEIIQTRVNCFKTSFPPCSELDHMLEWGVQTKRNASMKIEESVIREKAKVELKKVWVQFIGLPSVMIQFLLIWVVGSILGVTKAVDIKFTNKFDVCQLEVSVLDPNLIPQYVDVIIGDFVYELQFKADENINEENPEPMDMDSLVLEMMMQTCQGVRHQCHNARILLGNKQVGEESSGAKIDGVGSHGKKVSDSKVTMGESMLMTAEIAKLAVVLEASVGSNVTQRSNTSFKEVGWL

SEQ ID NO: 1066 - protein, 170 aa, Zea mays
  VARIANT 2: note = Ancestral polymorphism is D, Derived polymorphism is E
MDMEKALALVLLVSAAILLGAHQPTSAQVFCRSQFNLANEACSMRNFIPGPGVRRGGLPRQQQLNETTSPSTATTASAVSQVLQSRSDDDDDSHGGRRSRRRHQHRHSEDGEGEDPRDTACCRRLMGLDNSCVCQATARLPPFMISVRHVITLTPVEGCEISFECPGPLF

SEQ ID NO: 1067 - protein, 445 aa, Zea mays
  VARIANT 1: note = Ancestral polymorphism is M, Derived polymorphism is I
  VARIANT 25: note = Ancestral polymorphism is R, Derived polymorphism is Q
  VARIANT 26: note = Ancestral polymorphism is G, Derived polymorphism is V
  VARIANT 246..445: note = Derived polymorphism lacks residues 246 to 445
  VARIANT 322..445: note = Derived polymorphism lacks residues 322 to 445
  VARIANT 347..445: note = Derived polymorphism lacks residues 347 to 445
  VARIANT 421: note = Ancestral polymorphism is P, Derived polymorphism is L
MECEPEELQFLGVVVIYRFSAEILRGPHRPLFARIAAAFALPLSALFLLHVAISHAFFTHIDSDDTALDASSPGTDTQRHLLSRLASDWLALLLFKSAYLLALLLLSLLSVVSDKRDALTFPRVLSVVPRVWRRLTATFLAAFALLFAYHVVVVLVFIGLLVAADNGSALAGLLAFLVVVAYLLGLGDLGVVWHLANVVSVLEDHKGFAVMRKSKDLIRGKLVTAGAIFFTLNVVFAAVELGFRAWVVRGSGAASSRLLLGLIMLVVRCCVVMLALVTQTIVYLVCKSYHHESLDNANISDHLEVYLGDYVPLNASDVQMEQFQVIFTNESNIERWKNKRQQAVDSKVGRLDNFIQCVKAPIQGKKRKDTICIVLADETCEEPKVQMNKVVRQNLRVRLGDVVSVHQCEDVKYGKRVHILPIDDTIEGITGNLFDAFLKRKFLIL

SEQ ID NO: 1068 - protein, 187 aa, Zea mays
  VARIANT 68: note = Ancestral polymorphism is G, Derived polymorphism is E
MATLPQRFKLLATRCAAGAPSPSRSPAPAYAGAASPGYRLRRRVRGTGATTSARRRGRLRRFLCRGREAGAETLAATRQEDDRKPLFGGRPGGGGRTLRDLFVASPEAGRRHSGCRCDCGEDEDDDEDGRAGGASADPGAGVGAWRVGRRFGSGGLRSLLMRRSWRPVLVAIPEGDGNKIELGAIEE

SEQ ID NO: 1069 - protein, 296 aa, Zea mays
  VARIANT 26: note = Ancestral polymorphism is A, Derived polymorphism is V
MESSEASWHWHSFDPSVAVEDSEAMVQLLGVQYSGNEQKQTTPTAMSWPGQEADQYYSSTACPYYMQTQQPNPGASFYDHGYYGSNTFTMTGDFFVPEEQMLDLNLDFEYQGGEGTCYGRGGGNTPAVCKRKLENQKDESATCTVPKKKSRSAAVPQAQKKRKTAQKGACSRGNQEESYGDDGGNAKQQQQCSNDYLSDDDDSLEMIACGNVSSASKKSSSSACGKARAGRGATTDPQSLYARVDISTMLEEAVQYVKFLQLQIKLLSSDDMWMFAPIAYNGVNVGLDLKISPPQQ

SEQ ID NO: 1070 - protein, 777 aa, Zea mays
  VARIANT 672: note = Ancestral polymorphism is T, Derived polymorphism is A
MAPPPLPLFSPSLKAPPPPPWLHGSSTQSRDSAPPVPPLPAEATPSKFRIDSPKPAPARKNTKTAAKPLTAGVPGGRTHRAVLGIIRRVRSLELSDAPSPNSVHTSNSGAAAAAFHLTIELSPPREPGQYVVEKEKSRAVPWAAARDEGLKVALRREKKPREPTRAETELETHELHRLRRLARGIGRWARAKKAGVTDEVVKEVRREWASGEELAAVRIVEPLRRSMDRAREILEIKTGGLVVWTKGDMHFVYRGSKYQQNAKHSHTFLTNVHKGYLVKHNVHTTLLKYGSIGPVLINNYGEADDAFQENDQSICGQKDEEPVKGTLYEREVNRLLDTLGPRFVDWWWDTPLPVDADLLPEFVPGFKTPYRLCPPGVRPTLADEELTYLRKLARLLPTHFALGRNTRLQGLAAAILKLWEKSLIAKIAVKIGIQNTNNEQMAWNLKASTIPDEVPSDIYVFNSSVQHLTGGTVILRNKDFIILYRGKDFLPGGVAQTVIQREAQVHDEQVKEEEARLKAVDSLQMVGELSEESSLGTFREYQGFHAKFVHENTENSNTMIELEAEKYRLEKELKDHEWKLSVLNKKIERSNQALAKLHSSWSPSEQSADREHLTEEEKIMFRRIGRKMDGLVLLGRRGIFDGVIEEIHQHWKHKEVVKVITKQNQTRQIMYAASLLEVETGGILIAVEKLTTSHAIILYRGKNYRRPAKSSFSNLLTKREALRRSIEVQRRGSMKYFVRERQKSILELKRKLVEVCDKANQVSNPMIMKSLDSMVSK

SEQ ID NO: 1071 - protein, 1038 aa, Zea mays
  VARIANT 837: note = Ancestral polymorphism is Y, Derived polymorphism is N
MEVMTGALPSLIPKLANLVAGEYNLQKGVKGDIMFLQEELESMRDALEEISKVPADQLPNRDKIWARNVRELSYDIEVSIDAFMVQSKGRKLVKQYGLQKVIGMCLDWLLQPKIRHKMATEIRTIKRRIVEVHERHIRYEINLGPDKLGNAAVDPRIFGQYTELKELVGIDETRDELIDIMMEGNVVPMKQGKIISIVGFGGLGKTTLANAVYEKIRALFDCCAFVSVSQTPDLKKLFKSLLYDLGKYINEESLDERQLINVLREFLQERRYLIVIDDIWDISVWKMIRCALPDNDIGYIIVTTTRISDVAEKVGGAYKLKPLSLNNSRELMYKIIFGNENRENTKDKEICLDEELAEVSNKILKKCAGVPLAIITMASVLACKARNEMEWYEVYNSIGVGIENNLDVGNMRKILSFSYYDMASHLKTCLLYLSMFPEDYKIEKDRLIWMWIAEGFVQYVKQGKSLFEHGESYFNELINRGMIQPIYNQAGMIYECRVHDMVLGLICSLSNGENFVTTLNGLGHGSPSNMIRRLSVQNGNESQAMTLQTRNLQQVRSVVAFPDATASVVTVLRSFRVLRVLDLQDCDLSQCCSLKYLGNLFHLRYLGLCNTSITQLPEEIVNLQLLQILDVWNNKMYCLPSTIVQLRYLMCLYIDGFTRVPNGIGSLTSLEELTFLGIYDSTVDIIEELGQLTELRVLHIVLFGEWNDKLVECLHKLKKLKYLYIKDRSGQLNIGGLDAWVAPPNLQILNTRSGCWFTTLSASAWMNPSLLQDLSLSTTVRELQQDDIIILGSLPALRYLNLMIVGEDLGVHNEIHGECIVGAGLFPSLVYCQLWGNVAPIVFQRGAMPRLRTLDFRLSVQEVRGINGRDGGIDLGLRNLPSLQKVWVHLDPEGANKAEVKELEAELTRAIKIHPNHPQLYGIQDEDADSECDVHPNHPTLKEHGVMVMKMMSTENQCGGFVVDLELNFLDFSVILFYRDNEPTCDHPLENGRAIWWPDGLANLERMTFTELKRSVAMWQPGETCNWRSGGLERTKRQ

SEQ ID NO: 1072 - protein, 289 aa, Zea mays
  VARIANT 167..289: note = Derived polymorphism lacks residues 167 to 289
  VARIANT 113..289: note = Derived polymorphism lacks residues 113 to 289
  VARIANT 97..289: note = Derived polymorphism lacks residues 97 to 289
  VARIANT 91..289: note = Derived polymorphism lacks residues 91 to 289
  VARIANT 24..289: note = Derived polymorphism lacks residues 24 to 289
MAELQDDHRPELIGLGKMAAEDSLSSLVSSEDEPDLDPVHSKETQLNPGSVSASTVSYRRQTSKERAIGLAPEFAFFKADKDEHSEDDDEEPCPDSQDWPGSFVTTDGKNPARAQAAPSLTNLCLNTLAKHSKCIGSLEERHLSECSWLSEDDFEKTFGKCSIESLQDLHLDISGRCMPDYILPTTLAKVPNFLRELYIADCTNVDAMAILPALQKINHLEVLAMFGIQSLCDKFVKGLIPVHGSSLKELAFAGCLELTSASIKTVGEYCQELTSLDLRNLNRLRDSAL

SEQ ID NO: 1073 - protein, 378 aa, Zea mays
  VARIANT 159: note = Ancestral polymorphism is K, Derived polymorphism is E
MPMTRSGSFYTECFFFETKYRFPDIGGQQPTLWLVHSLPAGYVADHFAQLLATAACTLIWVGRMPDIQLGCHTIRSHGTKVATLHMYDWIILLCLAVLDGLLNIIEPFHRFVGRDMMTDLSYPLKGNTIPFWAVPVCSALLIAIVLPLVIFAVIYFKKKNVYDLHHGILGILYSVLITAVITDAIKDGVGRPRPDFFWRCFPDGKPNFNNITTDVICHGEKSVIKEGHKSFPSGHSSWSFAGLGFLAWYLAGKLKAFDRKGHIAKLCLVFLPLLVASLVAVSRVDDYWHHWQDVFAGGIIGLTVASFCYLQFFPYPFDNDALWPHAYFQQLAETHSNGNANSINIRPTEFEDEPDDHGDIVLRDTSPILESMESGRRP

SEQ ID NO: 1074 - protein, 261 aa, Zea mays
  VARIANT 187: note = Ancestral polymorphism is P, Derived polymorphism is S
MSLQYVAPPVRALAVLPAPGPPRRRTSHVSLYLPSRRPGLAVAPVRAAESSSPPTVPASAAGKAVVPDDEFSLAKVSFGVIGLGLGLSLLSYGFGSYFNLLPGSEWSALLLTYGFPLTIIGMALKYAELKPVPCITYADAFALREKCATPILKQVRSDVTRFRYGDEQHLDEALQRIFQYGLGGGIPRRNAPILQKIREEVTDDGKYSLVLVFEAKALELSDFEKRQAKFTSFFGPGIKAEIDAGKGGGDLYEVRLISDTV

SEQ ID NO: 1075 - protein, 123 aa, Zea mays
  VARIANT 27: note = Ancestral polymorphism is T, Derived polymorphism is A
  VARIANT 85: note = Ancestral polymorphism is I, Derived polymorphism is V
MDTIGPHVLIVDDTFVDRLVASRVLKTCNIQVTMVEGPKQALDFLDVENDVNLILTDYCMPGMTGYDLLMEVKESPKLKHIPVVVMSSDHIPQRMQKCMDAGAKEYIIKPIKAIDVPRILSYI

SEQ ID NO: 1076 - protein, 36 aa, Zea mays
  VARIANT 28: note = Ancestral polymorphism is V, Derived polymorphism is L
MKVGTQMKQLNKSLREKRAKLYIVRRCVVMLLRWSD

SEQ ID NO: 1077 - protein, 395 aa, Zea mays
  VARIANT 240..395: note = Derived polymorphism lacks residues 240 to 395
  VARIANT 292..395: note = Derived polymorphism lacks residues 292 to 395
MQSAAAFRPCPTRLLVSSPCRPLLSARPLRASAAGAVATRSSAVGPRGLGLGLLPASPDRDGKCRQRQVSCSAAGDAVAAPKAEEGGGLMKTLWLGSLFGLWYLFNIYFNIYNKQVLKVFPYPINITEVQFAVGTVAALFMWITGIIKRPKISGAQLVAILPLAIVHTMGNLFTNMSLGKVAVSFTHTIKAMEPFFSVILSAIFLGELPTIWVVSSLLPIVGGVALASLTEASFNWAGFWSAMASNVTFQSRNVLSKKLMVKKEESLDNLNLFSIITVMSFFLLAPVTFFTEGVKITPTFLQSAGLNVNQVLTRCLFAGLCFHAYQQVSYMILAMVSPVTHSVGNCVKRVVVIVTSVLFFRTPVSPINSLGTAIALAGVFLYSQLKRLKPKPKTA

SEQ ID NO: 1078 - protein, 173 aa, Zea mays
  VARIANT 109: note = Ancestral polymorphism is R, Derived polymorphism is G
  VARIANT 150: note = Ancestral polymorphism is D, Derived polymorphism is Y
MPAKGVIHLAFTTSDFADDGLGFPNHRPIDDAILLPGNIRSVLHFASPVISSFLLLLSILFGNAAQLPTRVGRVLGDISSCLVIMDPKHSAEVSKHLDKQNQALMETYGAMSHELHKLQVEEETIMRKLYELMSAEGLLPKVTFFALPMDDIECYRAGSSVRIILLELASCFH

SEQ ID NO: 1079 - protein, 618 aa, Zea mays
  VARIANT 448: note = Ancestral polymorphism is R, Derived polymorphism is C
  VARIANT 432..618: note = Derived polymorphism lacks residues 432 to 618
  VARIANT 331: note = Ancestral polymorphism is P, Derived polymorphism is L
  VARIANT 86: note = Ancestral polymorphism is R, Derived polymorphism is W
MNADFGAPKELAGGLQQRRALYQPRLPPCLQGPTVRAEYGDATTTIDPTCAQAVAQAFPHTFGQPLVSFVAPAAGAGAVEERHPIRVGVVFSGRQSPGGHNVVWGLHDALKAYNPQSLLYGFVGGTEGLFANKTLEITDDVLASYKNQGGFDLLGRSIDQIRTTKQVNAAMTTCHSLNLDGLVIIGGVTSNSDAAQLAETLIQNNCKTKVVGVPVSLNGDLKNQFVETTVGFDTVCKVNSQLVSNVCLDAISAGKYYYFVRLMGRKASHVAFECALQSHPNMLILGEEVALSKLTLMEIISKICDGVQARAELGKYHGVLVIPEGLIESIPEMYALIQEINILHNSNVPVAEMSSQLSPWAAALFQFLPPFIRRELLLHQESDNSAQLSQIDTEQLLAHLVETEMIKRTKEGRYKGRKFSSVCHFFGYQARGSTPSNFDCDYAYALGRISLHMIAVGLTGYMATVANLKDPVDKWRCAAAPLTAMMSVKRHLRGPGAIPIGRPSIHPSPIDLKGKAYELLREKASSFLLDDFYRTPGGIQFEGPGSDAKPITLTIENQDYMGDIEILKEYLGKVRTMVKPGCSREILKAAISSMVSVTDVLTVMSHPLNAELPLYHFK

SEQ ID NO: 1080 - protein, 227 aa, Zea mays
  VARIANT 171: note = Ancestral polymorphism is T, Derived polymorphism is I
  VARIANT 170: note = Ancestral polymorphism is V, Derived polymorphism is D
  VARIANT 147: note = Ancestral polymorphism is S, Derived polymorphism is L
  VARIANT 128: note = Ancestral polymorphism is R, Derived polymorphism is W
  VARIANT 108: note = Ancestral polymorphism is V, Derived polymorphism is G
MANTKIAVAIAILLALLQVSCAAARRHGKPAHGDHDGNGTPAVMTVNGFERGEDGGGAASCDGSFHSDDKLIVALSSRWYAGGKRCGEAIRITAESGRNREGTGRGRVQVLDSSNLGLIKPDTLVRYRGMVQDMLGNEYYIGAFKVSENGHGNSSFSNKPVRVDIYLISVTLLTKEGDVHVSSSSTEVAGTIPEMNGGDHHIPGSSFSCLVKIYDMLGSKYFTAGAL

SEQ ID NO: 1081 - protein, 144 aa, Zea mays
  VARIANT 54: note = Ancestral polymorphism is G, Derived polymorphism is D
  VARIANT 1: note = Ancestral polymorphism is M, Derived polymorphism is K
MAKTKIAVAIAILALFPLSCAAARQHGKPAHGDHDGDGTPAVMTVNGFNRGEDGGGAASCDGRFHSDDDLIVALSSRWYAGGKRCGEAIRITANSGRTVRARVVDECDSQGGCRNNIVDSSRAVWKALGLHTDAGEVHVTWSDA

SEQ ID NO: 1082 - protein, 144 aa, Zea mays
  VARIANT 141: note = Ancestral polymorphism is W, Derived polymorphism is R
  VARIANT 124: note = Ancestral polymorphism is V, Derived polymorphism is G
  VARIANT 81..144: note = Derived polymorphism lacks residues 81 to 144
  VARIANT 9: note = Ancestral polymorphism is V, Derived polymorphism is A
MAKTKIAVVIAILALLQVSCAAARRHGKPAHGDHDGDDTPAVMTVNGFKRGKDGGGAASCDGRFHSDDDLIVALSSRWYAGGKRCGEAIRITAESGRTVRARVVDECDSQGGCRNNIVDSSRAVWKALELHTDVGEVHVTWSDA

SEQ ID NO: 1083 - protein, 256 aa, Zea mays
  VARIANT 38: note = Ancestral polymorphism is A, Derived polymorphism is T
  VARIANT 61: note = Ancestral polymorphism is M, Derived polymorphism is L
  VARIANT 139: note = Ancestral polymorphism is A, Derived polymorphism is V
MVPQAAFLLALVAAAAAAASTWPSTEAAGSWTTTNAPAASCSGAGTFAADSAFAGNLRRLMSVLEARAAAGGGFDIATVGAGAGGARVHGLALCRGDVARAACARCVRSARAHARRLCASRTDAVVWLDACTLRYSARAFFGEVDRDHRAVAALRDARPAELGREVVAGLLTRLTRTAYLSPLLFAAGEEDAAVGQQQRLRAMVQCTKDLSGGDCKACLEAAIAQLLARGRAPEGARVLGGSCSLRYELSPFISDS

SEQ ID NO: 1084 - protein, 130 aa, Zea mays
  VARIANT 67: note = Ancestral polymorphism is I, Derived polymorphism is S
MTKTTPPAFVYRISTADEWAEFQRTGATLGGDLDSSTGCIHLSDLNQVKMTLKNFFLGRNDLYLLQIDTFKLADGLIYELSDGDNYFPHFYGPGRSFAPLQLDTVVKADKIEFADNDFTCGLLDGSYLPS

SEQ ID NO: 1085 - protein, 105 aa, Zea mays
  VARIANT 36: note = Ancestral polymorphism is P, Derived polymorphism is L
  VARIANT 37..105: note = Derived polymorphism lacks residues 37 to 105
  VARIANT 48..105: note = Derived polymorphism lacks residues 48 to 105
  VARIANT 55: note = Ancestral polymorphism is P, Derived polymorphism is L
MTMSSPRQKTRNSIPEPILPETRILFMNFGPQSMKLEIISGNSCTTFWYSNYPNPARLRLLQSSYLLAVCSCPQLPSLVPPTVSVCACMCHILVWLYPLVLALPS

SEQ ID NO: 1086 - protein, 355 aa, Zea mays
  VARIANT 29: note = Ancestral polymorphism is A, Derived polymorphism is V
MYTAMAARPLLLPPPVLLLLVVLAASSAAHGYGAYGYGDAAAELRVGFYKDSCPDAEAVVRRIVAKAVQEDPTANAPLLRLHFHDCFVRGCDGSVLVNSTRGNTAEKDAKPNHTLDAFDVIDDIKEALEKRCPGTVSCADILAIAARDAVSLATKVVTKGGWSRDGNLYQVETGRRDGRVSRAKEAVKNLPDSMDGIRKLIRRFASKNLSVKDLAVLSGAHAIGKSHCPSIAKRLRNFTAHRDSDPTLDGAYAAELRRQCRRRRDNTTELEMVPGSSTAFGTAYYGLVAERRALFHSDEALLRNGETRALVYRYRDAPSEAAFLADFGASMLNMGRVGVLTGAQGEIRKRCAFVN

SEQ ID NO: 1087 - protein, 216 aa, Zea mays
  VARIANT 8: note = Ancestral polymorphism is S, Derived polymorphism is Y
  VARIANT 15: note = Ancestral polymorphism is S, Derived polymorphism is L
  VARIANT 17: note = Ancestral polymorphism is S, Derived polymorphism is F
  VARIANT 37: note = Ancestral polymorphism is P, Derived polymorphism is R
  VARIANT 50: note = Ancestral polymorphism is P, Derived polymorphism is S
  VARIANT 81..216: note = Derived polymorphism lacks residues 81 to 216
MAPFALGSQVVVVASVSVGLNSSVKGVALKVRGVLTPELASVWGISWLIPGRDACQITVLHHEDNGMNIEMAKLAFSKGIWSYICKMNNALRRYPQHGSPSVSILTMQKLMKKPLCMSVSPGFGDCRRKPFCFSEHCSIGRSFHTDFQDFTMQACGEEVSPNDRERDSAGWKHRLSISRPIQPRGAARDGLLPEKGLQAREAIRLLIDMNGENRRD

SEQ ID NO: 1088 - protein, 202 aa, Zea mays
  VARIANT 105: note = Ancestral polymorphism is A, Derived polymorphism is P
  VARIANT 131: note = Ancestral polymorphism is A, Derived polymorphism is V
MAESAPRLLVLVSLVAALAMATGPAAAAHAGGRSRLIHLHLYMHDITGGPGQTAVQVVKGPGPAHPAMPGYHFGDTTVIDDALTDGPSASSSRLVGRAQGTYMLASLTEPVLAVSMTVALTAGAYNGSAVVIVGRDDVSAGVRELAVVGGTGAFRRATGHVLWRTARMESRDHMVLELDVYATVPAASPAPPPRAGVARQVA

SEQ ID NO: 1089 - protein, 118 aa, Zea mays
  VARIANT 71: note = Ancestral polymorphism is S, Derived polymorphism is G
MLDKLWDDVVAGPRPETGLEKLRKATTARPLVINKDADGGSYKRAQSMPSTPTTPVTPSSSSSSTTPRGAGNVWRSVFHPGSNLATKGMGANLFDRPQPNSPTVYDWLYSDETRSNHR

SEQ ID NO: 1090 - protein, 115 aa, Zea mays
  VARIANT 40: note = Ancestral polymorphism is Q, Derived polymorphism is R
  VARIANT 64..115: note = Derived polymorphism lacks residues 64 to 115
MLDKLWDDVVAGPRPETGLEKLRKATTARPLVINKAARRRQRVAQRLPPGEQPGHQGHGRQPLRPAAAQLPHRLRLALQRRDQEQPPLDRARWMDSEEAMFAGPCGYLKRTHALL

SEQ ID NO: 1091 - protein, 150 aa, Zea mays
  VARIANT 28: note = Ancestral polymorphism is R, Derived polymorphism is Q
  VARIANT 36: note = Ancestral polymorphism is S, Derived polymorphism is F
  VARIANT 38: note = Ancestral polymorphism is C, Derived polymorphism is S
  VARIANT 40: note = Ancestral polymorphism is G, Derived polymorphism is D
  VARIANT 41: note = Ancestral polymorphism is C, Derived polymorphism is Y
  VARIANT 55: note = Ancestral polymorphism is V, Derived polymorphism is F
  VARIANT 56: note = Ancestral polymorphism is A, Derived polymorphism is V
  VARIANT 58: note = Ancestral polymorphism is I, Derived polymorphism is T
  VARIANT 63: note = Ancestral polymorphism is V, Derived polymorphism is D
  VARIANT 70: note = Ancestral polymorphism is G, Derived polymorphism is D
  VARIANT 72: note = Ancestral polymorphism is D, Derived polymorphism is H
  VARIANT 76: note = Ancestral polymorphism is L, Derived polymorphism is P
  VARIANT 83: note = Ancestral polymorphism is G, Derived polymorphism is E
  VARIANT 93: note = Ancestral polymorphism is L, Derived polymorphism is S
  VARIANT 99: note = Ancestral polymorphism is E, Derived polymorphism is G
  VARIANT 112: note = Ancestral polymorphism is V, Derived polymorphism is A
  VARIANT 116: note = Ancestral polymorphism is L, Derived polymorphism is Q
  VARIANT 123: note = Ancestral polymorphism is L, Derived polymorphism is V
  VARIANT 136: note = Ancestral polymorphism is K, Derived polymorphism is M
  VARIANT 137: note = Ancestral polymorphism is S, Derived polymorphism is Y
MDGVLGNFGPSTLNVAYFQELMVVLCSRGEKHSMASVCGGCLALQDDGVPIKFPVARIAMGLVLDTQEFGGDGSPLILSDITGAEDASGDMDLKIAGNESGISAFQMDIKVVGITLPVMEKALLQAREGRQHILSKSVLRQSSCKMCRAK

SEQ ID NO: 1092 - protein, 977 aa, Zea mays
  VARIANT 270: note = Ancestral polymorphism is T, Derived polymorphism is M
MSSAPPAHQSKPSPHRRQHHNLGPRSPPPPPPQSQRYVPKSAPAAAPKPSPPSQPSLTTALRSSAASPSSSGSGGSSSGSVGVRSVDAFVAYLPHDEAVAAGLGGLDAHESQVVVDHLNDALAALLRAKPREFWLRVAQNTSLHEFLDSYLQFRHRWYDLPHRGPKGTVAGLVVGELELCRRVFMVLYRISSNKDPGAGRGESLSMKEHAALLLEKKLLDLPKLLDICAIYEHDNGKLTSSLVTNVINVQPSVLDDINIVIPQFLNIFHTMHDRCMTSLQVLTSTGSIDNGYVQLQKDFMEVLDFINDAIVTLDSFVGAYQPAALLFCTNFEMSYGVEELLNALARLYSSLLPSLLHGFKVMPKSQSNAEASLDSTLSDIPLAIRMLSKRTARFGWRLLHYCYLNDQVREHDAQTSTKMFPAKVEDPMIRGDILVQTLKDINRESTYSSQVNHGNTFLQELESEFQLMSQIGDIRNKGWIYMDDEQFQFLSRLCGSTHTSWNGISDLPVSSHGGELQQKDEETAMVESKISQIRDLFPDYGKGFLSACLEAYNLNPEEVIQRILEGTLHQDLLALDTSLEEMPHEKPAPTAVKDKGKGILVETVPQITKKPHKVAETHYFVQDGLSSATSSASQGPSSAISPASLGPSSAISSAFQGPSSAISSASLGPSSSISSVPKGRFTRKANDDLPDTAILDSKNAKNAARSVILDSQYEYEDEYDDSFDDLGFSVVESSYEETDGVNDAEASSHGPRWSSQKKPQFYVKDGKNYSYKVAGSVAVSSAREAAVMRQTQKETIYGLGRGGNVPFGVPNRQHIDVEAEEVGDADNSGRGSNSRGRGRKGGREGNRPEENESSNGRGSGFGGKRGGWSQGNPAEENWNPNGQQGFGRGGRRGGWNQGGPAKEDGNSSGRQESFGRGARRGSMNHDQSAEDNEGHNNPAQDFTRGPAPRGGHGRGGGRNHHRRDRAMKKHMQGLTGL

SEQ ID NO: 1093 - protein, 223 aa, Zea mays
  VARIANT 140: note = Ancestral polymorphism is S, Derived polymorphism is R
  VARIANT 122: note = Ancestral polymorphism is W, Derived polymorphism is L
  VARIANT 31: note = Ancestral polymorphism is R, Derived polymorphism is S
MDSDAAVLPTHTATTPGSSNHSKNQADELRSQIRRRRRRCVCVCLLVSLGAALLLGITLLVLFLTVLRVRDPTTRLVSSRVIGFVPGPGPEFQFNLTMLLTVDVHNPNLASFSYASGSVQLLYRGVLVAVAAVDPGRIPSKGDGTMELVMTVMSGSFGAELTQLVKDMEAGAVPLDASARVPGKVAIFSVLKLSAVAYSDCHIIFGVPEMKVQSQVCHDHTKL

SEQ ID NO: 1094 - protein, 306 aa, Zea mays
  VARIANT 64: note = Ancestral polymorphism is R, Derived polymorphism is T
MAGAGDAAKEYVAGSAAGVAQVVVGHPFDTVKVKLQAHNTTAHGKVYKNAFHCTSRILLDEGITGLYKGASSSFIGIAVESSLFFGTYSQAKQLLQGSYEVGRPHLQVIIPSAACSGALISCILTPTELTKCRMQVQGKDVIHGARYSSPLDCAVKTLESEGVKGIFRGGLATLFREAIGNAVFFCTYEYSRYWMHNYLDSSRFSGSSHFVAAKDIGIGVVSGGVSGMAFWTATLPLDVAKTIIQTDPDPHVSRNPLQILSMVYKRAGLGGCYAGLGPTLARAFPANAAAIVAWEYSAKILGIKRG

SEQ ID NO: 1095 - protein, 376 aa, Zea mays
  VARIANT 92: note = Ancestral polymorphism is V, Derived polymorphism is F
MAVLFPWVAWLLVSLVGACLLARNRRRGLPPGPHPLPVIGSLHLLGDQPHRSFARLAEIHGPLMSLRLGAVTTVVASSPAVAREFMQRHDAFFSNRTIPDALGDHAKNSTIWLPNNPRWRALRKIMTTELFAPHRLDALQNLRREKVQELVDHVGRLACRGEAVNVGRVAFITSLNLLSRTMFSRDLTSLDDNDGASKEFQEVVTDIMEAVGSPNVSDFFPPLAAADLQGWRRRLAKLFAQQHRVFDREIDGRLRSREAGESKKNDFLDLLLDAAQDDDNTAKLDRDTLRSLFTDLFSAGSDTSSSTVEWAMAELLENPASMDKARDELATVIGPGKNIEETDIGQLPYLQATAEKLSGYIPPSRCYRGVLQSTQK

SEQ ID NO: 1096 - protein, 393 aa, Zea mays
  VARIANT 151: note = Ancestral polymorphism is A, Derived polymorphism is T
  VARIANT 113: note = Ancestral polymorphism is A, Derived polymorphism is V
  VARIANT 110: note = Ancestral polymorphism is S, Derived polymorphism is N
MACGGRGGTGWSSLPADLLLSIFALLPADAHRVRFRAVCADWGAAAAAWRPRPWLVGSRTDRSGQGASEISSFWLAPSVALLPFAANVPSGLEYLSSSHGYLALSDPRISPKVILLLNPLTGRRVRLPPIGFFKKWLDLTTIVLSGDPATATEWAAVAVGFPTTCLAYYSSVTGAWTRLDFSVTGYAAVEHYRGRFYVAFKSSICICEVDGDAPAVIPLEHVDANGDAVVSDNDKLPGEGRRVVETHLVECDRQLLLVSVHDDVMYNSDDDMAGVDDGGIKIGSGFARAVEVHRVDWLGDRTVRLVRVVDLGWNSLFLGRNRAFALSRAEFPWYRARVNRIYLVDRGHPDGVVRVLGMERQRGRHLEILTIKPDDGRRESAGWARRGWFFPNY

SEQ ID NO: 1097 - protein, 456 aa, Zea mays
  VARIANT 98..456: note = Derived polymorphism lacks residues 98 to 456
MEVFYYLVFGALAAIVAALELAKSGKDRVATSPAFNSFKNNYILVYSLMMSGDWLQGPYVYYLYSQYGFDKGDIGRLFIAGFGSSMLFGTIVGSLADKQGRKRACVTYCITYILSCITKHSPQYKVLMIGRVLGGIATSLLFSAFESWLVAEHNKKGFDPQWLSITFSKAIFLGNGLVAIVAGLFANFLADNMGFGPVAPFDAAACFLAIGMAIILSSWGENYGDSSDSKDLITQFKGAAKAIASDEKIALLGAIQSLFEGSMYTFVFLWTPALSPKDEEIPHGFIFATFMLSSMLGSSIASRLLARKLKVEGYMQIVFSVSAFTLFLPVVTNFLVPPSGEKGGSISLGGCLQLLGFCTFESCVGIFWPSIMKMRSQYIPEEARSTIMNFFRIPLNLFVCVVLYNVNAFPITVMFGMCSIFLLMAAVLQRRLMAVSDLHRSTKAVMMTAEDEPLNP

SEQ ID NO: 1098 - protein, 761 aa, Zea mays
  VARIANT 408..761: note = Derived polymorphism lacks residues 408 to 761
MGRNGSVRRSAFSGAAGAAAGPPSFSVNPADYRLMEEVGYGAHAVVYRAIFLPTKGVVAVKCLDLDQLNNNIDEIQREAQIMSLIDHPNVIRAYCSFVVEHSLWVIMPFMTEGSCLHLMKISYQEGFDEPIIGSILKETLKALDYLHRQGQIHRDVKAGNILIDGAGVVKLGDFGVSACMFDRGDRQRSRNTFVGTPCWMAPEVLQPGTGYNFKADIWSFGITALELAHGHAPFSKYPPMKVLLMTLQNAPPGLDYERDKRFSKSFKEMVAMCLVKDQTKRPTAEKLLKHSFFKNAKPPELTIKSILSGLPPLWDRVKALQLKDEAQLALKKMPSSEQEALSLSEYQRGVSAWNFDIEDLKAQASLIHDDEPPEIKEDEDIARNIEVEKVEAKCNGISVCNCHLLALQQDLSSRNHLGKSFANECNSRQRAFVTTLKSDGNRPTTNEAFDFDFDFSEAATTRRADGHERNIRENDSLPSTAKRDPESNHWTSDVGQRQLSSGGSNSSTAERGYGFERDAVVQTIPEKQRSEARKTASLSGPLSLPTRASANSLSAPIRSSGGFVDSSGDKSKRSVVEIKGRFSVTSENVDLAKVQEGPLSSLSRKSPEGSLLKKSASTGDCLINTKLMRNANQLKEFCNSSVSSSVLIPHLNNLVQQTMFQQDVIMNLLSNLQQDEKVDRTQPGISSQVRTMENGKVADTANSEKERSLLVKISELQSRMITLTDELIAAKTKHVQLQQELNALYYREEIEDVRDEDIEET

SEQ ID NO: 1099 - protein, 271 aa, Zea mays
  VARIANT 51: note = Ancestral polymorphism is A, Derived polymorphism is S
MPFVEVSSSSQHGCDYGIMGRRNGNTVVLATKSTIVDTTGERVIFDFLFLALLAIVRSLVDSLMCFLNVSNLGFLRLSFPSMDASALLILDFCISRGLIGIIDLDCRLIGLHLYDGFIRLTFRKTNMVLQRKKEEHVKHIPVKTRGKTRTCPDALASPVPSRCHACRRTGAKIGVDPSGCVELAKHVRLNNPNLVLSGLMIIGMLDYSSTPKNFKALANCQEDVCKELGIPEEQLELFVDMSSDFEQTIEMGSTNVRVGSTIFGAREYPKN

SEQ ID NO: 1100 - protein, 67 aa, Zea mays
  VARIANT 13: note = Ancestral polymorphism is G, Derived polymorphism is E
  VARIANT 23: note = Ancestral polymorphism is E, Derived polymorphism is K
  VARIANT 34: note = Ancestral polymorphism is G, Derived polymorphism is V
MEKLIIRRDIPFGKVFLEHIDVEGSTKAKTEMHGQKLGGNQVVVVRRSHMQALRLRPPMPNNTIRRH

SEQ ID NO: 1101 - protein, 140 aa, Zea mays
  VARIANT 7: note = Ancestral polymorphism is P, Derived polymorphism is L
  VARIANT 47: note = Ancestral polymorphism is E, Derived polymorphism is K
  VARIANT 53: note = Ancestral polymorphism is Y, Derived polymorphism is H
  VARIANT 72: note = Ancestral polymorphism is R, Derived polymorphism is G
MVYVGALSESHSANTYFSHSMAFGGGGIALSFPLAAALAQTLDVCIKRYPKLYGSDDRLHACITELGVPLSREYGFHQWDIRGNAHGLLASHPIVPFISIHHVELVDPIYPGLNSLGKSGAVYEGYENGTHELPAAFNLL

SEQ ID NO: 1102 - protein, 768 aa, Zea mays
  VARIANT 28..768: note = Derived polymorphism lacks residues 28 to 768
  VARIANT 44: note = Ancestral polymorphism is C, Derived polymorphism is R
  VARIANT 64..768: note = Derived polymorphism lacks residues 64 to 768
  VARIANT 132..768: note = Derived polymorphism lacks residues 132 to 768
  VARIANT 180..768: note = Derived polymorphism lacks residues 180 to 768
  VARIANT 383..768: note = Derived polymorphism lacks residues 383 to 768
  VARIANT 409..768: note = Derived polymorphism lacks residues 409 to 768
  VARIANT 596..768: note = Derived polymorphism lacks residues 596 to 768
MTEGQSEETGSAPEGVSVLRRNSDDVGWEYGVLVDVNNKDKVKCILCDKQMCGGVYRLKQHIAQEGKNAKKCQGIKTTKEKLLEAQEKCKKALDGAKRKREVKTVRELELREEVHVSRVGGSEEVTCVGSSEPHKLGPMDKWTKAIDPTATKSESLTQQRLNKELWKERLHEVHKYIARWAFNHAISFNACDNDEFKQMCEAIGQFGPGIEPPTMFDLRGRLLEEEYARTKSLLQEREAEKMKNGCSIMTDAWSDKKRRSIMNVCTNCADGTSFISSKEMSDVSHTSEVIFELVDKAIEDIGPDDVVQVVTDNASNNMGAKKLLHVKRPHIFWTSCATHTINLMLQGIGNMPRFKKVIDQAKAFTIFVYGHTRTLECMRYFTEGKEIVRPGVTRFASNYLTLDNIQEKKDQLRKMVVHSRWDSLKDVKSKKGKNATTTILNPTFWKDVKLTLAVFAPLFKVLRLVDGDVKPSMGFVYGEILKAKRHVKEALGNVENRFKDVVAVIDKKMAGRLDSPLHLTAYLLNPHYSYADPSIFDVPKITEGFINCVETFYYHDDEMQEQAANIELQKFQNREGPFSKKLARTFENFDYNPASWWRLYGTETPALQKMATKILSLTTSSSGCERNWSGFDGVHTKKRNRLTTDRLNKLVYIQFNNRLINKRAKIKSKKITDVLLSSGTTEAQGFLQENGDDCALVSFRDDEDEEEVMEGTGIPWSVLGDAVGAEEQLELRRSSRVRELNEEEFESEEEEFDEDEDEDEDEMDETGV

SEQ ID NO: 1103 - protein, 187 aa, Zea mays
  VARIANT 126: note = Ancestral polymorphism is P, Derived polymorphism is S
  VARIANT 115: note = Ancestral polymorphism is A, Derived polymorphism is V
  VARIANT 113: note = Ancestral polymorphism is N, Derived polymorphism is Y
  VARIANT 97: note = Ancestral polymorphism is V, Derived polymorphism is M
  VARIANT 64: note = Ancestral polymorphism is T, Derived polymorphism is I
  VARIANT 59: note = Ancestral polymorphism is M, Derived polymorphism is V
  VARIANT 58: note = Ancestral polymorphism is A, Derived polymorphism is V
  VARIANT 54: note = Ancestral polymorphism is P, Derived polymorphism is S
  VARIANT 50..187: note = Derived polymorphism lacks residues 50 to 187
  VARIANT 5: note = Ancestral polymorphism is M, Derived polymorphism is I
  VARIANT 4: note = Ancestral polymorphism is R, Derived polymorphism is Q
MFCRMATLKDDGTVVIDIPTTIEAASLDLHSEDHQNVAFGGEPLDSSDLQDRPPMQIAMLIVGTRGDVQPFIAIGKRLQDYGHRVRLATHANFKDFVMTTGLEFYPLGEDPKNLAGYMVKNKGFLPATPSEIPIQRKQIRDIIFSLLPACKDPDIDTGVSFSANAIIANPAAYGNPLTVPTLYYVSV

SEQ ID NO: 1104 - protein, 135 aa, Zea mays
  VARIANT 104: note = Ancestral polymorphism is G, Derived polymorphism is C
  VARIANT 61: note = Ancestral polymorphism is R, Derived polymorphism is T
MDIIPAVPVAGSNNQERLSPELMMFNSSDQFFFQWHYKRSCSCHGVCQAQPNFGIALTHLRYCDTNAGILLDFVGSFEHHECKCLGIAYVRGESITENSEQQKGLAHDGISMLCVSDWSASVLIYYDPLRGLVLA

SEQ ID NO: 1105 - protein, 272 aa, Zea mays
  VARIANT 75: note = Ancestral polymorphism is C, Derived polymorphism is Y
MGDAAAAAATASTSAPATPTSILICLEDGSDLLSDAYDGAGATDFVVARDEHLLVEDQDEEYVALLLSKESAAVCAPAEEETEEWMKTARSGCVRWIIKTTAMFGFGGKTAYVAVTYLDRFLVQRRVNVTALLVTLHFPSPSPLPASPLSFLISSVEYRPSTIAVASILVARGREETPAGSLDALKAILGSSCPQLDTGHVYSCYRAMIREDDKSPTHSTSTGVASSGVSVAGNGSPSPGANNAAGSGPPATPDSHKHNHNQRRRLRSPQRQ

SEQ ID NO: 1106 - protein, 514 aa, Zea mays
  VARIANT 20: note = Ancestral polymorphism is A, Derived polymorphism is V
MDATPTRLFLGALLFLVPAALLLLLRARGRRRLPPGPPSLPLLGSVVWLTNSPAEIEPLLRRLFERYGPVVALRVGARLSVFVADRRIAHEALVDRGATLADRPALASVKFLDESDNTITRASYGPVWRLLRRNLVAETLHPSRVKLFAPARAWVRRVLVEKLGEAGPDAAPPRVVETFQYAINCLLVLMCFGERLDEPAVRAIASAQREALIYRSKNMQVFAFLPAVTKHLFRARLDKARALRRRVKELFVPLINARREYKKRGEEPRRETTFEHSYVDTLLDIKLHEDGDRPLTDDEIILLCSEFLDAGTDTTSTGLQWIMAELVKNPAIQEKLYSEIKAATDDNKEGVSEEDVHSMPYLKAVILEGLRKHPPAHFVLPHKAAEEMEIGGYLIPKGTVVNFMVAEMGRDEQEWKNPMQFSPERFLPGGDGEGVDVTGTKAIRMMPFGVGRRICAGLGIAMLHLEYFVANMVREYEWKEVPGDEVDFAEKNEFTVVMKKPLRPRLVPRRSHLN

SEQ ID NO: 1107 - protein, 531 aa, Zea mays
  VARIANT 269: note = Ancestral polymorphism is R, Derived polymorphism is L
  VARIANT 265: note = Ancestral polymorphism is A, Derived polymorphism is S
  VARIANT 157: note = Ancestral polymorphism is W, Derived polymorphism is R
  VARIANT 84: note = Ancestral polymorphism is S, Derived polymorphism is L
MAATQLLLLAALLLLPLAAILLGKRHGPRKGKNGARLPPGPPGLPFLGNLLLLRRYSSDVEALLRRLVARYGPVVSLRAGPSLSVFIADRRVAHAALVESGAALADRPAVTRALLGESGNTISRSSYGPVWRLLRRNLVSETLHPSRVKLFAPARAWVRRVLAEKLGREAEEAQARAQAPPPAMEAFRYAMFCLLVLMCFGERLDEPAVRAIASAQYGWLMFVAKNTSLLAFWPALARILLRGRLQEGLTARQRQKELFVPLIHARRVLKQRVKNQGGAAAAVAPGEETTTFEHSYVDTLLDIRLPEEGDRALTDDEVSNLCSEFLTAGTDTTSTALQWIMAELVKNPDAQEKLYSEIRATCSDDQPEVGEEDTHRMPYLKAVVLEGLRRHPPAHFVLSHKAAEDTEVGGYLIPKGATVNFTVAEMGWDEREWDRPMEFVPERFLSGGDGEGVDVTGSREIKMMPFGAGRRICAGLGIAMLHLEYFVANLVREFEWKEVPGDEVDLSETREFTTVMKKPLRAQLVRRTTCV

SEQ ID NO: 1108 - protein, 452 aa, Zea mays
  VARIANT 160..452: note = Derived polymorphism lacks residues 160 to 452
  VARIANT 51: note = Ancestral polymorphism is K, Derived polymorphism is N
MSRPHDGHRSFFPMGNPFRMILPRGARLSPKLTELLTSYEDGLASSLRKVKPEATSEVFTLSWMKLAVECLSELHTNIATLITELELPLSDWDEKWVDIYLNSSVKLLDICIALSSELSRLDQGQLLVRYLLNVLDSGSDMPSQEQIRRAEVSLKEWIERASERSPRLDSCLAALQELSGNLCLMKVRHSAKGKVLMRALYGIEAVTVLICSVLVAVLSGTFKPLVDFDVPEKFGWSTAFIDLQKAISGELSRQLSRGSVAALKELEDVDVCARQLHTLTCTAQLEEENASLAHSFSRSKEVVLTDTTAQGRGHVDNLKLADDSSCQHEVIMLQSITTEGGIGTADIKEDTETIGHTREVMAPEKIIDRGHQDDNTKQDTGVVTDISCLERREELLNCISQMSKSAERLQLGLDSLSKRVDNFFHIVLTGRDALLCNLRFSNGGKVAAEVRS

SEQ ID NO: 1109 - protein, 324 aa, Zea mays
  VARIANT 25: note = Ancestral polymorphism is A, Derived polymorphism is S
  VARIANT 62: note = Ancestral polymorphism is G, Derived polymorphism is E
  VARIANT 164: note = Ancestral polymorphism is A, Derived polymorphism is G
MVTVAKIAMEWLQDPLSWVFLGTLALVVLQLRRRGKAPLPPGPKPLPIVGNMAMMDQLTHRGLAALAERYGGLLHLRLGRLHAFAVSTPEYAREVLQAQDGAFSNRPATIAIAYLTYDRADMAFAHYGPFWRQMRKLCVMKLFSRRRAETWVAVRDECAALVRAVASGGGGGGEAVNLGELIFNLTKNVTFRAAFGTRDGEDQEEFIAILQEFSKLFGAFNVVDFLPWLSWMDLQGINRRLRAARSALDRFIDKIIDEHVRRGKNPDDADADMVDDMLAFFAEAKPPKKGPAAAADGDDLHNTLRLTRDNIKAIIMENRDVPEQ

SEQ ID NO: 1110 - protein, 208 aa, Zea mays
  VARIANT 177: note = Ancestral polymorphism is S, Derived polymorphism is W
MFGGTETVASAIEWAMAEMMHSPDDLRRLQQELADVVGLDRNVNESDLDKLPFLKCVIKETLRLHPPIPLLLHETAGDCVVGGYSVPRGSRVMVNVWAIGRHRASWKDADAFRPSRFTPEGEAAGLDFKGGCFEFLPFGSGRRSCPGTALGLYALELAVAQLAHGFNWSLPDGMKPSELDMGDVFGLTAPRATRLYAVPTPRLNCPLY

SEQ ID NO: 1111 - protein, 509 aa, Zea mays
  VARIANT 251..509: note = Derived polymorphism lacks residues 251 to 509
  VARIANT 173: note = Ancestral polymorphism is N, Derived polymorphism is T
  VARIANT 161: note = Ancestral polymorphism is R, Derived polymorphism is C
  VARIANT 152..509: note = Derived polymorphism lacks residues 152 to 509
  VARIANT 100..509: note = Derived polymorphism lacks residues 100 to 509
  VARIANT 92: note = Ancestral polymorphism is G, Derived polymorphism is V
MGSASARIATAAVHLVTAAAILLMLARGGEAVSLWLPPPTAGGGGFLGGADRYLTREEHWMNQTLDHFNPTDHRQFKQRYYEFLDYYRAPNGPIFLYICGESTCNGIGNNYLAVVAKKFGAALVSPEHRYYGKSSPFNSLTTENLQFLSSKQALFDLAVFRQYYQETLNAKYNRSGANSSWFVFGGSYAGALSAWFRLKFPHLTCGSLASSGVVLAVYNFTDFDKQIGISAGPECKAALQEITGLVDGQLQSGRNSVKELFGATKLENDGDFLYLLADAAAIAFQYGNPDVLCSPLAEAKKNGTDLVETFASYVKDYYIGKFGASVASYDQQYLKNTTPAESSYRLWWYQVCSEVAYFQVAPKNDSVRSPKIDTRYHLDLCRNVFGEGVYPDVFMTNLYYGGTGIAGSKIVFANGSQDPWRHASKQKSSDELPSYLIECKNCGHCSDLSGCPQAPSNIEGDSSKCSPPEALNKVRKEIVDHIDLWLSECQEQGHDKEPWLGSRWSIAAI

SEQ ID NO: 1112 - protein, 555 aa, Zea mays
  VARIANT 134..555: note = Derived polymorphism lacks residues 134 to 555
  VARIANT 203: note = Ancestral polymorphism is A, Derived polymorphism is D
  VARIANT 233..555: note = Derived polymorphism lacks residues 233 to 555
  VARIANT 385..555: note = Derived polymorphism lacks residues 385 to 555
MGQCYARNVHGVDADGGGVEATTITVSAAGGPEDAASVGGGRGGGGRRSARPSPAGTPRGGRAGATPARSSAAGSPWTGSPLGLPDGIAPSPATSASTPRRFFRRPFPPPSPAKHIKASLARRLGHRSPASASQVPRPPVEVPIPEQGAGGAGEVERELDKSFGYDRHFAAKYELGKEVGRGHFGHTCLARARKGDMRGQVLAVKVISKAKMTTAISIEDVRREVKILKALSGHSNLVKFYDACEDALNVYIIMELCEGGELLDRILSRGGRYNEGDAKIIVEQILKVVAFCHLQGVVHRDLKPENFLFSTREEHSPMKIIDFGLSDFIRPVSPEAKDFVKRLLNKDYRKRMTAAQALSHPWLRDEHRQIPLDMLVFKLVKAYLRSTPLKRAALKALSRAITEDELIYIRAQYNLLEPDSGDGRICIDNFRMALLQNCTDAMKESRTLEILNALEPLAYRRMDFEEFRAATISPYQLEAVPRWEEIASTAFEYFEQEGNRAITIEELAQEMNLSAAAYSIVRDWIRPLDGKLSFVGYTKFLHGLTMRSGNTRRHH

SEQ ID NO: 1113 - protein, 104 aa, Zea mays
  VARIANT 71: note = Ancestral polymorphism is R, Derived polymorphism is C
  VARIANT 69: note = Ancestral polymorphism is S, Derived polymorphism is F
  VARIANT 36: note = Ancestral polymorphism is G, Derived polymorphism is R
  VARIANT 23..104: note = Derived polymorphism lacks residues 23 to 104
  VARIANT 19: note = Ancestral polymorphism is H, Derived polymorphism is R
MPSVGVKIYIVFFKLLLRHRLQSLASAGGLDNVAFGVSCRPDEATAPPNPAFSSAASKDLHIDPNSSLSVCIFLPTPCTRTRAALATPPRPPPACRTEATSRTP

SEQ ID NO: 1114 - protein, 129 aa, Zea mays
  VARIANT 57: note = Ancestral polymorphism is E, Derived polymorphism is D
MPGKHQQHMTATATAAAAAAAPKGCVTVRVGLEGEEQRRFAVPLGHLKHPLFGALLEEAEREYGFRHQGALAIPCRVDRFVQLERLIGRDLHGACAHHLVDLDGAAAAAAQHQHQHHLHLPRFVGCFRA

SEQ ID NO: 1115 - protein, 386 aa, Zea mays
  VARIANT 10: note = Ancestral polymorphism is R, Derived polymorphism is L
  VARIANT 22..386: note = Derived polymorphism lacks residues 22 to 386
  VARIANT 45: note = Ancestral polymorphism is A, Derived polymorphism is V
  VARIANT 54: note = Ancestral polymorphism is R, Derived polymorphism is W
  VARIANT 62: note = Ancestral polymorphism is L, Derived polymorphism is P
  VARIANT 76: note = Ancestral polymorphism is R, Derived polymorphism is H
  VARIANT 84: note = Ancestral polymorphism is L, Derived polymorphism is P
  VARIANT 124: note = Ancestral polymorphism is R, Derived polymorphism is C
  VARIANT 141: note = Ancestral polymorphism is R, Derived polymorphism is C
  VARIANT 184..386: note = Derived polymorphism lacks residues 184 to 386
  VARIANT 206..386: note = Derived polymorphism lacks residues 206 to 386
  VARIANT 209: note = Ancestral polymorphism is P, Derived polymorphism is S
  VARIANT 221: note = Ancestral polymorphism is V, Derived polymorphism is M
  VARIANT 225: note = Ancestral polymorphism is Q, Derived polymorphism is H
MPLPLRVPARLLFARHKTTAAQHVAARHLDHAFERLAAAHLPLVAASPLVDALRASPEPLALPNLARRLPLRLHRRGPLHFLRLFPRVFDLRAPLPLSLSLTPAAAGLLAVASSPADAARTLHRLLAMSVTRSLPLRAVFRVWRELALPDDFEDSVVEGHPHLFRLVSNPAEPNTHILHLVADQATEDFTPAVEKARPDRYAFKLQFPPGFRLAKEYRKKVKEWQLLPYTGPYQVVSPSAGGSKRVSKLARRKMEKRAVGIAHEFLSLTVEKMVEVEKFSQFRKWFGIEVNVRDVFLDHPGIFYLSAKGKRHTVFLREMYDRGKLLESNDVSEARAKLVELMLLRRRGLGNANSSANMASGATADARESGDDFVDHEDCLLDVSEK

SEQ ID NO: 1116 - protein, 377 aa, Zea mays
  VARIANT 356..377: note = Derived polymorphism lacks residues 356 to 377
  VARIANT 345..377: note = Derived polymorphism lacks residues 345 to 377
  VARIANT 344: note = Ancestral polymorphism is G, Derived polymorphism is R
  VARIANT 304: note = Ancestral polymorphism is G, Derived polymorphism is A
  VARIANT 281: note = Ancestral polymorphism is Y, Derived polymorphism is N
  VARIANT 256: note = Ancestral polymorphism is R, Derived polymorphism is S
  VARIANT 215: note = Ancestral polymorphism is K, Derived polymorphism is M
  VARIANT 179: note = Ancestral polymorphism is R, Derived polymorphism is C
  VARIANT 159: note = Ancestral polymorphism is D, Derived polymorphism is Y
  VARIANT 158: note = Ancestral polymorphism is G, Derived polymorphism is R
  VARIANT 149: note = Ancestral polymorphism is R, Derived polymorphism is C
  VARIANT 132: note = Ancestral polymorphism is P, Derived polymorphism is R
  VARIANT 130: note = Ancestral polymorphism is S, Derived polymorphism is N
  VARIANT 114: note = Ancestral polymorphism is P, Derived polymorphism is H
  VARIANT 105: note = Ancestral polymorphism is V, Derived polymorphism is D
  VARIANT 55: note = Ancestral polymorphism is Y, Derived polymorphism is F
  VARIANT 54: note = Ancestral polymorphism is A, Derived polymorphism is S
  VARIANT 53: note = Ancestral polymorphism is D, Derived polymorphism is H
MADSEDIQPLVCDNGTGMVKAGFAGDDAPRAVFPSIVGRPRHTGVMVGMGQKDAYVGDEAQSKRGILTLKYPIEHGIVSNWDDMEKIWHHTFYNELRVAPEEHPVLLTEAPLNPKANREKMTQIMFETFSVPAMYVAIQAVLSLYASGRTTGIVLDSGDGVSHTVPIYEGYALPHAILRLDLAGRDLTDSLMKILTERGYSFTTTAEREIVRDIKEKLAYVALDYEQELETAKSSSSVEKSYELPDGQVITIGAERFRCPEVLFQPSFIGMEAPGIHETTYNSIMKCDVDIRKDLYGNIVLSGGSTMFPGIADRMSKEITALAPSSMKIKVVAPPERKYSVWIGGSILASLSTFQQMWISRAEYEESGPAIVHRKCF

SEQ ID NO: 1117 - protein, 124 aa, Zea mays
  VARIANT 27: note = Ancestral polymorphism is K, Derived polymorphism is N
  VARIANT 35: note = Ancestral polymorphism is G, Derived polymorphism is D
MPAGPLALEPLAFSAHLGVAVPHIELKHVVAATIGLKGLGSLLFILSSSLGAYLLLLYLALITPIIHDFYNYDMEKAEFAGLFAKFTQDLALIGALLFFLGMKNSIPKRQGGKKSPRRRRTRAA

SEQ ID NO: 1118 - protein, 57 aa, Zea mays
  VARIANT 7: note = Ancestral polymorphism is I, Derived polymorphism is K
MMQMINICREASYIPSKSGCKNHLLGCSVVQLAAWRTTTWEKDTDIDFAQDAIDEYK

SEQ ID NO: 1119 - protein, 177 aa, Zea mays
  VARIANT 48: note = Ancestral polymorphism is A, Derived polymorphism is V
  VARIANT 111: note = Ancestral polymorphism is K, Derived polymorphism is N
  VARIANT 122: note = Ancestral polymorphism is T, Derived polymorphism is I
  VARIANT 163: note = Ancestral polymorphism is S, Derived polymorphism is I
  VARIANT 164: note = Ancestral polymorphism is C, Derived polymorphism is F
MSDQSIGKYQYNLRIFCFSINEKVRDELEQLLDDDDDMADLYLSRKLAGASSPVSGSVRPNWFPASPTIGSKISRASRASAATVHGNENDVEELEMLLEAYFMQIDGTLTKLTTLREYIDDTEDYINIQLDNHRNQLIQDIHVYYLQKVIEKGEDGRGGTSQICFSMQHLWVPLRCP

SEQ ID NO: 1120 - protein, 382 aa, Zea mays
  VARIANT 19: note = Ancestral polymorphism is P, Derived polymorphism is H
  VARIANT 78: note = Ancestral polymorphism is A, Derived polymorphism is G
  VARIANT 110: note = Ancestral polymorphism is G, Derived polymorphism is S
  VARIANT 299: note = Ancestral polymorphism is T, Derived polymorphism is I
MARPPPLKLPCDRPMPYLHDSLIDEILLRVPPHDPGCLVRCSAVCKPWRRHLTDPNFLGRYRAFHRVPPMLGFLFNLADGCFVVRFVRTTSFRPRTLDHAGCYVRDARHGRILFRNIISEKRGFHLFVWSPVTDERWGLFIPLPFYHFVAAVAVLCAKAAREGGCDCDHLDCHSGPFLVAFVATDDNGVTCGCVYSSETGAYSIMTCAQHPNDPVDMDILDPIVLVGNRIYFPAGESKTIVEYDLGRQKLAFLEPPPLAHQGHCMLMPAMGGGLGFASVRESCLYMWSRETGSDRTAAIWTQSRVLELNTLPDCETALGFRESLMGKDVAVVGFAEGLDVIFVRTDVGVFVINLESGQVKKITSRSTNLVISYMSFYTPGNF

SEQ ID NO: 1121 - protein, 384 aa, Zea mays
  VARIANT 21: note = Ancestral polymorphism is N, Derived polymorphism is S
  VARIANT 78: note = Ancestral polymorphism is A, Derived polymorphism is G
  VARIANT 81: note = Ancestral polymorphism is C, Derived polymorphism is Y
  VARIANT 336: note = Ancestral polymorphism is E, Derived polymorphism is V
MARPPPLKLPCDRPLPYLHDSLIDEILLRVPPHDPGRLVRCSAVCKLWRRHLTDPNFLGRYRAFHRVPPMLGFLFNLADGCFVVRFVRTTSFRPRTLDHAGCYVRDARHGRILFCNIISEKRGFHLFVWSPVTDERWGLYIPFPFYHFVAAVAVLCAKAAREGGCDCDHLNCHSGPFLVAFVATDEDGVTCGCVYSSETGAYSIMTCAQHPNGTEDMDTLDPVVLVGNRIYFPAGQSKTIVEYDLGRQKLAFLEPPPLPHQGHGILMPAMGGGLGFASVRESCLYMWSRETGSDRTAAIWTQSRVLELNTLPDCETALGFRESLMGEDVAVVGFAVGLDVIFLRTDVGVFTINRESGQVKKMTSIRPDLVFPYMSFYTPDHATG

SEQ ID NO: 1122 - protein, 146 aa, Zea mays
  VARIANT 8: note = Ancestral polymorphism is M, Derived polymorphism is I
  VARIANT 14: note = Ancestral polymorphism is S, Derived polymorphism is P
  VARIANT 19: note = Ancestral polymorphism is V, Derived polymorphism is A
MHASRTQIMLPVLSLCAAVALLLSPASADPGSLGAAVGGGDSWPVESPVEAPTGVAATLKWTEDIADNSMGAPLPLPPPPGTRSWRPRPHASALSPDARRGLDHEARCGPRVSVRRGAFPWPGGCRGGDAVVAPAVHRLQPLFDEP

SEQ ID NO: 1123 - protein, 219 aa, Zea mays
  VARIANT 2: note = Ancestral polymorphism is A, Derived polymorphism is S
  VARIANT 70: note = Ancestral polymorphism is A, Derived polymorphism is T
  VARIANT 78: note = Ancestral polymorphism is A, Derived polymorphism is V
  VARIANT 86: note = Ancestral polymorphism is G, Derived polymorphism is A
  VARIANT 133: note = Ancestral polymorphism is V, Derived polymorphism is L
  VARIANT 200: note = Ancestral polymorphism is G, Derived polymorphism is S
MSRSNALMWLLLLALSCWSWCGAVTARPTPSASTSTSTAGGGFIRSWCAGTDYPALCNATLAPYAAEVGASPARLSLAALTVTLDGARRATAAMKAMAAGGASSHHLVPVAAEAAADCVGMLEDAVDLLRQSVEAMERLGKEPASASASASGQAGRSVRFQVNSVQTWASAALTNDGMCMEGFKGQPAVVREAVRRNVAGAMHLTAIALAIINAMAKQM

SEQ ID NO: 1124 - protein, 431 aa, Zea mays
  VARIANT 257..431: note = Derived polymorphism lacks residues 257 to 431
  VARIANT 208..431: note = Derived polymorphism lacks residues 208 to 431
MNASRKSSHLSSKDSAETARDIITTSGQFQPFKIPDVVAALAQAAAKANGETEKYLPGWPLFSPPKVQLDKCTKCSREFCSAINFRRHTRVHRRSLKIDRDFPKNRDLLAAFWNKLTMDDASKILSLTGVVIEGVTGSSILTALSSWMCKPGYASLPVAYARAGSELLDLIQAKPSMHLHVSSDELFSLLDEASEKTFLCTNTAACIQKFLFDGEKLLEDEEEAAQKRQAELMERKRMKKLRQKEQRTEKLAESSILSGSVVTSKHAASARPSNYKDPNVCSAPSRNKTCELKLRSWIEEQCQKHELDVDERGMGPSKNSRVLIGSIIVAIEDGSEHLLDLGSKNDPVPPSSKTKKHASVKVVQQVTPEGNRNEGVPDSDNRSSLRFTTDEINTYIQQIRYPAANGGYSYNYQTPAEYVSSQESFMNAMTF

SEQ ID NO: 1125 - protein, 215 aa, Zea mays
  VARIANT 5..215: note = Derived polymorphism lacks residues 5 to 215
  VARIANT 89: note = Ancestral polymorphism is S, Derived polymorphism is F
  VARIANT 110: note = Ancestral polymorphism is Q, Derived polymorphism is R
MQETGATAAAPAAWVSNAATTAPSEPTGSPADVEAFADPTAVGDDEHDSKEVFLRRYFLHEWELVSAILRRIVAGGGVVQSVDVHSVRFLVSYYSKHVLSGLVISTGGLQVSLKKTSTSALVGYLQDSDINTNCEGKSREYILSCDLLSVLQHYQKCDRVITPTLKIRKAAADQVYVYLVLLQNDGLITSENMDKARELLVETCWEGDVKEAAQE

SEQ ID NO: 1126 - protein, 307 aa, Zea mays
  VARIANT 109: note = Ancestral polymorphism is D, Derived polymorphism is N
MLRSTHPPSPTSGSSAAPASSSDAAAMVGGGAAAGSGGAPSGAKLLQILNVRVVGSGDRVVVLSHGFGTDQSAWSRVLPYLTRDHRVVLYDLVCAGSVNPEHFDFRRYDTLDSYVDDLLAILDALRIARCAFVGHSVSAMIGILASIRRPELFAKLVLIGASPRFLNDHDYHGGFELPEIQQVFDAMAANYSAWATGYAPLAVGADVPAAVQEFSRTLFNMRPDISLHVCRTVFNTDLRGVLGMVRSPCVVVQTTRDVSVPASVAAYLKAHLGGRTAVEFLQTEGHLPHLSAPGLLAQVLRRALARY

SEQ ID NO: 1127 - protein, 248 aa, Zea mays
  VARIANT 218: note = Ancestral polymorphism is S, Derived polymorphism is F
  VARIANT 33: note = Ancestral polymorphism is R, Derived polymorphism is C
MEKGASEASPPCARCGKPAQLQCPKCVELKLPRENAAFCTQDCFRAAWSSHKSVHPKPGAPASQQSPEGWKYCLRKGRERALQLPRFDWTGPLRPHPISKMRVVPDEIEKPDWALDGIPKIEPDSDLQKRVEIKTPDLIERMRVTCRVSSQHIAREVLDAAARVIKPGITTDEIDRVVHEETIARGGYPSPLNYYFFPKSCCTSVNEVICHGIPDARSYLNLHTKLIFHLSSDNDLFSAFLECCFSHC

SEQ ID NO: 1128 - protein, 321 aa, Zea mays
  VARIANT 221..321: note = Derived polymorphism lacks residues 221 to 321
  VARIANT 33: note = Ancestral polymorphism is M, Derived polymorphism is V
  VARIANT 25: note = Ancestral polymorphism is R, Derived polymorphism is W
  VARIANT 23: note = Ancestral polymorphism is A, Derived polymorphism is S
MAAVSLLRSAALGLVVLASALPAARPWSKEGHVLTCQIAQGLLEPDAAHAVRNLLPDDAGGDLSALCVWPDQVRHWYRYMWTGPLHFIDTPDEACSFDYSRDCHGPDGAKDMCVAGAIANFTSQLLHYRHGSADRRYNLTEALLFLSHFMGDVHQPMHVGFTSDQGGNSIELRWFRHKSNLHHVWDREIIQTALADFYGKDMDAFRKQLEHNLTKASERDWLSDSDISLGTWSDDVSAWTDCQDLSSCPTKYATESIGLACKWAYSGVREGETLSDDYFDSRLPIVSRRIAQGGVRLAMFLNRIFGAHNRDVPPPSSTLLD

SEQ ID NO: 1129 - protein, 351 aa, Zea mays
  VARIANT 36..351: note = Derived polymorphism lacks residues 36 to 351
MTTREPREASRRDGRDSHGRRPHSSFRSRRDDPSFLQDTIFRISFGSPRRRDDRRRESDRAHHRSRDGEFLEVVDHDQKRNRDAAQSADPPNAESKSASDMKNGPSTRHERSPRGTKRFSESSEAWRPRSFFQNHLKCGDYLCFYVQHNERGSAGQGGRHYDRQASDYGRQREHLSDRDKQKTERHSLQGKIELDQQKKDGDSTWKHDGFFQLEEAAPLAKKRPPFQEMKIQESADTVTEPDSRSRNYQARGYGNHRPFLRPDDRGFRRGFPDHRSDGQRNGHDIRGRFSVRGGMDRDRFNNSYGGRSNAEQASGDQEEKWKHDLYDQTNRSPPPKTEEEQIAKVEALLAL

SEQ ID NO: 1130 - protein, 150 aa, Zea mays
  VARIANT 128: note = Ancestral polymorphism is D, Derived polymorphism is H
  VARIANT 39: note = Ancestral polymorphism is C, Derived polymorphism is F
  VARIANT 9: note = Ancestral polymorphism is T, Derived polymorphism is I
MAALSFTYTEGGYVDKKRRPRKQNNHKSVGSDHLVVPKCVFGFTDKPVCSLLGHAADVLDLSWSKSQLNVLQTEKKHLMSVVMISKKKLQYKSQIDLRIRKKKSGQKKITGFQFAPGSSSEVLITSADSRIRVVNGDEFVHRRRKGRKES

SEQ ID NO: 1131 - protein, 1093 aa, Zea mays
  VARIANT 776..1093: note = Derived polymorphism lacks residues 776 to 1093
  VARIANT 36..1093: note = Derived polymorphism lacks residues 36 to 1093
MDDALLSAFLQSLYQVMVYLLKEEQSERHLEEGRKQLVSKLGMIQAALGTAEKKTQLSASEEAFFASLKDVSYQGSEALDEYCYEVQRRKVIRPATRLRNSTVTTVLNPSRAMFRHNMENKFKDFADRIDGIRNIQEMLLDLQAQNGQPCDGGGNERTSLLPPTVVCGRHGDEEKIVEMLLRPDPKPGNVVAVLPIVGEAYIGKTTVAQLVLKAERVAKHFELKLWVHVTHQFSIERIFSSIIESIQCSQFQSHSLNTLHTSLDRLLRGRRYLLVLDDYWNESWEDWDMLKRSFLSGAPGSKIIVTTRSENVAGLVRTLGPHRLQRLEEEDCLSLFSQGVPFIAASLGYTIRLRQENDRSKWADILREEKWDSSTSHFNRALRLSYVQLDYHLKPCFAYSSIIPHKFQFEKEWLIRHWMAQGFIPDAGSDDTVEDTGRAYFKSLVSQSFFQIAHVDRTGEEHRYVLSEMMHDLASNVSGADCGCYLMGRQRYSVPVRVRHLTVVFCKDASQDMFQVISCGESLHTLIALGGSKDVDLKIPDDIDKRYTRLRALDLSNFGVTALPRSIGKLKHLRCLQLQGTRIRCLPESICELYNLQTLGLRNCYELEELPHDLKSLCKLRHIDLLMAPDDPRHKVCSLRCMPKDIGLLTNLQTLSRFVVSERSVVHPHRGGIGELADLNDLRGELLISNMHLVKDVQEATQAQLSSKRFLQKLELSWDNQEEATQPSKKILQKLKLSPSSNEIEEAEAIVDRLKAPTSIKELTISGYTGMACPSWLGSAGYADLVTVSLCDFKRCDTLPCLGLLSHLENLHLKGWDSLVSISCREFCGDCFGESGVRRSFRSLKKLHFEGMTRLQRWEGDGDGRCALSSLLELVLENCCMLEQVTHSLPSLAKITVTGSVSFRGLRNFPSLKRVNVDASGDWIWGSWPRLSSPTSITLCNMPTVNFPPRIGQLHTSLQRLEISHCEQLQHIPEDWPPCTLTHFCVRHCPLLRELPEGMQRLQALEDLEIVSCGRLTDLPDMGGLDSLVRLEISDCGSIKSLPNGGLPSSVQVVSINNCPLLANSCINEGSAYRAKVKRVLVWIDGLLLDRFL

SEQ ID NO: 1132 - protein, 173 aa, Zea mays
  VARIANT 1: note = Ancestral polymorphism is M, Derived polymorphism is T
  VARIANT 112: note = Ancestral polymorphism is E, Derived polymorphism is K
MSGPTLCRNSLNSPADVTNSPSLSGRRHGLSMERLKSAVPPDLRRAVGEGTAADLANTTSRLFAFFDSLPLFHQVMQELTDPELALCRKDKVKAVELKGHGNACFSRREFGKALRFYSQALRHVPINSGGMDVNLVSSLYVNRASTMHKLGLFEESLRDCDRAITISPNYSKA

SEQ ID NO: 1133 - protein, 111 aa, Zea mays
  VARIANT 57: note = Ancestral polymorphism is A, Derived polymorphism is D
  VARIANT 70: note = Ancestral polymorphism is S, Derived polymorphism is Y
MAQQQKVVVRVPTMTDDKIKQKAIEAVADIYGIDSIAADLKENKMTIIGEMDAVAIAKKLKKIGKIDIVSVGPAKEEKKEEKKEEKKEEKKEEKKEEKKEEKKEEKKEEKK

SEQ ID NO: 1134 - protein, 227 aa, Zea mays
  VARIANT 147: note = Ancestral polymorphism is K, Derived polymorphism is E
  VARIANT 142: note = Ancestral polymorphism is P, Derived polymorphism is L
  VARIANT 126: note = Ancestral polymorphism is G, Derived polymorphism is R
  VARIANT 97..227: note = Derived polymorphism lacks residues 97 to 227
  VARIANT 96..227: note = Derived polymorphism lacks residues 96 to 227
  VARIANT 74..227: note = Derived polymorphism lacks residues 74 to 227
  VARIANT 58..227: note = Derived polymorphism lacks residues 58 to 227
  VARIANT 43: note = Ancestral polymorphism is T, Derived polymorphism is M
  VARIANT 19..227: note = Derived polymorphism lacks residues 19 to 227
MCADIIVGNELMRDISGGQKKRLTTGEMLVGLTKVLFMDEISTGLDSSTTFQIVKCIQQIVHLGEATVLASLLQPAPEVFDLFDDVMLLSEGQIVYQGPREYVLEFFERCGFRCPQRKGYIKKRSGTVLVQNEKPYHYVSVPEFVAKFKKFHMGKSLKKQLSVPFHKRKIHKSALVFSEKSVSTLELLKVSWSKEWLLMKRNSFLYIFKIVQVHRRIVHILNCFSLM

SEQ ID NO: 1135 - protein, 462 aa, Zea mays
  VARIANT 343: note = Ancestral polymorphism is E, Derived polymorphism is V
  VARIANT 4: note = Ancestral polymorphism is S, Derived polymorphism is L
MASSLKFTVRRRPAALVAPASPTPRELKRLSDIDDQDGLRFHIPVIQFYRRSALMGGRDPAPVVRDAVARALVHYYPFAGRLRELEGRKLAVECTGEGVLFIEADTDVRLDHFGDALQPPFPCLEELIFDVPGSSEVLGSPLLLFQVTRLACGGFILGVRLHHTMADAQGLVQFLDAVAELARGAAAPTVRPVWGRELLEARDPPRPAFAHREYDEVPDTKGTIIPLDDMVHRSFFFGRREVAAVRANLPPGLRSRASRFDLLTGLLWKCRTAALAPDADEVMRMICIVNARGGKSGAAIPEGYYGNAFAFPVAVATAGDLAARPLGYAVELVKRAKGEVDVEYMRSVADLMVLRGRPHFTVVRAYLASDVTKAGFGDLDFGWGKPVYGGPAKGGVGAIPGVASFLIPFKNAKGEDGIVVPMCLPGPAMETFVKEMDKLLSAPADAEAEQQKDAFPVIRSAL

SEQ ID NO: 1136 - protein, 450 aa, Zea mays
  VARIANT 276: note = Ancestral polymorphism is D, Derived polymorphism is Y
  VARIANT 264..450: note = Derived polymorphism lacks residues 264 to 450
  VARIANT 245: note = Ancestral polymorphism is S, Derived polymorphism is L
MARRRTGAAVADLRGCTGNGGTKQPPHARSHPRSPHPTAHPPRPPLAPPPPVAAATGRARLAVRLALPPPPTRFSQPQADAQPRAIVVAEVRWKGHRASALGSLRRAAVRRNRTWEDADAAWEEEFESVDTLAVASQREGVVFHPWELAFRVVSDINKGPKNKPSILGTTSLNLADYALTAGEIILSLSITGGAPEQASSLHLTLSMVELRAFQETSNASQRSAATLPLSPSSGDSLPGGKYEVLVIKAGLRKVKILTDLVSTRRPKKTCQGGGKDKLCVNSDGAEYPCDTESLDDDLDDRVKEDEFGDSTIRKSFSYGSLQSDNYVGGLVYAHAKIVGEHEDRIYYSNRKTDVSFHVEKGLPSTTENGLLTAKRSILPWRKRKLSLRSLKAKGEPLLKKAYGEEGGDDIEYDRRLLTSFDESVSEGSRGYGSANTMVSKFGDDNFVIGN

SEQ ID NO: 1137 - protein, 391 aa, Zea mays
  VARIANT 170..391: note = Derived polymorphism lacks residues 170 to 391
  VARIANT 216..391: note = Derived polymorphism lacks residues 216 to 391
MASSSKAPSSRRSVFDAVHIRSEFSAAGISAHFIPLIWKYVLQNPRCSDLDGVPSLPAAAYALLRQKFRPTTSTLTAAADSKDRTTTKLLICLQNGESVEAVVMRYDTRLGKYDGKPRPGGVRSTLCVSSQVNIYFYVGCQVGCKMGCRFCATGTMGFKSNLSSGEIVEQLVHASRYSQIRNVVFMGMGEPMNNYNALVEAIGVFTGSPFQLSPKRITVSTVGIIHGINKFNGDLPKVNLAVSLHAPDQDIRCQIMPAARAFPLGKLMNALQSYQNESKQTIFIEYIMLDGVNDQEEHAHQLGKLLETFKAVVNLIPFNPIGSSSNFKTSSDQNVKNFQKVLKGIYRIRTTIRQQMGQDIAGACGQLVVSLPDERSAGGATLLSDIEDLRI

SEQ ID NO: 1138 - protein, 316 aa, Zea mays
  VARIANT 60: note = Ancestral polymorphism is P, Derived polymorphism is L
MVTPYLPSSHNHRRRLPILLKIGFLLMMGENKLMGKRWEDMDTDVLVKIFKELNLVELSPTRASPYIWVDDRSDRRLARILRVAMAISCGNVNCMIFHYNLFMKDEHLHFISERSPHLKRLVMPAWNRITKVGICNAIQRWQALESLTMPTIGHPPYIMEEIARSCKNFTELKIMGSFDQQFASAILQFLPKLKVLSLRCSKVSMDALQCLLNSMEYLEVLNISHCLLLVVAANGRKQVVHELDSQILERASRLREFHYCQSRLCVACQRMVVDEGIMRWYRYEDWFWRRDEVRSLDLQDYGKLFDVGCERLTSVD

SEQ ID NO: 1139 - protein, 85 aa, Zea mays
  VARIANT 60: note = Ancestral polymorphism is A, Derived polymorphism is T
MNGINPNGGFLSYGNMESYAMWVATGVASAFFASLERCSCIHLHTAEDDGDEEEEDLEEARRSFSRPIPEYYYDRSGSSASVAKM

SEQ ID NO: 1140 - protein, 891 aa, Zea mays
  VARIANT 39..891: note = Derived polymorphism lacks residues 39 to 891
MAALDDKAMTDLETLEEEEVLRRLGTAEEAGLTDNEAARRLRLHGPNVVVLSHHEGSMLHGFLMALFSLWGWDHVFPKYNNMVRVILNSMSWVTVLTIVVSLAITSAGQRSCELAIIIFVVATCLIACFTAMLVLEYAKAPLEAKAHAPRAKVLRDGNWRDVHAANLVPGDIIFLKVGDIVPANARILRFQKIDTMTCWAKRSVDCAHGFLLYYAWTVSCGQGTAVVIATGRGIPRSTLRLYPQRYARPGQLKEGAMLTGCFCASLVLVGTFAEIVLRFLFQKQNYRGMPLDAHFMPLIGGIPMAMPTFFYLALALGSVRLCFLGIASRGTVALEDLASVDVILFNMTGTLTCNQPCFVRDKIEMFADSVNKDHAIVLAARASRSQHELYIEPIDAAILSLLDDPEQARLGVQVLEHHASFFVALKLMFQTTYIDEGNRFKCCVFKGDPAKVAHHCGSSKEVKEKISMIMDELALDGYQAIAVGHQVDSCWDFIALLPYTDDLRSDSADVVDSLIDLGLDIRVLTESPLSTTKQVCGKLGKLGTNVVPAHIVFELARNNREVHSNINGISDLFPEDKSDIVRRLRNFGCHCAMVGYEFLDHDAIGESHIGISVADATDYTKSESDLVLTQPALMPVSSAVQISRKICQMLRSYTIFTISSTVHLFGVRVILHLWNFDLSNILAFMITACNYCTSFAMLFERVELNKSPDKWRVQKIITSGAAFGSYIVLTTAIFYRVATTANPFACKFKHISLMGSDEEIRSALFLQISTVNQAIALFVHSDGCCIIRWPGPFVTFAFVVSQTVATQKVVHGDLNFALTKGIGCVRAGLIWLYNLVLLLALVLVCRKWRHAKMTSEKLLTICLRSAILHIVLTWFLYVILDVRVQQPVSSR

SEQ ID NO: 1141 - protein, 337 aa, Zea mays
  VARIANT 191: note = Ancestral polymorphism is R, Derived polymorphism is W
  VARIANT 163: note = Ancestral polymorphism is P, Derived polymorphism is S
  VARIANT 158: note = Ancestral polymorphism is T, Derived polymorphism is I
  VARIANT 114: note = Ancestral polymorphism is R, Derived polymorphism is W
  VARIANT 112: note = Ancestral polymorphism is R, Derived polymorphism is W
  VARIANT 111: note = Ancestral polymorphism is A, Derived polymorphism is T
  VARIANT 105..337: note = Derived polymorphism lacks residues 105 to 337
  VARIANT 100: note = Ancestral polymorphism is V, Derived polymorphism is M
  VARIANT 63: note = Ancestral polymorphism is R, Derived polymorphism is W
  VARIANT 62: note = Ancestral polymorphism is P, Derived polymorphism is L
  VARIANT 56: note = Ancestral polymorphism is G, Derived polymorphism is E
  VARIANT 31..337: note = Derived polymorphism lacks residues 31 to 337
MAAVLRRAVAQCFASSSSSSPATFGLRRFLQEQPAFRPAVPPDRFMPLADRIRDLGVGVAFPRINLDGLVPPAPAPAPAKREPDAALPAASLTVEEARKVLRATQMEAARARIRESGAGAVPYADFLRLCCDAAGPDAGPSVARALDESGSVIVLGKTVFLRPDMVVKAIENAIPVRHAAAAAAAEIDPAREEELRAMEAEKAEIDRAAAARVRRELWCGLTYLVIQTAGFMRLTFWELSWDVMEPICFYVTSMYFMAGYAFFLRTKKEPSFEGFFESRFAAKQKRVMRARGFDLRRYEELRRACGVAAPPLQARTPCASAGAARESGHCHSYCHCH

SEQ ID NO: 1142 - protein, 323 aa, Zea mays
  VARIANT 265: note = Ancestral polymorphism is G, Derived polymorphism is S
  VARIANT 246: note = Ancestral polymorphism is T, Derived polymorphism is A
  VARIANT 119: note = Ancestral polymorphism is A, Derived polymorphism is V
  VARIANT 110: note = Ancestral polymorphism is T, Derived polymorphism is P
  VARIANT 96: note = Ancestral polymorphism is T, Derived polymorphism is I
  VARIANT 81: note = Ancestral polymorphism is G, Derived polymorphism is S
  VARIANT 65..323: note = Derived polymorphism lacks residues 65 to 323
  VARIANT 61: note = Ancestral polymorphism is S, Derived polymorphism is P
  VARIANT 59..323: note = Derived polymorphism lacks residues 59 to 323
  VARIANT 47: note = Ancestral polymorphism is S, Derived polymorphism is G
  VARIANT 44: note = Ancestral polymorphism is K, Derived polymorphism is N
  VARIANT 30: note = Ancestral polymorphism is G, Derived polymorphism is R
  VARIANT 1: note = Ancestral polymorphism is M, Derived polymorphism is I
MEDEISSIIAYALAISDERHHLIDLKFENGMDYSKGEYAKAIEKSFSFLSESSFSSSPWSSTSSEASLSSLSSFSSDDFSGYDSSSLLSPMHPEMTVNGKVTLKDKYSVTVVYDNQFFALRKKCCPSELAYITSLSRCKKWNAQGGKSKAYFVKTTDDRFIIKQINKTEFESFIKFAPDYFKHVYHSLDTGSQTCLAKILGIYQVKQIKHGKEVKIDLMVMENLLFGHNISRIYDLKGAIFSRRITDSNDHDTVYLDQNYVEDMSFSPIYIGGRTKHLLQRAIWNDTSFLTSVNVMDYSLLVGVDKEKHELVFGIIDYLRQYT

SEQ ID NO: 1143 - protein, 173 aa, Zea mays
  VARIANT 67..173: note = Derived polymorphism lacks residues 67 to 173
MKKAGLASFDENKMESGLASVAQGMEGCVISNKETGAYGMPSATNNPDASGQSFSEALRSSRKHPLQYDASESADGGLGGKCAKKKTKKSKEHKIGGGGQCHAAAGTMRHDKGGKCHALCYGASRLSVSSSASCSILSSREQPSSARRNSAPSYATATIPMLPIQLLSGGRTS

SEQ ID NO: 1144 - protein, 143 aa, Zea mays
  VARIANT 20: note = Ancestral polymorphism is R, Derived polymorphism is C
  VARIANT 27..143: note = Derived polymorphism lacks residues 27 to 143
  VARIANT 33: note = Ancestral polymorphism is A, Derived polymorphism is V
  VARIANT 34: note = Ancestral polymorphism is Q, Derived polymorphism is P
  VARIANT 40..143: note = Derived polymorphism lacks residues 40 to 143
  VARIANT 44: note = Ancestral polymorphism is P, Derived polymorphism is S
  VARIANT 62: note = Ancestral polymorphism is W, Derived polymorphism is R
  VARIANT 73: note = Ancestral polymorphism is C, Derived polymorphism is R
  VARIANT 75: note = Ancestral polymorphism is L, Derived polymorphism is F
  VARIANT 78: note = Ancestral polymorphism is T, Derived polymorphism is M
  VARIANT 79: note = Ancestral polymorphism is E, Derived polymorphism is K
  VARIANT 83: note = Ancestral polymorphism is G, Derived polymorphism is D
  VARIANT 84: note = Ancestral polymorphism is S, Derived polymorphism is L
  VARIANT 89: note = Ancestral polymorphism is R, Derived polymorphism is H
  VARIANT 104: note = Ancestral polymorphism is I, Derived polymorphism is T
  VARIANT 107: note = Ancestral polymorphism is R, Derived polymorphism is H
  VARIANT 117: note = Ancestral polymorphism is S, Derived polymorphism is L
  VARIANT 130: note = Ancestral polymorphism is A, Derived polymorphism is V
  VARIANT 133: note = Ancestral polymorphism is G, Derived polymorphism is S
MAYAQAAAASARGGARGWRRATAHQSRLASFRAQLYFKEQHGDPPVASSTQLPAVQTGSDRWAHPLMKPEKGCLLIATEKLDGSHIFERTVILLLSSLGPDGVILNRPSLMSIKEASGSICADDADIACAFAGRPLFFGGKAD

SEQ ID NO: 1145 - protein, 517 aa, Zea mays
  VARIANT 285: note = Ancestral polymorphism is A, Derived polymorphism is T
  VARIANT 139: note = Ancestral polymorphism is R, Derived polymorphism is M
  VARIANT 77: note = Ancestral polymorphism is A, Derived polymorphism is S
MYRLFRRSFSMAAEGSAAAASSSPPPSTSMSSTPRQHLPDELYRRIMNVGRPSIPLSPVLEQWNQEGHTAKKFVIQAIVKKLVGLRRFAHALELSFWMTDRRHLHLSVGDVAYRLDLISKVHGLEKAVEYFGMVPKQLRKPQCYGSLLKCYVEAKAVDKAEEHFAKMQEMGMTSSYAYTWMMKLYLQTGQLERVHAMFQDMEEKGVKPDTFSVEAMLAAYIAAEDVQGVGKVLDKANPHEKLVTWHGHASAASLFMKSGMQVGAVMALVEAERRISPKSSRIAYAFLLKTYTELGMHAEAGRIWSVYKSKVPPCNTMYMSRLSALLRTNDIDGAEATLKEWETVPLRYHDFRLINVMVDAYCREGLVEKAVALVDGAIKKGRTPYANTWYKLAGGFFKTGQVPEAVDMTRKALDSATPPWRPDLANVLMSLNHFVDQKDVGAAEEMVSTLQKLVPLTRDVYHCLLKTYVRAGKPPSDLLERMKEDGLEADEETERILAGECERVDMHPLSITNHLIG

SEQ ID NO: 1146 - protein, 293 aa, Zea mays
  VARIANT 180: note = Ancestral polymorphism is G, Derived polymorphism is R
  VARIANT 124: note = Ancestral polymorphism is L, Derived polymorphism is S
  VARIANT 104: note = Ancestral polymorphism is P, Derived polymorphism is H
  VARIANT 90..293: note = Derived polymorphism lacks residues 90 to 293
  VARIANT 85: note = Ancestral polymorphism is T, Derived polymorphism is I
  VARIANT 84: note = Ancestral polymorphism is V, Derived polymorphism is A
MWDLMPFVLDGMCLSAGSPCKWYINPDVPEASALMASVRKAHSPTKWNEVLSLNQPMPHVLEEQKITYIRDLHPFENKDREFLVIVTIKRLVIGGVTMHARNAPTQLWLMGIPTSAVIEFALPLARRNKGTNCFSLQGMRWVTQTSSSLVEWRKHHQEVVNVVVAEIGTTKDPIQTSSLGSKQPQPVLLQGAPSGIEDTPDKASNLVMPSTPLTPQSTAPSVQDKTIAIGGNTVVLGATPAITKELTSMPRKRTRSLPVKTVAKRLFTDVDGGVTVSKDTADNVAAPSPAKDA

SEQ ID NO: 1147 - protein, 275 aa, Zea mays
  VARIANT 204: note = Ancestral polymorphism is R, Derived polymorphism is W
MKGPGLFSDIGKKAKDLLSKDYTYDQKLTISTASASGLGLTSTAVKKGGLYSLDVSSVYKYKNTTVDVKVDTESNISTTLTVLDALPCTKLVTSVKLPDYNYGKVELQYFHENATFATVVGTKPSPVIDLSGTVGAQGVAFGAEAGYDTATGKFTKYTAAIGVTKPDYHAAFILADKGDTIKVSGVYHLDEKQKASAVAELTRRLSTNQNTLTVGGLYTVDSQTAVKARLNNNGTLAALLQHELKPKSLLTISGEFDTKALDRPPKFGLALALKP

SEQ ID NO: 1148 - protein, 519 aa, Zea mays
  VARIANT 207: note = Ancestral polymorphism is R, Derived polymorphism is M
MVGKELVVQRNGPVDIREIAAKATLREVRQSGHTYVELRRVGKRVIFFCTICLTECFSDNVLFDHLKGNLHSRRYAEAKVTLFGPMPWPFNDGVLFFNNLREKDPLLLDSSSQSTRELALVPEPEVSGNDTEVTSRLRDGSTSSNGVKGARYGAKGRANGRTAAVSEDHMLSNHGTDGPVVIPGVLLKDVVSDLPVHLLGYGNISYRIYEASKNCRKISKIWCAWVGQGSHGFESCNTYEQSGFAIVNFSYTYDLGRKWSSEEQDLSVSAGSFFVIDDAGHRGKRMRKSFSDQEASSEESNGQNSSLQGSRQAIVTCSPVGTSNDLQVGLLSSKAARRELRKQKRIAAEKVCDLCGRPMLSGKDVATLLNCNTGKLACSSRNSSGAYHLFHTSCLLHWTILCQYEMLNDEIARKGKSNRGRKAKNAPKRSKITSIVCPECQGTGIHVNGDELEKPSISLSEVWSTYSLFCCQSLIFHSGNFLQITSIAAEHLNWLDMALADVSLQDESNRSSQSMAEET

SEQ ID NO: 1149 - protein, 162 aa, Zea mays
  VARIANT 52: note = Ancestral polymorphism is R, Derived polymorphism is P
  VARIANT 53: note = Ancestral polymorphism is R, Derived polymorphism is W
MAAAEAAPPPILELDPSHDRAVSVVEDIVRLERRIFPKHESLARSLHDELKRRNSGLIYKTSSADGGEVIGYAMYTCNTSLCATITKLAVKENWRRQGHGEALLSGAVERCRRRKVQRLSLHVDPTRTAAVALYCKAGFQVDTTVEGYYAPHRDAYRMFLDL

SEQ ID NO: 1150 - protein, 242 aa, Zea mays
  VARIANT 222: note = Ancestral polymorphism is I, Derived polymorphism is M
  VARIANT 40: note = Ancestral polymorphism is S, Derived polymorphism is T
MRKAYRDSIKVLEADIQHANTLASEFPRDYDGACLQMRLSYSPAAHIFLFLVQWTDCSLAGALGLLRILIYKVYVDGTTTMSTHERKASIKEFYAVIFPSLLQLQRGITDVEDKKQKAICMEKYRKKDEDGRDTLSDIDVEREEECGICMEMNSKVVLPNCTHAMCIRCYQDWSSRSQSCPFCRDNLKKTCPGDLWIYVEDQDVVDMETVSSENLRRLFMYISKLPLIVPDVIFSVYDSHIK

SEQ ID NO: 1151 - protein, 405 aa, Zea mays
  VARIANT 242..405: note = Ancestral polymorphism lacks residues 242 to 405
  VARIANT 64: note = Ancestral polymorphism is D, Derived polymorphism is G
MAAENEEKETACAGYKHGPPWVFKGRQGPQLSFPFFSFLLSPHLALYQLHLVKASTARAFVPRDLRLVEAFGYTLGGMFLARYHDSPAGEFDELVVIAGIVWNPPTSCAWAARVLVNSVEACRHGRKEVGLPSHVATFSSKNEAASLGDRPLARPNSFLNMLGIGSTAFEQGNGREIENDMFPNAIYPFSLSRRATHDTSLCFVDPMLLLHFLTIWRRQQDHIRTTSGRAQQSECHSRVSGQANQTVFPHDFLQRKNLRSHAQISTEKSKEGQEEGEKKESSSKYVLFLKQARLACFANFSGRTVDHPDLLKYSCQVECRVRPVKPARIWSARTTEPQQEKSDGEVSSSGSSVAADLDARSHSISVLLSRPIFALEFSSLRMHVDAPRTVVPHRDDKKVGYSSST

SEQ ID NO: 1152 - protein, 174 aa, Zea mays
  VARIANT 162: note = Ancestral polymorphism is E, Derived polymorphism is K
  VARIANT 160: note = Ancestral polymorphism is E, Derived polymorphism is V
MAETVDDKVSYFQAVTGISNTDLCTEILAAHNWDLQLAVSTITANPSSPSASASTSSRDPAPSAPLAVDAEFVAPPPPMPLPPQQQPGIAWKLVTLPFHVVSGGVGLVAGTFRLGAWVAGGVLSRSLSLLGLAGQAGSGDRLLELPPSAAEAADFVAEFEREFGAGRGPRFVAE

SEQ ID NO: 1153 - protein, 467 aa, Zea mays
  VARIANT 321..467: note = Derived polymorphism lacks residues 321 to 467
MGHDTWKSYAWAMTTNGPSPSIEKPPRPPHAGGKEVPPSPNSQSQHRREGQRLEAQEQAPRVPAMERDVVLSAPEAAGSSSSPASSSYSSFAETRVICRVCQKQFAQYTCPRCNARYCSLSCYKGHSVQCTESFMRENVMDELKQMQPEDESKKKMLDILKRLHLEEEMASDGEDGEEIKLEDLSDCEIKRFRQALASGELSKMIEPWTPWWKKPSARSISLGLDGSQLIRQVNAEDTAVPYPDPNTDQEASINEIPEGPESPLPSLKQLTRTEPSPLLAVHLVDILYSYCFTLRLYNGDWHSDPLGACTVALSMSKVMGQDAKPETVPEALAACIEETCSPAYRHTGGFRFAIGLVDDIIAILSLGQNALICALCDFHRLIEVGKSMLKVEKVGKTERAQNSPKLRSAARKLFFMTCWVHEQPDEAWPSLAHIVQVQKASMEELETGNWKADRKSKPQSAVLIEEL

SEQ ID NO: 1154 - protein, 529 aa, Zea mays
  VARIANT 202: note = Ancestral polymorphism is G, Derived polymorphism is A
MVGKELVVQRNGPVDIREIAAKATLREVRQSGHTYVELRRVGKRVIFFCTICLTECFSDNVLFDHLKGNLHSRRYSEAKVTLFGPMPWPFNDGVLFFNNSREKDPLLLDSSSQSTRELALVPEPEVSGNDTEVTSRLRDGSTSSNGVKGARYGAKGRANGRTAAVSEDHMLSNHGTDGPVVIPGVLLKDVVSDLPVHLLGYGNISYRICEASKNCRKISKIWCAWVGQGSHGFESCNTYEQSGFAIVNFSYTYDLGRKWSSEEQDLSVSAGSFFVIDDAGHRGKRMRKSFSDQEASSEESNGQNSSLQGSRQAIVTCSPVGTSNDLQVGLLSSKAARRELRKQKRIAAEKVCDLCGRPMLSGKDVATLLNCNTGKLACSSRNSSGAYHLFHTSCLLHWTILCQYEMLNDEIARKGKSNRGRKAKNAPKRSKITSIVCPECQGTGIHVNGDELEKPSISLSEMFRFKMKAIEAHKAWLKRPEVLENCSTGLHFPSEHVENPEVESEAHCSQCSVNTGEGDATQVTSLLCR

SEQ ID NO: 1155 - protein, 162 aa, Zea mays
  VARIANT 99: note = Ancestral polymorphism is H, Derived polymorphism is Y
  VARIANT 134: note = Ancestral polymorphism is Y, Derived polymorphism is H
MAAAEAAPPPILELDPSHDRAVSVVEDIVRLERRIFPKHESLARSLHDELKRRNSGLIYKTSSADEGEVIGYAMYTCNTSLCATITKLAVKENCRRQGHGEALLAGAVERCRRRKVQRLSLHVDPTRTAAVALYRKAGFQVDTTVEGYYAPHRDAYRMFLDL

SEQ ID NO: 1156 - protein, 242 aa, Zea mays
  VARIANT 107: note = Ancestral polymorphism is G, Derived polymorphism is A
  VARIANT 40: note = Ancestral polymorphism is S, Derived polymorphism is T
  VARIANT 38: note = Ancestral polymorphism is R, Derived polymorphism is G
MRKAYRDSIKVLEADIQHANTLASEFPRDYDGACLQMRLSYSPAAHIFLFLVQWTDCSLAGALGLLRILIYKVYVDGTTTMSTHERKSSIKEFYAVIFPSLLQLQRGITDVEDKKQKAVCMEKYRKKDEDGRDTLSDIDVEREEECGICMEMNSKVVLPNCTHAMCIRCYQDWSSRSQSCPFCRDNLKKTCPSDLWIYVEDQDVVDMETVSSENLRRLFMYISKLPLIVPDVIFSVYDSHIK

SEQ ID NO: 1157 - protein, 277 aa, Zea mays
  VARIANT 173: note = Ancestral polymorphism is R, Derived polymorphism is W
  VARIANT 170: note = Ancestral polymorphism is A, Derived polymorphism is D
  VARIANT 129: note = Ancestral polymorphism is C, Derived polymorphism is R
  VARIANT 120: note = Ancestral polymorphism is A, Derived polymorphism is V
  VARIANT 118: note = Ancestral polymorphism is D, Derived polymorphism is G
  VARIANT 62: note = Ancestral polymorphism is V, Derived polymorphism is I
MEDGIGPVNRFPCNANFVRFFMFPIPVGMVPLRRLDSRPNVCLNLPREAGNGAWQLATELVVVKGEDLQAAAVVLKNRDGEQSAIAAVGSLKSMDPNRIILKKIVLTMYPQSLESEIDRVVYVPRSQRRKMVQGKYLCVPLTYPIYPFSTQRQCYFCSLLSGGQNMVVVAASWRPLVLMWHIVNGVSDNILNHIILENNENKPVTNSRDTQEICLEQGLHILKIFEDYHVSKTSILNDLASAMGNTPNPYEQAMSTCVNDQAMMLSHMVWHESTISL

SEQ ID NO: 1158 - protein, 194 aa, Zea mays
  VARIANT 124..194: note = Derived polymorphism lacks residues 124 to 194
MASKELALALSLFVLLSIGSASAIRVARYSSSQGQGAGDGNGSGYLNGGGSGSGVGSGSGESDGAGVHASGGGGGGASSWSQPAGSGAAAGFGTGYGSSYSSQSRYGYGGSTSAGGSGRGRGAGQGSADGGGGYGAGGGDGYGSSVANSGNVVSATPARAEASADGNGSGRGGGYNGGSGGGDGSGSGFGAGQP

SEQ ID NO: 1159 - protein, 99 aa, Zea mays
  VARIANT 25: note = Ancestral polymorphism is R, Derived polymorphism is C
  VARIANT 27..99: note = Derived polymorphism lacks residues 27 to 99
MTSEAQSISAIHEAREGEGSKSRKRKQSHVGAALEDYVEFKKSQTNKTLDALKELSMRKCMKEMEAMAGFTDEEKSYAMEVFESEINRGFHVNNEPQCS

SEQ ID NO: 1160 - protein, 461 aa, Zea mays
  VARIANT 362..461: note = Derived polymorphism lacks residues 362 to 461
MASPYAGGVQPPSPAGAVQQQQQNHSLAFRVMRLSRPSLQPDLAALLRFDPRDVFLPEDALTGSDPSAAAKFLHGLLHPADSATAVPGDFTFRDRFLLRDPADALALPGLLVLPQSFGAIYLGETFCSYISINNSSSFEARDVVIKAEIQTERQRILLLDTSKSPVESIRSGGRYDFIVEHDVKELGAHTLVCTALYNDGDGERKYLPQFFKFSVSNPLSVRTKVRTIKDITYLEACIENHTKSNLYMDQVDFEPAQQWSATRLEADEHPSTVKSAIGDLCKQPILIRAGGGIYNYLYQLRSSSDEAGQTKSEGSSILGKFQITWRTNLGEPGRLQTQNIHSTPTASKDVNLRAVKVPPIIYVERAFMVNLCLTNQTDKTVGPFEVFLAPSMSGEDRAVLVNGPQKLILPLVEAFESIKFDLSMVTTQLGVQKISGITMYAVQEKKYYEPLPDIEIFVDAE

SEQ ID NO: 1161 - protein, 1310 aa, Zea mays
  VARIANT 135..1310: note = Derived polymorphism lacks residues 135 to 1310
  VARIANT 58..1310: note = Derived polymorphism lacks residues 58 to 1310
  VARIANT 43..1310: note = Derived polymorphism lacks residues 43 to 1310
  VARIANT 42..1310: note = Derived polymorphism lacks residues 42 to 1310
  VARIANT 27..1310: note = Derived polymorphism lacks residues 27 to 1310
MTSSASPNPSPVPVPTPITTANGTTSSPKDQPPPPPPLPQQQQQQGGGQEEAEAADGGGAEAAEAGVLAGVAAEAMEVDGGSGAGDAEAGGSVGGGVGAGAGGGAQQASPATVFRIRLKQSPASLRHKMRVPELCRNFSAVAWCGKLNAIACASETCARIPSSNSSPPFWIPIHILNPERPTECSVFNVKADSPRDFVQFIEWSPRSCPRALLVANFHGRITIWTQPTKGPVNLVRDASLWQCEHEWRQDLSVVTKWLSGISPYRWLPTNSTSSNLKTFEEKFLTQQPQSAVGWPSILCVCSVFSSGSVQLHWSQWPSQNSAHSRWFSTSKGLLGAGPSGIMAADAIVTESGALHVAGVPLVNPSTVVVWEVMPGLGNGIQATAKINAASSVPPSLNPPSWPGFAPLAAYLFSLQDYLVSEGAQTKKLTDNNETTEAASIHCCPVSNFSAYVSPEAAAQSATTTTWGSGVTSVAFDPTRGGSVITVVIVEAGVYLLFDDFRLLLAGQYMSPYDPDEGPSITGWRVQCWESSCQPVVLHPIFGSPTSLGGQPPMQTVWSTRVNKSIPPTEDLKNPQTYVPMPTTSDERSSSECSVDRANRLSFDPYDLPNDVRQLAQIVYSAHGGEVAVAFLRGGVHIFSGPNFDQVDSYHVNVGSAIAPPAFSSSSCCLASVWHDTLKDRTILKIIRVLPPAILSTQTKISSAAWERAIADRFWWSLLAGVDWWDAVGCTQSAAEDGIVSLNSVIAFLDADFHSLPTMQQRQQHCPNLDRIKCRLLEGTNAQDVRALVLDMQARLLLDMLGKGIESALTNPSTLLPEPWQASSDMLSSIDADKMTVEPALLPNIQGYVDAVLDLASHFITRLRRYASFCRTLASHVGPSSTTGTSRNMVTSPTNSSPSPSNNQGNQGGSTSATGNSQMQEWVQGAIAKISNNSDGAATATQNPMSTRTSFMPISINTGTFPGTPAVRLIGDCHFLHRLCQLLLFCLLFRRRQSPRLLASSQKNQDSAMQKIQHMMNAKTEDNSSTVRSGLGAAKVEEGHSARGGQFVLGGAKGPEENPIGKSVRIGSGNAGQGYTSDEVKVLFLILVDLCRRTSTLPHPLPASQVGSSSIIIRLHYIDGNYTVLPEVVEASLGPHMQNMPRPRGADAAGLLLRELELQPPAEEWHRRNMFGGPWSEPDDFGPLDNMPRLKISGSINSHLSDMEVDAVSSIGIDLWPRKRRLSERDAAFGLKTSVGLGGYLGVMGSRRDVVTAVWRTGLDGDWYKCIRCLRQTCAFAHPGAPNQTNEREAWWISRWSHACPMCGGSWVKVV

SEQ ID NO: 1162 - protein, 168 aa, Zea mays
  VARIANT 138: note = Ancestral polymorphism is T, Derived polymorphism is M
  VARIANT 136: note = Ancestral polymorphism is R, Derived polymorphism is C
  VARIANT 125: note = Ancestral polymorphism is D, Derived polymorphism is E
  VARIANT 119: note = Ancestral polymorphism is R, Derived polymorphism is C
  VARIANT 96..168: note = Derived polymorphism lacks residues 96 to 168
MISPPRYHAPASTQPLVLGAVVSPLSSEQHTPSRPRAPPRSRSFLSAATSPPSSEPSSPPPSSSAAEISLLPQRHHLTPILGAVVFPPSSEQHTSSHPRAPPRSRSFLRNCSRPASSLRVVLIGDSTVGKLNLLSRFTRNEFSLMSKSTIGVEFATHSIHVKNKVVKA

SEQ ID NO: 1163 - protein, 319 aa, Zea mays
  VARIANT 257: note = Ancestral polymorphism is G, Derived polymorphism is A
  VARIANT 125..319: note = Derived polymorphism lacks residues 125 to 319
  VARIANT 98: note = Ancestral polymorphism is I, Derived polymorphism is T
MARQEIEHSHLPVRGINLHVAQVGKGDLGTVVFLHGFPEIWYSWRHQMLAVAAAGYRAIAPDCRGYGLSDQPPENEEASWVWDDLVADVLAILDALSIPKAFLVGKDFGALPAYDFALQHPDRTCGVVCLGIPFSPVPFAFDTMPEGFYVLRWGVREPGRAEADFGRYDVRRVVRTVYVLFSRADIPIAKEGQEIMDLADLSAPLPEWFTEEDLDVYAKLYEKSGFRYPLQMPYRSLRKMPQRLDAKFQAPVLMVMGEKDYCFKFPGFETAVRSGAMDNFMPDLKIIYIPEGGHFVQEQLPDRVNELLLDFLNGHPVAS

SEQ ID NO: 1164 - protein, 390 aa, Zea mays
  VARIANT 323: note = Ancestral polymorphism is P, Derived polymorphism is T
  VARIANT 255: note = Ancestral polymorphism is S, Derived polymorphism is F
  VARIANT 154: note = Ancestral polymorphism is M, Derived polymorphism is I
  VARIANT 78: note = Ancestral polymorphism is S, Derived polymorphism is N
MEIDSLREGFDRVAEKRSLSSAKALEVVDQIVNEIEQAIVKLQMMNTDSTGNVDHPSILAELKAKLNEMAPLNQLEGSQKELNVALSKYLKLLEKSFNPDISKAYRNVDFEVHTVNNIIANHFYRQGLFDLGDMFVHECGELGGASLKLPFQEMYAILEAMKARNLEPALSWAAKNHDQLLQNGSMLEFKLYQLQFVEILSKGSRGEAKDEALLYARTHLVPFAAVHKEEFQKLMACLLWVGRLDQSPYSELMSSAHWEKLAEELTHQFCSLLGQSRESPLSVAVSAGFQGLPTLLKLTQVMAAKKQEWQVMKQLPVPIDIGPEFQYHSVFVCPVLREQSSDENPPMRMPCGHVVSKQSIMKLSKSSSRAFKCPYCPSEAMASHCKQLHF

SEQ ID NO: 1165 - protein, 140 aa, Zea mays
  VARIANT 120: note = Ancestral polymorphism is D, Derived polymorphism is E
  VARIANT 135: note = Ancestral polymorphism is A, Derived polymorphism is T
MLSNRTCKCGHCKKLAPKGQPATYTWAATKYEVQGFPTIKIFRDQGKNIQEYKGPREADGIVHYLKKQVGPASKEIKSPEDAAALIDDKKIYIVGIFAEFSGTEFTNFMEVAEKLRSDYELLGSYSYLINIWQWTLLSIL

SEQ ID NO: 1166 - protein, 665 aa, Zea mays
  VARIANT 231..665: note = Derived polymorphism lacks residues 231 to 665
MGKKQHSKDRMFITRTEWATEWGGAKQKDVGTPFKRLPFYCCSLTFLPFEDPVCTVDGSVFDLMSIIPYLKKFGKHPVTGAPLKHEDLIPLTFHKNSDGELNLGYENTNTIIPACTKSICYGSYVFHQSGLYIHFIINQSYFLAGEFQCPVLNKVFTEFTHIVAVKTTGNVFCYEAIQELNIKPKNWKELLTDEPFTRNDLITIQNPNVVDGKVLGEFDHVKKGLKLEDEELQRMKDDPTYNINISGDLKQMIKELGTEKGNEAFLQGGGGLKAQKERAAALAAILARKEKDDSKAGKEPKPNQSFSIVDAASASVHGRSAAAAKATSAEKTAARIAMHMAGERAPVNAKLVYSHPVFMCYAVPSLPVHQCCLMVSIQPFQVKSRYTTGAASRSFTSTSYDPVTKNEYEYVKVERNPKKKGYVQLHTTHGDLNLELHCDITPRTCENFLTHCENGYYNGLIFHRSIKNFMIQGGDPTGTGSGGESIWGKPFKDEPNSKLLHSGRGVVSMANSGPHTNGSQFFILYKSAPHLNYKHTVFGMVVGGLTTLSTMERVPVDDDDRPMEEIKILKVSIFVNPYTEPDEEEEKAKEEKKKDEDYDKVGSWYSNPGTGVAGSTSTGGGVGKYLKARAAGSIDVTGSAGVADDSSKKRKATASSVEFKDFSGW

SEQ ID NO: 1167 - protein, 268 aa, Zea mays
  VARIANT 30: note = Ancestral polymorphism is T, Derived polymorphism is I
MRRAVTPSSHISSADDPKASTFAVDDWVITVREVFGPVPTHEESMAATLDLKDAFEMWWPAQLDSYAKSAQEIALQELVQSETPKDVVHSQVSKKEDNNENLVVSSGTSGRVVQAFTLLQESPEAQVVVASLASDKNVWDAVMKNEKVIKFYKTYESKLSKCSSVASSVSGHEVEDGEAASLQSNTYLPQSAGESVKDYLEKMKALVSEMMANLSNIMQDLVATSDEGRSKGEIKTLTTSSCKDFSNAPSAFVLLAVASIMVVLLKRV

SEQ ID NO: 1168 - protein, 467 aa, Zea mays
  VARIANT 295: note = Ancestral polymorphism is Y, Derived polymorphism is F
  VARIANT 168..467: note = Derived polymorphism lacks residues 168 to 467
MGMRSRHPKALGFRWYPAATHRSLTLVLWSLAALVVVVNFHLLIIHKEEGENMSTHEIRRSIMRELEVVEEEKFRLAPPRSRRNPRAVRRKGEKKSPTIVDEFLDESSAVHDMFFPELNTAVDPINGGNDSMYFYYPGRIWLDTDGKPIQAHGGGVLYDKRTNTYFWYGENKDGKTYKAHSKGADRVDIIGVSCYSSKDLWAWKNEGLVLRGEKNGTHDLHKSNVLERPKVIYNDRTGKYVMWMHIDDANYTKASVGVAVSDSPTGPFTYLYSKRPHDCESRDMTIFKDDDGKAYLIYSSEDNSELHIGPLTDDYLDVTDVMRRLLIAQHREAPALFKHEGTYYMVTSGCTGWAPNTALAHAATSVMGPWETLGNPCVGGNEVFRSTTFFSQSTFVLPVPGLPGSFIFMADRWNPSDLRDSRYVWLPLTIGGVPDEAADYSFMFPLWSRVSIYWHKRWRLPEEWRDS

SEQ ID NO: 1169 - protein, 118 aa, Zea mays
  VARIANT 105: note = Ancestral polymorphism is S, Derived polymorphism is Y
  VARIANT 3: note = Ancestral polymorphism is K, Derived polymorphism is N
MEKYNSKTQLAPLRDTPFALRGALGSSSSYLEQARGYTSSPLAALRPKMSSTTGNRLLHSSCPLSSPVANRPLSPHLPLKKPQFSATFSISHRIFGVALGVAIVSVPLATKFSLMFGV

SEQ ID NO: 1170 - protein, 225 aa, Zea mays
  VARIANT 52: note = Ancestral polymorphism is R, Derived polymorphism is C
  VARIANT 62: note = Ancestral polymorphism is S, Derived polymorphism is Y
  VARIANT 127: note = Ancestral polymorphism is P, Derived polymorphism is L
  VARIANT 130: note = Ancestral polymorphism is I, Derived polymorphism is T
MIFPARRDEIWFDVGVPVPEVSTGYFVGRDHIFGPDPSSEQCSTLDCNRRTRVRHSTSRYPYGWVVEPDGTTYHKIDPAQCRGDWRLNLEVLLKDVTLIQRVKVIMRCVCCIFIPRDINVICRWFVPVNIAITFMIGGTLGWIPCSILKPPQHFRGLIMAFCSASVTITKDDIKVFVTVPSKSSTEFPNAAWCDYQRMDEHDQYESVGLDDSLEDERNLDETMAD

SEQ ID NO: 1171 - protein, 184 aa, Zea mays
  VARIANT 1: note = Ancestral polymorphism is M, Derived polymorphism is R
MGFWEFFLNWLRSLFFKQEMELSLVGLQNAGKTSLVNSIATGGFSEDMIPTVGFNMRKVTKGNVTIKLWDIGGQPRFRSMWERYCRAVSAIVYVVDAADRENMAIAKGELHDLLSKPSLTGIPLLVIGNKIDKPEAFPKQTFTEIMGLKTITDREVACFMTSCKNSTNIDSVIDWLVKNSKKKN

SEQ ID NO: 1172 - protein, 112 aa, Zea mays
  VARIANT 26: note = Ancestral polymorphism is S, Derived polymorphism is L
  VARIANT 33: note = Ancestral polymorphism is H, Derived polymorphism is Q
  VARIANT 43: note = Ancestral polymorphism is A, Derived polymorphism is T
  VARIANT 52: note = Ancestral polymorphism is S, Derived polymorphism is L
  VARIANT 101..112: note = Derived polymorphism lacks residues 101 to 112
MWQVLEWKNRAQASEQRVEELHREISELESKLHTFKAHLPALAAIPNQKQWSDACKMEYPRAKPQHPRSQESGKEEIKKHVLICRVKRSPSSVLSERSPFQEIGNISLPRHR

SEQ ID NO: 1173 - protein, 394 aa, Zea mays
  VARIANT 352..394: note = Derived polymorphism lacks residues 352 to 394
  VARIANT 196..394: note = Derived polymorphism lacks residues 196 to 394
  VARIANT 165..394: note = Derived polymorphism lacks residues 165 to 394
  VARIANT 156: note = Ancestral polymorphism is P, Derived polymorphism is H
  VARIANT 149..394: note = Derived polymorphism lacks residues 149 to 394
MVKLNKRTIVLEDKDQIQGFPKYTFSLTPLDKLDQYKNKTDRFIDVIAKISGVSNVAKVPTTSGDQQMRRVVLLEDLKGNMIELSLSGKRALEFDGDQVLDVGQQHHVIAIFVGTLVKLYKGEYTFLSGTSACRWYINENDIAEIKAFQKSLPSEPVPIKKTYLQNDDATHKFEEKSLEQLKHVDPFLDMGQRYQCTATIIGITENQTWCYKACKICNSAIIQKENGYKCTKEGCPSTQFEWKYKIPFIASDHTYNLEFMFFEKKGMELIGKSASTLRKQYEPKEIPPDITSWIGYKFTFVVRVLSKKSVKTIDPSFEVLMIKEKYQKEPIISFISSSGVVPAESSSSTMAEYKELPLLVPITSKDIEKKERSTSQPEHTEETQDMDIEPSGYD

SEQ ID NO: 1174 - protein, 354 aa, Zea mays
  VARIANT 38..354: note = Derived polymorphism lacks residues 38 to 354
MAGGRGSSAARLALLLVVVVAAVAGGAVAGGKVVHVEEAHRRSMLANGLGSAPPMGWNSWNHFQCDGNGEVVIRETADALVSTGLAALGYRYVNIDDCWAEPQRDAKGVDYLKYDNCNNGDLKPLERYPEMSRALMKVGRPIYFSLCEWGDMHPATWGATYGNSWRTTNDIADTWDSMIATADQNEVWSEYARPGGWNDPDMLEVGNGGMTNSEYVVHFSLWAISKAPLIIGCDVRHMSRETYAILANKEVIAVNQDPLGVQGKKVRMEGSSEIWAAPLSEYRTAVLLLNRHAKDEATIAAHWDDIGLPAGTPVEARDLWLHETLDATFTDKMSFDVAPHSCRMLVLKPRIQIQ

SEQ ID NO: 1175 - protein, 400 aa, Zea mays
  VARIANT 152: note = Ancestral polymorphism is G, Derived polymorphism is D
  VARIANT 153: note = Ancestral polymorphism is G, Derived polymorphism is V
  VARIANT 180: note = Ancestral polymorphism is T, Derived polymorphism is M
  VARIANT 275: note = Ancestral polymorphism is P, Derived polymorphism is L
  VARIANT 297: note = Ancestral polymorphism is R, Derived polymorphism is M
MTPHLPAVSSSSTTTTSRAAAAAHHLLDAAAAPPSSPHQYRRRRRRRVLGCLRPRAASVRCCAAAARAAEATTRVFVVSDLHTDYPENMEWVRRLPAQVGAGEGRGVDALVVAGDVAETRDNFARTMEVLRERFAAVFYVPGNHDLWLRREGGLYMDSLEKLTALLDACSELGVDTGPRTIGDLGIIPLFSWYHKSFDKEKDVNSVRVPSLEMACKDFHACQWPSDLTNDDEALALYFDKLNDKNHDAIEEVKSSSKHILTFSHFVPSSGQELCPEKRMLYYPYLPKVIGSDFLERRLRDIHSNREDRAACHVFGHTHFCWDSVVDEIRYVQAPLAYPRERKRRMNGEGWLPFCVYRDGFNPEIYPALWSDYYNKNKREPENTQLAPWVASHYAKYHKFH

SEQ ID NO: 1176 - protein, 266 aa, Zea mays
  VARIANT 40: note = Ancestral polymorphism is F, Derived polymorphism is S
MSTATGVRAGRRFTVGRSEDATHPDTIRAAISEFIATAIFVFAAEGSVLSLGKMYHDHSTISTAGGLVAVALAHALGLAVAVAVAVNVSGGHVNPAVTFGALVGGRVSLVRAVLYWAAQLLGAVAATLLLRLATGGARPPGFALASGVGDGHAVLLEAVMTFGLVYAYYATVVDPKRGHLGTIAPLAVGFLLGANVLAGGPFDGAGMNPARVFGPALVGWRWRHHWVYWLGPFLGAGLAGLVYEYLLIPPADAVPHTHQPLAPEDY

SEQ ID NO: 1177 - protein, 372 aa, Zea mays
  VARIANT 333..372: note = Derived polymorphism lacks residues 333 to 372
  VARIANT 287: note = Ancestral polymorphism is V, Derived polymorphism is A
  VARIANT 268: note = Ancestral polymorphism is A, Derived polymorphism is P
  VARIANT 232: note = Ancestral polymorphism is A, Derived polymorphism is S
  VARIANT 216..372: note = Derived polymorphism lacks residues 216 to 372
MGTLWPLLYLLDSLSSQYRAAVVASCLPNLPIAAPPWNATSGTVPGAGGRPGSRVHGAPLGGLVLVSKDPDNIRDIATGMVVNPRPFIEVQSAAPNHIENALRDVHKRATQMLAQQAVGNQLQLLIVILPEVSGRNTVLERAFAHNGIPFVSEVPTIIFGVDVTHPHQERTLHHPLLLLVVASMDWPEITKYRGLVSAQPHQEIIEDLFTVSKDPQMGNNVNGGMIRELLIAFRKKTNRKPERIIFYRHVDGVSEGQFNHVLLHEMDAIRKACASLEEGYLPPVTFVVVQKRHHTRLFPEVHGRRDMTDKSGNILLGTVVDQKICHPTEFDFYLCSHAGIQGTSRPTHYHVLYDENELTADALQSLTNNLCY

SEQ ID NO: 1178 - protein, 677 aa, Zea mays
  VARIANT 340..677: note = Derived polymorphism lacks residues 340 to 677
MNGSKCDRCKWRPWRWLVASWVLAVILERGGAEVTELDLEERRNERRDLLVLRDTLRSALDLHSNWTGPPCHGERSRWHGVSCDGDGRVVGVSLDGAQLTGTLPRSALRGVSRLEALSLRGNALHGALPGLDGLSRLRAVDLSSNRFSGPIPRGYATSLWELARLELQDNLLNGTLPAFEQHGLVVFNVSYNFLQGEVPGTRALRRFPASAFDHNLRLCGEVVNADCRDQEGLPSSGAPAYGSSSPVVRPAGDGGRAARKHLRFRLAAWSVVAICLIAALVPFAAVFIFLHHKKKSQEVRLGGRASGSATGDNSDHFLTPLSSATAFSFVTETLVLYNAKVTAAEDIKDKVEVEQGRGSGSRSTESGKGAELQLFRADGASFDLDELFRSTAEMLGKGRLGITYRVALQAGPVVVVKRLRNMSHVPRRDFTHTMQLLGKLRHENVVDLVACFYSKEEKLVVYEHVPGCSLFQLLHGNRGEGRTPLPWPARLSVAQGMVRGLAYLHKSLPYFHRPPHGNLKSSNVLVFFSAPNGKQQKQAVPKLTDHGFHPLLPHHAHRLAAAKCPEFARRGGRRLSSRADVYCLGLVLLELVTGKVPVEEDGDLAEWARVALSHEWSTDILDVEILGDRGRHGDMLRLTEVALLCAAVEPDRRPKLQDVIRMIDDIAGGDGSELDRR

SEQ ID NO: 1179 - protein, 719 aa, Zea mays
  VARIANT 449..719: note = Derived polymorphism lacks residues 449 to 719
  VARIANT 438..719: note = Derived polymorphism lacks residues 438 to 719
  VARIANT 435..719: note = Derived polymorphism lacks residues 435 to 719
  VARIANT 355: note = Ancestral polymorphism is V, Derived polymorphism is D
  VARIANT 328..719: note = Derived polymorphism lacks residues 328 to 719
  VARIANT 248..719: note = Derived polymorphism lacks residues 248 to 719
  VARIANT 179..719: note = Derived polymorphism lacks residues 179 to 719
  VARIANT 170..719: note = Derived polymorphism lacks residues 170 to 719
  VARIANT 138..719: note = Derived polymorphism lacks residues 138 to 719
  VARIANT 118..719: note = Derived polymorphism lacks residues 118 to 719
  VARIANT 68..719: note = Derived polymorphism lacks residues 68 to 719
MEHIVMSSRKYPSGSEKRKRKKRADEFIETQRGAMDKFFPSNSRTSRNQNEMAVVAIEEQPDNNPEDQGFTPEENIDTDRNDNNVSDHEPMVNSPPTENASVDEQPVFTEDIYDPRNWDNLDNKSRDILVEKGPIRDENIEFPLDTNGRHFSYTHYSRKMSNGEVYYRKWLVYSKHVDRVFCFSCKLFNTENCKSSLGHEGFRDWRHINERLKEHEGSIQHIISMNSWNELRVRLGKHETIDKNIQQQITKEKERIRQVLQRIIVVVKFLGKRNLAFRGPSEQLYNDQNGNFLACVEMIAEFDLIMQDHLRRIQNNEIHYHYLSHKIQNELISLLASNITKSIINTVKEAKYFSVILDCTPDVSHQEQMSLLIRCVNMSTRKVEEYFLGFMKVDDTSGEGLFNSLLDSIKSFGLNIEDVRGQGYDNGSNMKGKHKGVQRRLLDINPRALFMPCACHSLNLTLCDMAKSCGKAISFFGIVQRVYTLFSSSTKRWDVLKDHVESLTVKSWCNTRWESRIKSVKAIRFQAPQIRSALLQLSTDKDTEPKDRSDAKNLFDLLGTFDFILGMVIWYDILFTVNKVSKQLQSSSMCIDATLMRIEDTVNYFQNYRNNGFASSLIIAKEIASELGVEPSFPVKRHAKRKKQYDETDCEEANLEAEKAFEVNYFLVMVDIAISSLKSRFEELQSFKDIFGFLMDSITLNRYMVQQHYVNANVKFERT

SEQ ID NO: 1180 - protein, 228 aa, Zea mays
  VARIANT 81: note = Ancestral polymorphism is V, Derived polymorphism is M
MNKRQVAAAVAALLALLAASSTAGAVTFDATNTASDTPGGQRFDQAVGLDYAKQVLSDASTFIWNTFDQPSPADRKPVDAVTLVVEDIGGVAFTSANGIHLSAQYVGGYSGDVKTEVTGVLYHETTHVWQWDGQGQANGGLIEGIADYVRLKAGYAPGHWVQPGQGDRWDQGYDVTARFLDYCDSLKPGFVALLNAKMKDGYTDDFFAQILGKTVQQLWQDYKAKYGG

SEQ ID NO: 1181 - protein, 193 aa, Zea mays
  VARIANT 1: note = Ancestral polymorphism is M, Derived polymorphism is K
  VARIANT 37..193: note = Derived polymorphism lacks residues 37 to 193
  VARIANT 116: note = Ancestral polymorphism is G, Derived polymorphism is R
  VARIANT 120: note = Ancestral polymorphism is R, Derived polymorphism is G
  VARIANT 134: note = Ancestral polymorphism is N, Derived polymorphism is T
MASTTTMARISLSVSLAAILLPLALATFPHRALLQSCQSNGSIRGKSGSCNTENGSECCEDGKRYTTFACSPPVTARTRATLTLNSFADHGDGGGASSCTGTFFDDDVRVVALSTGWFSRSKRCRKSIVIRASNGRSVKAMVVDECDSLHGCDTEHNFEPPCASNIVDGSPAVWKALGLNTDDGEVPITWSDA

SEQ ID NO: 1182 - protein, 298 aa, Zea mays
  VARIANT 186: note = Ancestral polymorphism is R, Derived polymorphism is H
MANKADWCDANVTYLIDICKKEIEDDNRPMRVFTRTGWKILVTKYEEKIGLKLTKKQLKNKLDNMKKEYTWFMEFKNATTGLGWNEAKQTIDCSKDWWDEHLARCNNPDIGIKCNHVRFRKQGPKHLDDLHKLFDKIHVSGTSASCPGDISSDDSSDDVVEIERTPENDEVKVAVSKRSKPVKRKRKASCTAVEEKEEKSPFFRLYKNICLKIETVAEKISTSVEASSTHPTSQVPSIAETMKMVKDCGVKEKTTLMHTTTFFIVKHEFREVFCMLETNEGRFDLLEREHAKEMMRHM

SEQ ID NO: 1183 - protein, 177 aa, Zea mays
  VARIANT 2: note = Ancestral polymorphism is V, Derived polymorphism is M
MVEAKILVLVAVLALLQVSSTVARRHGKPDPCDEDDANTDDLPGGLRHKRTPHPRSHHCAPAHHGGRGGGTPAVMTVNGFKRGESGGGPAECDGHFHGDDELIVALSTEWYAHGRRCHRRIRITSAHHGRTVEARVVDECDSSRGCRHNIVDSSPAVWRALGLDTDIGQVPVTWSDA

SEQ ID NO: 1184 - protein, 144 aa, Zea mays
  VARIANT 9: note = Ancestral polymorphism is V, Derived polymorphism is A
  VARIANT 80: note = Ancestral polymorphism is A, Derived polymorphism is V
  VARIANT 124: note = Ancestral polymorphism is V, Derived polymorphism is G
MAKTKIAVVIAILALLQVSCAAARRHGKPAHGDHDGDDTPAVMTVNGFKRGEDGGGAASCDGRFHSDDDLIVALSSRWYAGGKRCGEAIRITAESGRTVRARVVDECDSQGGCRNNIVDSSRAVWKALGLHTNVGEVHVTWSDA

SEQ ID NO: 1185 - protein, 379 aa, Zea mays
  VARIANT 212: note = Ancestral polymorphism is G, Derived polymorphism is S
MAASLSKHLRLRLRGGGGGEHCLLPSRASTSHTSSPPPPLLSRPPAAAAPPPPGAGNEASAWSKLFLFAPGAITFGLGTWQLFRRQEKIEMLDYRTRRLEMEPVAWNESALSSVLRDPSALEFRKIVCEGDFDKEKSVFIGPRSRSISGVTENGYYVITPLIPRSTPDSLQSPILVNRGWVPRGWHDKNVKDLQILDEASEPPKAVKPDEKGSWWKFWSNKPKSSPEFEKPRMPPVRVIGVIRGSEKPSIFVPANEPNSGQWFYVDVPMIARACGLPENTVYIEDINEDVSPTNPYPVPKDVNTLIRHSVMPDDHLKYTFTWYTLSAAVTYMASKRIKAKKVSNFVSQISDDHNLEGLFTARLDMAIVFSPSTVSCNAF

SEQ ID NO: 1186 - protein, 168 aa, Zea mays
  VARIANT 108: note = Ancestral polymorphism is C, Derived polymorphism is Y
  VARIANT 21: note = Ancestral polymorphism is W, Derived polymorphism is R
MATSTKLAFLAVAVLLLQAAWCGLARHHHHHGGHHDPDPCGDSSALLRHRDHRCTSPADGGTAAVMTVNGFEKGQDGGGPAACDGHYHSNGDLITALSTRWYAGGRRCHKPIRITSTHTGRSVVARVVDECDSRHGCKDNIVDTSKAVWDALGLDTNVGEVPVTWSDA

SEQ ID NO: 1187 - protein, 909 aa, Zea mays
  VARIANT 398..909: note = Derived polymorphism lacks residues 398 to 909
  VARIANT 488..909: note = Derived polymorphism lacks residues 488 to 909
MFVLTATTSTTTATSLLLRCRPLPSPKTVTLATPPAILPFCIRSRFSASASASASSVSPQSRATAAAAAGKSREKKPPTARAKRADAVPAAAAPGMSASGGGSAGKRTVADVLMGNARAAASKAKKAAPSPKKPQAKTDGAEVEPEAAAVAEKPPSPARSKRASSPAKSPKLLPDGSTSSAKSKGPAALAQLDAAKENPPSPKRSKTLAAKSDTQPSGEGVVGLGHTDGKKGSPSPTKAKGQASQSEEKKRAASPKKAKTTDSPKTEKNITLELKKKGSEFDPMAVAYWKPGEPVPFLFLARALDLISNESGRIVITEILSNVFRTVMATTPDDLLATVYLSANRIAPPHEGIELGIGDASVIRALAEAYGRKEEHVKKDLKELGDLGLVAKASRSSQKMMFKPKPLTIARVLSTFRTIAKESGKDSQDKKRNHMKGLLVAATDCEPQYITRLLQSKMRIGLAEKTVQMALGQAAVYADKNPLPPKVQSPFEEAAKIIKQAYSVLPIYDKIVPAILEVGVWKLPETCKFSIGVPVGPMLAKATKSVSEIIDKFQGLEYTCEYKYDGERAQIHCMEDGSVEIYSRNAERNTGKYPDVVDAVSRFRKATVKSFVLDCEIVAYDREKQKILPFQILSTRARKGVTINDIKVSVCTFGFDILYINGKPLLQEQLKIRREHLYNSFEEVPGVFKLATAITSNDLEEIQKFLDTAVNSSCEGLIIKTLDKDATYEPAKRSNNWLKLKKDYMDSIGDSLDLVPIAAFYGRGKRTGVFGSFLLACYDEQNEEYQTICNIGTGFSEQQLEERSASLRSKVIEKPKAYYRFGDTMNPDVWFEPSEVWEVKAADLSISPVHRAANGIVDPNKGISLRFPRLLRLRDDKSPEQATTSDQVADMYRSQKINHGYNQEDEDDD

SEQ ID NO: 1188 - protein, 159 aa, Zea mays
  VARIANT 144..159: note = Derived polymorphism lacks residues 144 to 159
  VARIANT 38..159: note = Derived polymorphism lacks residues 38 to 159
  VARIANT 25: note = Ancestral polymorphism is E, Derived polymorphism is K
MQLLQGLFAALHTLAGCISFELKSEKENAEIRLSDPLQYQSIVDAEWNIIYDKLDKCVKSGAKIVLSRLAIGDLATQYFADRDILCARRVTEEDLQRVAAATGGTVQTSVNNVINDVIGSCEVFEEKQVGNERFNIFSGCPSGQTATIVLRGGADQVFY

SEQ ID NO: 1189 - protein, 224 aa, Zea mays
  VARIANT 166..224: note = Derived polymorphism lacks residues 166 to 224
  VARIANT 151: note = Ancestral polymorphism is R, Derived polymorphism is C
  VARIANT 148..224: note = Derived polymorphism lacks residues 148 to 224
  VARIANT 122: note = Ancestral polymorphism is V, Derived polymorphism is A
  VARIANT 113: note = Ancestral polymorphism is C, Derived polymorphism is Y
  VARIANT 66: note = Ancestral polymorphism is G, Derived polymorphism is W
  VARIANT 62: note = Ancestral polymorphism is G, Derived polymorphism is S
  VARIANT 59..224: note = Derived polymorphism lacks residues 59 to 224
  VARIANT 56: note = Ancestral polymorphism is H, Derived polymorphism is Y
  VARIANT 22: note = Ancestral polymorphism is G, Derived polymorphism is D
  VARIANT 11: note = Ancestral polymorphism is C, Derived polymorphism is Y
MLSVNASLTHCCISLTDTFYGGGGQDQTNATSAEQSSTLQYHLARSTITASPSTLHLARVDGRGRGEYWACTDVRPDVANKGILGVLETTNARLDAAIQLEATLLNMAKESGYWSPKVREIAEVHMALVKMRAATDIDAIMRHRRCLQNRRLLIQDYITCRPDADQACGAEAALAKSLGSLHIGRKRGYPVQETMSDRLPESDDAELLTKRLKALHITHGYSTS

SEQ ID NO: 1190 - protein, 198 aa, Zea mays
  VARIANT 192: note = Ancestral polymorphism is G, Derived polymorphism is D
  VARIANT 162: note = Ancestral polymorphism is R, Derived polymorphism is W
  VARIANT 3: note = Ancestral polymorphism is R, Derived polymorphism is S
  VARIANT 1: note = Ancestral polymorphism is M, Derived polymorphism is T
MARFALVACAAATAALLLGVAAADVASIITQDVYNQMLPKRDNTQCPANGFYTYDAFIYAFCTGYEYTIHTEIPVGVRGRTEIPVGVRETARDTIPYLPTLPQYKGMSIRSSEITKRSTLALPMSRFAFVLRLTVAPSARTITTAPPCPHVQELFGDEHHPRNMVDNMVLIIIDQTYSALLEIYGPEAPPSGDGHIQI

SEQ ID NO: 1191 - protein, 320 aa, Zea mays
  VARIANT 50..320: note = Derived polymorphism lacks residues 50 to 320
  VARIANT 40: note = Ancestral polymorphism is P, Derived polymorphism is L
MVSSSLKATAAAATMVVVAAVIASTADAAGSYYIPTPATPDFLSSPVFLWVAANVIIVWLVSSSRRRGRAADDDTGEPSSAAHDGGGGEAVVPGAVDDDSFYASEYEAFSDATLVSRRPQAREASAGRRSDRPRVRKKPAGGGQDAATTPATRDDEPPPRDGRRRRGQEETAAPAVSSVVVDEDVSMDSLWASIVQQRAARPVVVRKSESWGNEELPRLQRVAETAARRQVRKSVSAVVAKAAAATPPPAPPSASRQTGWRTRDVLVTISPDDLLRRAESFIRRQREHLRLQRQESEQRQLLLQQRRVHGAAPPAPLIRV

SEQ ID NO: 1192 - protein, 164 aa, Zea mays
  VARIANT 123: note = Ancestral polymorphism is R, Derived polymorphism is I
  VARIANT 112: note = Ancestral polymorphism is G, Derived polymorphism is S
MASASRWAWMAEVAGEELAKLEAAHPGRFGPLKAELERFVADPALDEAAFPLVSPRADAADTTPAASFHSAAPSRTVPVCTQAISHYPAAHSALTLRGTFAESSTRKRKPRGSVREREEGKRRRRASTPPGGTKDRALMAIERAQRCLERIRAVKQSLLAAWIH

SEQ ID NO: 1193 - protein, 540 aa, Zea mays
  VARIANT 3: note = Ancestral polymorphism is T, Derived polymorphism is I
MDTAVSQNATVAAAAGAGSGGGLAGLLPEVQTLEVLVAVSIFVAIHSLRQRRTQGLPTWPVVGMLPSLLLGIRGDMYEWITGVLKARGGTFTFRGPWFTNLQCVVTADPRNLEHLLKTRFGSFPKGPYFRDTVRDLLGDGIFGADDEAWRRQRRAASLEFHSAEFRALTASSLVELVHGRLLPVLAGAEAAGAAVDLQDVLLRLTFDNVCMIAFGVDPGCLRPGLPEIPFARAFEDATEATTLRFVTPTAAWRAMRALGVGHERVLRRSLAAVDEFAYDVIRRRREELGGDDAGAGRRSSDLLTVFTRMRDEDGRPYTDKFLRDICVNFILAGRDTSSVALAWFFWLLRRNPGAEARILEEIEGILAARKEAGEVVVEEEVVFRPEEVKRMEYLHAALSEALRLYPSVPVDHKEVVEDEVFPDGTVLKKGTKVVYAMYSMGRMESIWGDDCREYRPERWLRDGRFMSESAYKFTAFNGGPRLCLGKDFAYYQMKFAAASILRRYRVDVVEGHPVAPKMALTMYMKYGLKVTLTKRDKTKL

SEQ ID NO: 1194 - protein, 222 aa, Zea mays
  VARIANT 174: note = Ancestral polymorphism is Q, Derived polymorphism is R
MAAAVRRAEELVEREMGGRDASHDAAHALRVRDLALSLAAEEGLSAPDRLLTVELAALLHDVGDYKYTKNNVEDISVVEMFLQEVGLDEGQKDEIVAIIKGMGFKNEVSNKSIVEPTLEFAIVQDADRLDAIGAIGIARCFTYGGSKNSALHDPRILPRDSLSKEKYMSKEEKQTSINHFHEKLFKLKDMMKTEAGKRRAEKRHRFMEEFVAEFYEEWSGRA

SEQ ID NO: 1195 - protein, 536 aa, Zea mays
  VARIANT 192: note = Ancestral polymorphism is P, Derived polymorphism is R
  VARIANT 448..536: note = Derived polymorphism lacks residues 448 to 536
  VARIANT 453: note = Ancestral polymorphism is M, Derived polymorphism is T
MPSSSSGPPSSDVRSIPYLDECDAPRRKRRHSASAIYTPPNITATQARATRRHLINQSRIARKVHSRICGSIKRSYYGTPDYECSYCHAVFWYAERVRSNQQDSSIRYNNCCKGGKISIPPFKPRPEPLASLARFDGNATSRKLIRNIRQYNCLFAFTSMGAQIDNSVNDGRGPPLFKICGQVHHRIGTLLPDDGSPPRFIQLYIYDTTNEVQNRINALDSGDRTQDNFDPVIIRNLIKMLDDHNPFVKKFRMARDRLADNPNEEFTIRLIGAKEGDPIQYNLPTTDELAMLVVGDFTLDTFKRDIIIETQNKELKRISSLHPAYMALQYPLLFPFGKRGFQIGVLYNGATSSGQNARKHLTMQEYYCYQFHYRKNQPNPYLCYAMLSSQAKVDARACIDENRLNYIINNQRNLRMESIQGITDAVSRGCISGEQMGKTIILPASHTGGRRYMIQNYHDGIAICRVHGPPDFFLTFTCNPNWQEILESLSQPGQTPSERSDIIVRVYHMKLNDLLHHIRNGSIFGPCTAGGHTAHS

SEQ ID NO: 1196 - protein, 764 aa, Zea mays
  VARIANT 190..764: note = Derived polymorphism lacks residues 190 to 764
  VARIANT 24..764: note = Derived polymorphism lacks residues 24 to 764
MASVSTAPRAPLPAAASSSLSARQVDPNPSGSHFLDGRRLRVVRRLAGAAPSRRAPLVCCSARSPDADAGDERRRRGWDAMLHDAFKGAVRRWSEYVSNYWPPPTSVKEAGTGKRVGRSHEEEVMNGDEEERKVGEEEGKWSWARWKRHFALIEESGRLVDELQLQLQAAVYREDYRTAHKLRLAIAATSKNDAVGRAISDLNMAIDEERYKDAAYIRDHAGAGLLGWWSGISGNLSDPYGLIIRISAEHGRYVARSYDTRQLASDSPGLPIFEIYFAEANGGYNLQVQCFTLNRILSIFWKIGMFFQAVHLKPDGSDSDQVPNMLREKLGIDSINISSSPLGSKHEEFDGSVNMDDKDSDDSNIAAGPGSKNLSSDLTAVPRIKILKVVPMQNVDHDYIINIFDQISEEDDDNDDHEVENESSEDVDNDDNSGVAETVSAEENGDESGDESDIETLVSFDFVSENNVYASRPSAEAFERMPARLEKRDRFSFSFYTEEYSKKLDAGKARQTSKETVGLHADQQDYDGFVQLDRVKLSGSNKKLSMCALRDGQAKIARTRWWKSEGEKAEVFKKGPSKSTWKYYNLASSKITRFSKNCMELPTLVVFRCLYFQILLPVCSKLCLYVTTSGFDSEILSLQRKFGQWRDDGSSEEHSDLLFYEHVEAVKLTGDNLMPAGQVVFRAKVGERYQLPHKGIIPRELGVIARYKGQRKIADPGFQNPRWVDGELLIIDGKFIRDGPVIAFFYWTSNFHRFEFFRRLRLPE

SEQ ID NO: 1197 - protein, 180 aa, Zea mays
  VARIANT 118: note = Ancestral polymorphism is G, Derived polymorphism is D
MAARLPLLVLAVVAASLLAADARPCHTFFVAFRADPNPSRGDDAVPHHLGAPHVATVITVFRVRRLGPHVPHGHRNHHHLHSIPANVRIHRPDLPHPAAGPQERARDIFVVVIGLLFGVACGALTAASVYLVWSMVAGAAAVSAYDELYDDEDEASDIESPKKVGYVIIQELEVDEGGKN

SEQ ID NO: 1198 - protein, 542 aa, Zea mays
  VARIANT 265: note = Ancestral polymorphism is I, Derived polymorphism is T
  VARIANT 11: note = Ancestral polymorphism is A, Derived polymorphism is V
MEVAMVVSARASLLILVISLCSPYKFIQSPMDLGPLNLLPTTSTAAASSDFGRILFRAPAAVLRPQSPRDISMLLSFLSGSPSLSRVTVAARGAGHSIHGQAQAPDGIVVETRSLPGEMEFHHVRGGGEGRASYADVGGGVLWIELLERSLKLGLAPRSWTDYLYLTVGGTLSNAGISGQTFKHGPQISNVLQLEVVTGRGEIVECSPSKEADLFNAVLGGLGQFGIITRARILLQEAPEKVTWVRAFYDDLGAFTRDQELLVSIPDSVDYVEGFMVLNERSLHSSSIAFPASVDFSPDFGTRSSPRIYYCVEFAVHHHHGYQKQSQAAVEAISRRMSHMASQLYSVEVSYLDFLNRVRMEEVSLRSAGMWEEVHHPWLNMFVPKPGVAGFRDLLMDNVSPDSFQGLILIYPLLRDKWDTNTSVVIPDSGPTADDPVMYVVGILRSANPGPEEDGDGCSHRCLHELLRSHRRIADAAEARLGAKQYLPHHPTPARWQQHLGRRWERFADRKARFDPLRILGPGQGIFPRTAQDAAAAAAYGS

SEQ ID NO: 1199 - protein, 217 aa, Zea mays
  VARIANT 204..217: note = Derived polymorphism lacks residues 204 to 217
  VARIANT 78: note = Ancestral polymorphism is D, Derived polymorphism is Y
  VARIANT 77: note = Ancestral polymorphism is P, Derived polymorphism is L
  VARIANT 51..217: note = Derived polymorphism lacks residues 51 to 217
  VARIANT 44: note = Ancestral polymorphism is A, Derived polymorphism is T
  VARIANT 39: note = Ancestral polymorphism is P, Derived polymorphism is S
  VARIANT 37: note = Ancestral polymorphism is A, Derived polymorphism is V
  VARIANT 36: note = Ancestral polymorphism is A, Derived polymorphism is V
MGNCQAAETATVLIQHPGGGRTERAYWALSAGAVMAANPGHYVAAVITVPQPGGAGDDGAASASAAAPVKHLKLLRPDDTLLLGRVYRLVSFEEVLREFASKRHVKLSRVTVRAKDEGEDVKPAPKHRRRRASGGGERKESERSLAKVMGQTEEQLVPEAGPASGPAPSSSKQGDADTPAGLDADLEALLQPHGALLGRRAGRQWRPALQSIAEGEG

SEQ ID NO: 1200 - protein, 737 aa, Zea mays
  VARIANT 634..737: note = Derived polymorphism lacks residues 634 to 737
MQVCLRRGLSLVRQHTSRVLPPLSLHPTRFFLHQSASDPMGEGSVPGKDAKGKGKAKHPAQASALVARDDSYLEAVTHKRIRLFEEIQARQAVERLNIGGEVIKITLPDGAIKEGKKWITTPMDIAKEISSGFAASCLIAQVDETLWDMGRPLEGDCKLQMFKFDTNEGRDTFWHSSAHILGESLERAYGCKLCIGPCTTRGEGFYYDAYYNELTLNEEHFGVIENQAKKAVAEKQPFERIEVSRAEALEMFAENKFKVEIINELPEDKTITVYRCGPLVDLCRGPHIPNTSFVKAFACLKASSSYWRGKADRESLQRVYGISFPDSRRLTEYKHFLEEAKKRDHRILGKSQELFFFHELSPGSCFFLPHGARIYNKLMNFMRKQYRDRGYQEVLSPNIYNMQLWETSGHAANYKENMFVFEIEKQEFGLKPMNCPGHCLMFANRVRSYRELPLRMADFGVLHRNELSGALTGLTRVRRFQQDDAHIFCREDQIKDEVKAVLEFINYVYEIFGFKYELELSTRPEKYLGEIETWNKAEQQLTEALNEFGKPWKINEGDGAFYGPKIDIGVFDALKRKFQCATLQLDFQLPIRFKLTYSAEDEAKIERPVMIHRAILGSVERMFAILLEHYNGKWPLWLSPRQAIVCSVSSGSVEYAKQVLAMLHEADFHVDIDVSDRTIQKKVREAQVAQFNYILVVGAQEAETGNVCVRVRDNADLATMSVDGLITRLREEIVAFK

SEQ ID NO: 1201 - protein, 165 aa, Zea mays
  VARIANT 24: note = Ancestral polymorphism is K, Derived polymorphism is R
MNVEKLKKMAGAVRTGGKGSMRRKKKAVHKTTTTDDKRLQSTLKRIGVNTIPGIEEVNIFKDDVVIQFVNPKVQASIGANTWVVSGTPQTKKLQDLLPSIINQLGPDNLDNLRRLAEQFQKQAPGASGAEAGASAGAAQDDDDDVPELVPGETFEEAAEEKKESS

SEQ ID NO: 1202 - protein, 456 aa, Zea mays
  VARIANT 17..456: note = Derived polymorphism lacks residues 17 to 456
  VARIANT 283: note = Ancestral polymorphism is L, Derived polymorphism is S
MCFVLLFLRCRIHTGCQIANRKYCNCNVKLSMLVRLQRAAVDIRVPRVEAPPISRTSFPAQPSSLSPVHTGRAAAAHPTRQRRRRPPPAPSSRRRETEQPVAAGVGAPCPAIQHQKWNPSHPREVVDTRRRAAKEEELAVAGSSRPPMSSGADGSDPITGLGPSTIPEPPDREPPHLQSPSPAAQQEVAASQAETPVPAVTIVISRPGEEVQTPDAMGGSPACSTQAGDGKATATSVSLTASAAAKEAELARSDSFDDYEQCRMNTFFTSAEFVNRRQKNLWSTLDVDVVVILQKHIAHALMFGFVLEVQTSVRYASRLLPISPLQRRKQVYVYYFALHIFQSVLDHLENTSYWVWRVDSTYGRGRGGRERGWFSPLWVAFAILIGGLLLDVLISVSLGVSALPVNIIIGVLIVLGLGTALRLALECCQEWGSRRNVGNMPRLENIPPTGYHPAVV

SEQ ID NO: 1203 - protein, 83 aa, Zea mays
  VARIANT 20: note = Ancestral polymorphism is M, Derived polymorphism is I
MISILAQERLLGFALGSVSIGGFVLHQRRAIYRSIAEADGSPYFYQPGEIASRRSSTELAHVWNKAVDETLGRLVVYLSSRGW

SEQ ID NO: 1204 - protein, 85 aa, Zea mays
  VARIANT 3: note = Ancestral polymorphism is R, Derived polymorphism is H
  VARIANT 8: note = Ancestral polymorphism is L, Derived polymorphism is I
  VARIANT 19: note = Ancestral polymorphism is A, Derived polymorphism is V
  VARIANT 21: note = Ancestral polymorphism is G, Derived polymorphism is E
  VARIANT 32: note = Ancestral polymorphism is A, Derived polymorphism is T
  VARIANT 33: note = Ancestral polymorphism is P, Derived polymorphism is L
  VARIANT 43: note = Ancestral polymorphism is S, Derived polymorphism is F
  VARIANT 48: note = Ancestral polymorphism is R, Derived polymorphism is C
MWRRLHTLAPALCRATAVAAGAPAASASSVAAPPRSPRRPLLSVAPSRSSQGTSRRVWRTSCPSPRGSSERSWRPSSRYAAKCKA

SEQ ID NO: 1205 - protein, 36 aa, Zea mays
  VARIANT 16: note = Ancestral polymorphism is Y, Derived polymorphism is C
MGTTILAMCGNRHLDCARRNPAEILGGKLEFAKNTT

SEQ ID NO: 1206 - protein, 102 aa, Zea mays
  VARIANT 3: note = Ancestral polymorphism is V, Derived polymorphism is M
  VARIANT 4: note = Ancestral polymorphism is D, Derived polymorphism is N
  VARIANT 10..102: note = Derived polymorphism lacks residues 10 to 102
  VARIANT 13: note = Ancestral polymorphism is D, Derived polymorphism is N
  VARIANT 28: note = Ancestral polymorphism is S, Derived polymorphism is N
  VARIANT 30: note = Ancestral polymorphism is A, Derived polymorphism is V
  VARIANT 35: note = Ancestral polymorphism is Q, Derived polymorphism is K
  VARIANT 43: note = Ancestral polymorphism is R, Derived polymorphism is L
  VARIANT 50: note = Ancestral polymorphism is L, Derived polymorphism is I
  VARIANT 57: note = Ancestral polymorphism is A, Derived polymorphism is V
  VARIANT 63: note = Ancestral polymorphism is P, Derived polymorphism is R
  VARIANT 94..102: note = Derived polymorphism lacks residues 94 to 102
MTVDGLTVDSIADKGWTILPEAESDWRSHAAAVVQSVKLIKKLLKWGWILERTKQLVVVLEKPDLWEDPVFAGRVSREQGELMGKIKSVNQFEQELIEHIEY

SEQ ID NO: 1207 - protein, 152 aa, Zea mays
  VARIANT 134: note = Ancestral polymorphism is G, Derived polymorphism is D
  VARIANT 112: note = Ancestral polymorphism is P, Derived polymorphism is Q
  VARIANT 84: note = Ancestral polymorphism is C, Derived polymorphism is F
  VARIANT 71..152: note = Derived polymorphism lacks residues 71 to 152
  VARIANT 48: note = Ancestral polymorphism is R, Derived polymorphism is K
  VARIANT 44: note = Ancestral polymorphism is H, Derived polymorphism is Y
  VARIANT 19: note = Ancestral polymorphism is T, Derived polymorphism is I
  VARIANT 14: note = Ancestral polymorphism is H, Derived polymorphism is Y
  VARIANT 12: note = Ancestral polymorphism is A, Derived polymorphism is S
  VARIANT 10: note = Ancestral polymorphism is A, Derived polymorphism is T
  VARIANT 2: note = Ancestral polymorphism is P, Derived polymorphism is L
  VARIANT 1: note = Ancestral polymorphism is M, Derived polymorphism is K
MPIAIETDKAKAQHYELPTTFFKENELSNIEIIVADISKFEMEHSFDRIVSIEMFEHMKNYKSLLKKISRWMKEDGLLFVHLFCHKAFPYHFEDKNDDDWITRYFFTGGTMPSANLLLYFQEDVFVVYHWLVSGMHYARTRYILPNFKLSSP

SEQ ID NO: 1208 - protein, 98 aa, Zea mays
  VARIANT 55: note = Ancestral polymorphism is A, Derived polymorphism is V
  VARIANT 53: note = Ancestral polymorphism is V, Derived polymorphism is E
  VARIANT 42: note = Ancestral polymorphism is P, Derived polymorphism is L
  VARIANT 39: note = Ancestral polymorphism is R, Derived polymorphism is L
  VARIANT 21: note = Ancestral polymorphism is L, Derived polymorphism is P
  VARIANT 14: note = Ancestral polymorphism is R, Derived polymorphism is H
MNTQVVTTQRQLMRDLEVLPPEEATASAKSMNVNGACQRGKPLRFLEQVVVMVVAVDVDEVLGSFLAALNKFIVDRCSWNHSVSKYHVYEFFKVNMKS

SEQ ID NO: 1209 - protein, 872 aa, Zea mays
  VARIANT 370..872: note = Derived polymorphism lacks residues 370 to 872
  VARIANT 195: note = Ancestral polymorphism is S, Derived polymorphism is F
MAAAVAMRSGSSDGGGGYEKSGMDTGKYVRYTPEQVEALERVYAECPKPSSARRQQLLRECPILSNIEAKQIKVWFQNRRCRDKQRNESSRLQSVNRKLTAMNKLLMEENERLQKQVSQLVHENAYMKQQLQNPSLATDASCESNATTPANLRDASNPSGLLAIAEETLTEFLSKATGTAIDWVQMPGMKPGPDSFGIVTISHGGRGVAARACGLVNLEPTKNTKLSNDMWVWLYMSLRKAGGVGEKCISCGGTDDNILKIVEILKDRPSWFRDCRSLEVYTMLPAGNGGTIELVYMQMYAPTTLVPARDFWTLRYTTTMEDGSLVVCERSLSGSGDGQSAATTQQFVRAEMLPSGYLVRQCEGGGSIVRIVDHLDLDAWSVPEVLRPLYESSRVVAQKMTTTALRHLRQIAQETSGEVVYALGRQPAVLRTFSQRLSRGFNDAISGFNDDGWSVMCGDGMEDSVPPAVLVRFLREHRSEWADYNFDAYSASALKTSPCSLPGLRPMRFSGSQIIMPLAHTVENEEILEVVRLEGQTLTHDEGLLSRDIHLLQLCTGMDEKSMGSCFQLVFAPIDELFPDDAPLVSSGFRVIPLDIKTVEYFLLVCMFGIKFVPIPCLFLPPQRIKFLHDGPPSGRTLDLASSLEVGATTQQVAGNGSQDVCNLRSVLTIAFQFPYETHLQDTVAAMARQYVRSIVSAVQRVSMAISPSHSGLNTAGQKLISGSPEAATLVRWICQSYRYHLGVDLVSHSDQAGESLLRMFWDHQDAVLCCSFKEKPVFTFGNQMGVDMLETTLVALQDLTLDKIFDEPGRKALHAEVPKLMEQGYAYLPAGVCLSGMGRHVSYEQAVAWKVLGEDGNVHCLAFCFVNWSFI

SEQ ID NO: 1210 - protein, 331 aa, Zea mays
  VARIANT 43: note = Ancestral polymorphism is T, Derived polymorphism is R
MEVMVPVRRPRFRRGGDGSGDKMTKYGALVAAGRSEPRQGEQRTMKWSVDGFASLLDKGDGWTYSRVFELMGYNWYLKLNPRDKKSGDDGTEYVSLVLQLDDLSVKPDTVVKASFKLLIYDQAYGKHSEHQVRHSFQTASTSSGASCMVSLEKLKERPSKFIVNNSCTFGVEFIKVKASKVSTTSETLFVRKPSVFDEARTYTWDIEDFFALKNSGHSPEFEVGGHKWSIGVYTSSDGNHLTLDLCMKNTDGVQHDGSANLVEFSLAIKHQEGGNHWKATGRSQFTSNARCWGWTKFISLEDFKDSSNGYLVKNKCCIEAEVALVGSSKMK

SEQ ID NO: 1211 - protein, 345 aa, Zea mays
  VARIANT 17: note = Ancestral polymorphism is H, Derived polymorphism is N
  VARIANT 96: note = Ancestral polymorphism is E, Derived polymorphism is G
  VARIANT 114: note = Ancestral polymorphism is P, Derived polymorphism is T
  VARIANT 161: note = Ancestral polymorphism is D, Derived polymorphism is Y
  VARIANT 183: note = Ancestral polymorphism is I, Derived polymorphism is T
  VARIANT 203: note = Ancestral polymorphism is N, Derived polymorphism is I
  VARIANT 211: note = Ancestral polymorphism is A, Derived polymorphism is S
  VARIANT 215: note = Ancestral polymorphism is V, Derived polymorphism is I
  VARIANT 217: note = Ancestral polymorphism is D, Derived polymorphism is N
  VARIANT 229: note = Ancestral polymorphism is P, Derived polymorphism is S
MVTRYTDCTFLPGRPNHGKNQKSAKVAAIPCTPAAQVGRGAASSEMEEKSSFIWQIDGFSSLLDKQEGWTNSGYFKIKDLNWYLQLNLKDRKSGDEREYVSLILVLSKTSGLEPDTIVEASFKLLIYDQAYGRHSEHEFSHRFQTTESSRSSGISCMILVYTLKEPSSGFIVGDSCVFGVELIKFTTAKVKDGSGTLHVQKRIGFCSAREAYTWIINDFLSLKGRCYSPEFEIGGHKWYLTMYPSGTGIDGDKEILSLYLHMAKPNGDASLQNSGVLVEVSLSIKDKVTSNRKTMTGRCQLQATEGEGWGWSNFMATKSVKDWYLVKGSCLIEADVAILGSSKMN

SEQ ID NO: 1212 - protein, 440 aa, Zea mays
  VARIANT 135: note = Ancestral polymorphism is V, Derived polymorphism is A
  VARIANT 180..440: note = Derived polymorphism lacks residues 180 to 440
  VARIANT 381: note = Ancestral polymorphism is R, Derived polymorphism is W
MPAAAPHPPPASLDARTGGRILRRAAGHLLHPASLPPLLLAALLLLLFRSALLAGTLRLASFADRDPALRSLLARLSPPNTPSPPPPPHHLPRRRSPFTSPSSSLSDDDILVSPLDPAASAPSRRRNASYYHVLVTSYSAAPKPYPLPLPNPLPASASPFFLAVYNETAPPKPASPLGREFGFLALTRRDAAAIVNLLALLSSAHIFAILGYIAVHSAALGAVFASVAGHHVPGRRLVFLLTCAARGAKRLTGFTFLRWATRDAVVQMLCLWFFADVHDQAQLFRLFVVAKLMPFSTSVNPWLGAVVAGPELDGFFVAWAVLDAVVSVLFTVVPWVVVMDRDPRPPGHNAVKEGCYLVSLMATDATFLKCWETVVCGSMGRLIMVTFGGNVFGGFLHSIAQVYFMVVWLLFYFAARSKEVRMGGRQFGLEDVAAALDGFR

SEQ ID NO: 1213 - protein, 213 aa, Zea mays
  VARIANT 174: note = Ancestral polymorphism is K, Derived polymorphism is M
MDLVPQLDSPHSDNGGGGGSGSLASGALSPGASSAGTVSALASPSRYESQKRRDWNTFGQYLRNHRPPLSLARCSGAHVLEFLRYLDQFGKTKVHTAACPFFGHPAPPAPCPCPLRQAWGSLDALVGRLRAAYEENGGRPENNPFGARAVRLYLREVRDHQSRARGVSYEKKKKRKKAPPHPVPAAVISSSHDGNGHHYEHQMPPPPPPGAAA

SEQ ID NO: 1214 - protein, 609 aa, Zea mays
  VARIANT 224: note = Ancestral polymorphism is G, Derived polymorphism is R
  VARIANT 171..609: note = Derived polymorphism lacks residues 171 to 609
MRGRNDSGNSKPVVLCCVMIVCLCLLFLYFSGSNGQAGSTAFEYGTKFSRSLGWGSDDGSEESIFGTGDADDVKPKSFLVCDDRHSELIPCLDRNLIYQMRLKLDLNLMEHYERHCPPPERRFNCLIPPPHGYKVPIKWPKSRDVVWKANIPHTHLAKEKSDQNWMVEAGEKIKFPGGGTHFHHGADKYISNIANMLNFKDNNINNEGMLRTVLDVGCGVASFGGYLLSSNVIAMSLAPNDVHQNQIQFALERGIPAYLGVLGTKRLPYPSRSFELAHCSRCRIDWLQRDGILLLELDRLLRPGGYFAYSSPEAYAQDEEDLRIWKEMSALVERMCWKIAEKRNQTVIWVKPLNNDCYKRRAHGTTPPLCKSGDDPDSVWGVPMEACITPYPEQMHRDGGSGLAPWPARLTTPPPRLADLYVTADTFEKDTEMWQQRVEKYWSLLGPKVKPDTIRNIMDMKANFGSFAAALKEKDVWVMNVVPHDGPSTLKIIYDRGLIGSNHDWCEAFSTYPRTYDLLHAWAVFSDLDKRGCSAEDLLLEMDRILRPTGFAIVRDKGTVIEFIKKYLHALHWEAVAAADAEPSSESEENEMILVIRKKLWLPEAGSHT

SEQ ID NO: 1215 - protein, 1166 aa, Zea mays
  VARIANT 291: note = Ancestral polymorphism is P, Derived polymorphism is S
  VARIANT 29..1166: note = Derived polymorphism lacks residues 29 to 1166
  VARIANT 15..1166: note = Derived polymorphism lacks residues 15 to 1166
MQGFPGGAPDPQQLQATMLAIEQACSLIQLHMNPSEAEKVITSLHSSLMPYQVCRFILETSQKPNARFQAAGAIGDAAVREWGVLTDDNKRSLIIYCLNYVMEHASSPDGYVQSKVSAVAARLLKRGWVEFSDQEKAAIFFEVEQSIRGIHGPNRQFAAINFLETLVSEFSPSTASAMSLPKEFHEQCEYSLEVQFLKDFYCWAQAAVFNTADKILNSTVTIPDERACSAALRLMFQILSWNFKHTVEHESSDAKINFGLRIDTINLKKFERSLVKPGSMWREILISSGHPTWVLNFYTTLRQKYSYDTLWGDSPIAVSCRQLIVQLCSLAGSVFPNDNGDAQIKHLMLILSAVVLWIEPPDVITASIRNGGSESEFIDGCHALLSIASLTTGSLFDNLLKSIRPYGTVNLLSALTSEAVKSVLNNQSEEETWGIDSLDILLETWNVLLGDVDADKNPISTDGALASSSLFKMIVESHLKAAADSAFEDTDDTEYFHVSVSKRDEQLALYALIARASANTTIPFLAQLFSERFARLNQQRNGESDPTQTLEELYWLLLVTSHVLTDSGEGETLLIPEALQAGFPNVIEAAHHPVVTLSWSIINFSRQCLDPGIRAKYFSPRLMEAVIWFLARWVATYLVPLDVSRGKVSREIDNVGTNGSQHSRKLLNSFAWENNQGELVLDFVVLISMLALTTYQGENELQTLTCQKLLATVVRRKHTCTYLVQLDSWRDLTRAFASGRSLLSLSGRLQRSLAETLASAASCIKDPEASAQYLRDLMGPVAGCLVENASRSDLKSVAQQADVIYMVCCLLERLRGAARATQPRTQKVLFEMAHTVMNPLLTLLEVYKNHSTVVYMILKFVVDFVDGQAVFLDAKETSALVSFCLQLLQIYSSHNIGKVMLSLSSSLRNESQAEKYKDLRALLRLLTNICSKDLVGFLSDCGGEGSPDIAEVIYIGLDIVTPLISLDLLKYPKLSRDYFVLISHLLELYPEKVAHLNSDAFTRIIGSLDFGLRNQDSDVVERCLAAVNALASYNFKERLGGRGRLNSQLMESEGSNGKLQESISSHFLRLLLQILLFEDFRSELAGYAADALLPLLFCEQELYQRLVHELLDKQQNPTVKSRLATAFHNLTSSNNLSSSLDRPNRQRFRKNLLSFMADVSGFMQIK

SEQ ID NO: 1216 - protein, 582 aa, Zea mays
  VARIANT 131: note = Ancestral polymorphism is R, Derived polymorphism is C
MSHFVDIRCCGCGIWPAPVIINASARSFRIRARSVSLDYPSRTEQKNETNLVVVRPERRLRDDFVDAGADHGSGRATADFKKAVPSFDANLRNLLDEQLKPGRPLDHNSGKVANRACFSKHKTGCYAYSLRRHCNNGKLIQACRIIDEMVLHGQVPDSKCCVRLIRGLVRTGNTNKARHVLEVMVLSGGVPDTITCNMLIGQLCCEGQLSSAMKVLEDMRFTGCSPSGITFNTLIRCMCSHHLYDRAVSFWKEQLKIGWPPYEMTSTLLVDLICKQCGPMRALEVLDELDLEGCQPHVVSYNTLISASCKAGCLKDAKLILTRLSAEGLEPNGTTYCILLHSLCDKRRWSEVGDLLAHMKQANHKPDVTAYNIFINYFCRYGHLDQAIDVLEMMVSEKCFPDIVTYNTLLNAISKRGMVQEALGIFHSIRENGCQVVRITYNTLIDALAKRGDIINAMTLFDEMIVDGINPDDVTYGSLIMGFCKKNMAKEALELLNQMLALGFEVKATTFSMMIQALCKGCKAEAAAEILRVMVSRNVNHRSAFYLSIVTRVAKSGRLKEAQILHQELYRARSLKRILNLF

SEQ ID NO: 1217 - protein, 215 aa, Zea mays
  VARIANT 11..215: note = Derived polymorphism lacks residues 11 to 215
  VARIANT 12: note = Ancestral polymorphism is A, Derived polymorphism is T
  VARIANT 18: note = Ancestral polymorphism is P, Derived polymorphism is L
  VARIANT 54: note = Ancestral polymorphism is L, Derived polymorphism is P
  VARIANT 56: note = Ancestral polymorphism is R, Derived polymorphism is C
  VARIANT 74: note = Ancestral polymorphism is R, Derived polymorphism is W
  VARIANT 75..215: note = Derived polymorphism lacks residues 75 to 215
  VARIANT 94: note = Ancestral polymorphism is R, Derived polymorphism is C
  VARIANT 100: note = Ancestral polymorphism is S, Derived polymorphism is T
  VARIANT 110: note = Ancestral polymorphism is A, Derived polymorphism is V
  VARIANT 114: note = Ancestral polymorphism is R, Derived polymorphism is H
  VARIANT 118: note = Ancestral polymorphism is A, Derived polymorphism is D
  VARIANT 136: note = Ancestral polymorphism is R, Derived polymorphism is C
  VARIANT 197: note = Ancestral polymorphism is I, Derived polymorphism is V
MTVAGAIRRRRASRPHLPLFVLVLLFSTLTPRTSALRVPLRHAATLVSLSHSLLSCAAITRVARGDAAAAARVRRIASLLSSRGAWGLGWDYLRHYAFSSAIGCGLSCAVAASRLIAAVAQASRLRSATDAAQWMRLHYDDICDVATQLLNGLLLAFSEEGPLREVFMDIKWEVEEGELLKDCLEVGAKDLKGLLVIAKDLFAGVSRTSTQHSEL

SEQ ID NO: 1218 - protein, 250 aa, Zea mays
  VARIANT 195: note = Ancestral polymorphism is E, Derived polymorphism is G
MNPFAKKPTPREVMRSSKRDLTNATRGIERDIASLQQEEKKLVAEIKRTAKTGNEAATKILARQLIRLRQQISNLQGSRAQIRGIATHTQAMHANTSVATGLQSASKAMGALNKQMEPTKQMKIMQEFQKQSAQMDMTNEMMSDSIDDVLDDDQAEEETEELANQVLDEIGVDIASQLSSAPKGKIAGKKVQVDGRFALYFTGNSTIVYCCSTSILSVIWLLYYCFHLKSVPKGQDNNLSSLTYFLGLLK

SEQ ID NO: 1219 - protein, 314 aa, Zea mays
  VARIANT 93: note = Ancestral polymorphism is G, Derived polymorphism is W
MDSRQGQQPNYKIYIRMMKTVLLDVKSTDTIDQIKSKIGALEGIDNSQQELFFAGSHLEKDNRLADYNIMTNSCVDLYVTDGMQISVSIPSVWKTIKLNVMKSQSVADVKAMIEQMGGIPLDEQILMHGCQKLEDNKLLSQCGLSNGHTLHVLVRPTDRLHISVDVDGEETLNLDVKSWYTVADVKLMIDTLEGLPARTQILMHTQPGGANTVLKDIETLQNQGIKNNDIVALYHKVNFFVKTYEGRNLVLSMRTCDTAEEIMKVIEEKLKVNTGVYYLHYRGRVLALGDTLRKHKIENNCTVDVRLRNSHVTK

SEQ ID NO: 1220 - protein, 199 aa, Zea mays
  VARIANT 36: note = Ancestral polymorphism is G, Derived polymorphism is D
  VARIANT 43: note = Ancestral polymorphism is D, Derived polymorphism is G
  VARIANT 124..199: note = Derived polymorphism lacks residues 124 to 199
MSTPSVPPPCPHLAAHRLSSRPLRFLRRCLRVCPLGRPEIRRGPRELLSCSPCAIASPSPTSRLYVCLSCAAVFCPSHTATHASASAGPGHEIAVDVDRAELFCAACGDRVYDPDFDHAVFLAQSSTPPRFSPPPPPPPPPLPSTSAGASITRTDGRKENTPRGHRDRSSAAKPRLRSLSSLSRPLVTPTTSIDQHWCR

SEQ ID NO: 1221 - protein, 697 aa, Zea mays
  VARIANT 50..697: note = Derived polymorphism lacks residues 50 to 697
  VARIANT 70..697: note = Derived polymorphism lacks residues 70 to 697
  VARIANT 148..697: note = Derived polymorphism lacks residues 148 to 697
  VARIANT 219..697: note = Derived polymorphism lacks residues 219 to 697
  VARIANT 248..697: note = Derived polymorphism lacks residues 248 to 697
  VARIANT 656..697: note = Derived polymorphism lacks residues 656 to 697
MEVCDELRSFEATGVYRLNGTCTSAGATYLDPVRLLNASYQRFRIVPSAYYSRSFGPQHQEGEPEIERPEKRRKRKRNQKPKPRELNPMERIAEARHQEAKPLLLNAHESLVKAKHLLEYISKTIKGNEHTLDAGSGSENNFVELGTSWRAPFYEITICFRNPHVLGNEEGFFHAQKTSFPLFNSLISVEGTDEAEGEFRNRRYILPRGSCFLMADFKRVRDLIPCSPNQGYNLIVVDPPWENGCVRQKEVYPTLPNKNFLYLPVQQLAHPTGALLVLWITNREKLRAFVEKKLLPSWGVEDSTVFYWLKVKPDGSLIGDLDLFHHRPYECLLLGYINVNANAKKGSNFKLLERSQVIMSVPGAHSRKPPLESPKPSRCIELFARELFPRWTSWGNEPLHFQDTITPRGSRILTLQLQTGMPGVRSESPSPEVSRVRMALPTASAKIASARAKVGERAKTPANSKAKGRSDAQEKRGRNGRLVPSLGCMSSPPLVPIGPDSEKRRCSWITANSEPHYVAFHDGEWGVPVHDDRMLFELLTLSQALGELTWPSILSKREELREIFCGFNLVLVSEFSENKINLLRSNGIVPLSEQKIRAVVTNAKQIQKVVEELGSFSNYCWSFVNHRPIANGFRYARQVPTKTPKAEAISKDLMRRGFQCVGPTTIYSFMQVAGIVNDHLSCCFRFQACSQHKASEK

SEQ ID NO: 1222 - protein, 762 aa, Zea mays
  VARIANT 15: note = Ancestral polymorphism is K, Derived polymorphism is M
  VARIANT 255..762: note = Derived polymorphism lacks residues 255 to 762
MATGRRGSPLLRRCKREGYTHGLRPPQMEALRAMCGALIPSLPVEGLHVQPQPGRGKDDLDRFFRASAADGAIPDEVAEMVTRCVWEGVLLMRIVLWVLSTRIGTLALCGRLCFSAGKSSFPYACRFADMPVERRERVLQRWSGARWLFPLKITFVIAKLLSHYAFYTMVNENSDNPSWKAIGYSVPVPAAAADVDRLRPRELGPAEAEAPSPRPLDSGVVETRSLNDATLLKSLTERGVAVKAGVSGAHHTVQCDVVIVGSGCGGGVAAAVLAAAGRKVVVVEKGDYFTAESYTSVEGPSMERLYEKGGIFCTSNVTTIMFAGTTVGGGSAINWSASVRTPEWVTQEWAREHGLPMFGRPEYAHAMDAVCARLAVTGGCREEGFQNKVLRRGCEALGLRGDAVPRNSSEGHFCGSCHLGCPTGDKRGTDTTWLVDAVARGAVVLTGCKAERFVLESNPGGRDGRSNRCVGLVATCMSDGITKKLRIEAKVSVSACGALMTPPLLRNSGLQNSHVGRNLHLHPVSMAWGYFPDSTPEAELSGKCYEGGIITTMRRVTARTIIQTPALGPGCWASLVPWESGRDMKERMLRYARTAHAFALVRDRGAGHVDGEGRVRYTPSREDVDELRNGLRQTLRILVAAGAAEVGTHRSDGLRLRCDGLRDEDLEAFLKQVTVEKGPMVPGHDKWALHCSAHQMGSCRMGSSPKHGAVDGRGESWEAEGLYVCDGSLLPTAVGVNPMITIQSTAYCVSKGIAESLARDNK

SEQ ID NO: 1223 - protein, 277 aa, Zea mays
  VARIANT 144..277: note = Derived polymorphism lacks residues 144 to 277
MKFQNESTLRSPGCTGGEKNTSQIPKALVGNGNEGGRMNWQQHRKNYPSAMRSSNGQTTLKSFLFKPRVVDGVPSPPPAAVMEAPICSPEPPKREIVRVTKTTIKEKASAFSSVGSTGKDGGGGALSAAVFKRFHSSAPRARAEGDRVQAGEDGDLELGGAGDARLDVEETGAESRRGPRSKRKSPIGGHEYMSEAKARRVVVLGDDPRPRSATTRGRARRSRGGEGEGGRALYNHYASGGGWWHGDKEGVDGEEIGWTDDMWEGMGSVTLGGLEWH

SEQ ID NO: 1224 - protein, 1493 aa, Zea mays
  VARIANT 1256..1493: note = Derived polymorphism lacks residues 1256 to 1493
MAAVLSAFVPDTAVRWRGLVTGEVARRMGVATEAKALLARLERVGAAVRDAEARAACGDDGAARWLANVRAAAYEADGAVDRCRVAARRRRAHDQQKQQAPLPRLLSSCCDTDTDTDVSSCVDIAAHINSLNRKLQVILKEKRRLQLRSSLGGDHHPAPDRAAHRLRKPQRTRAAGAGIVGSRIEDDAAALVGLLTEMDGEETGCTIVAIVGPDGIGKTTLARKVYGSERIRLGFGAARSWLRVPREYSEAGLLSQVVDSFGGGDTTGGESFADLEKALARLVEGKRCLLVLDDARYGGVWEGVLRRPLQRAGRGSKVVVTARHGSIAREMGARHVHRIKRLDSDGAWLLLRAAASVADEATAAELKGVGHGIADKCGGVPLAIKAVAGVLTTRDASAQEWGEVLASPAWLVKGLAEDAMKPLYLCYDDLPCHLKQCFLYCSLFPSDLAMDRRVLVQLWIAEGFVQIGADASVEDVAEEYYDELIRRHLLQPGEEDEGGGATWCTMHDMLRALAQLLSHGEELTGDSYRLLVDSDAPFAPRRVSLARRNLASIPEKILKLERAIPESIGNLWNLKFLLLRGCRALHALPKGIEHLRGLRDLDLAGTVIDDAAFRVGHLRSITSLCCFTVTSKEARAAQDRSGWPLDELKNLSQLRTLHIQKLENAANRSEATEMLLGAKKCLRELELSCSSTVGPLQTTELTRKIEDVFEEMNPPLCLESLKLVNYFGTRFPRWLSVTFLPNLRDLDIVGCNFCQSFPPLGRLPELRSLYVADSSALKDIGAELTVTGTEHPHQVPFPKLENLHFQGLRKLQTWADIEPGAFPSLQKLQLESCPKLQNLPVGLRHVTSLTKLHVADMASLEAVDDIATLRELSVWNTPNLKRISNLPSLEGINMCHCPMLESVENVDGLRTVRIFDHDLRDMPRWIEAHASKLRSLNFTSTAELLKRCLVDGPDWSVIKGIKEVRGYSTGCSYIYYNRSPYIFESNVSDEDNLGVREDEADPDNVDDISVSSSGASYLEIRGFFDSQVLKEGTNRAEEIVPRGSFGRTMLGLTHRRLHKLAEVAPEDDEVEDGADSAILLPSNPTRAMTSAEKVGCVVTNYRNDLGSLANAASHEAITNDEIGHNLVRQGSRAIISTEIGQGSNFSSIRRKEHTSKKEGVTADVTVAKGISLVHSRQVVASNKGKHDFADNAAASICSSDVMPENPLDKEVPEKSAGANGSSSIHEACHTVIVTETTRDLASKAIGNISSIHGRKQQMSDKERELSDGLAPANYVDNNANQMEDGNISSNQQKMKTLQAASADQNGGDSDASSMKKSLCMESKVTETASSRCAGESAKCSSGETDTNINRSLLLKAAEPITHAIDITEAAMRKAEATMAKKLSMNKTLNDSRIDKDAPCSIDAKADDSQQAPKVYTAVWVDTDTDTLRARLVDSMRHLRRMASRRRHRHRKRGSNNKWRLWRIGPTLLVILLLVSAVQLLFILWLYRRLLNQN

SEQ ID NO: 1225 - protein, 329 aa, Zea mays
  VARIANT 160: note = Ancestral polymorphism is R, Derived polymorphism is I
  VARIANT 242: note = Ancestral polymorphism is Y, Derived polymorphism is D
MVSSPPPFGPFPCLTASQQWSKAKGFTGFTERALVAASATVVSAILVNPLDVAKRDLASSPLVAWVLAWIPVFVLLGMNCEEILLENVELTLEAFDYMQLPFTLKETECFMSFIMVLAETLCAQVFYKSIMAVISLRLLSLQEINHAAAGGIWAELVSNRGFEAGGLHTPSNIDPWSIIGDDSSVFVETDRTSCFSRNIIALRMEILCDNCPTGGVGVYNPGFWGMVLILATFKNIEEGKAYNLVMFVKSPETTDLTVSLKSSNGLQNLASATVTLGHGFRTELISMILDLKPRFLRFSDVQREMKNVEKDIKVATKRSDMLSAKVRSV

SEQ ID NO: 1226 - protein, 194 aa, Zea mays
  VARIANT 106: note = Ancestral polymorphism is R, Derived polymorphism is S
  VARIANT 109: note = Ancestral polymorphism is V, Derived polymorphism is A
MGKYMRKAKASSEVVIMDVAAAPLGVRTRARALALQRLQEQQTQWEEGAGGEYLELRNRRLEKLPPPPATTRRSGGRKAAAEAAATKEAEASYGENMLELEAMERRKRAVGTGTPQNLFYQSKALTFREKFLCSAPEKAPSALTTTSFLAWVSLSLTSHNWPVTSVGSGSRGNGMSLQGLFLGHDPKLAPPLNV

SEQ ID NO: 1227 - protein, 381 aa, Zea mays
  VARIANT 321..381: note = Derived polymorphism lacks residues 321 to 381
  VARIANT 314..381: note = Derived polymorphism lacks residues 314 to 381
  VARIANT 298..381: note = Derived polymorphism lacks residues 298 to 381
  VARIANT 284: note = Ancestral polymorphism is I, Derived polymorphism is T
  VARIANT 259: note = Ancestral polymorphism is N, Derived polymorphism is K
  VARIANT 153: note = Ancestral polymorphism is P, Derived polymorphism is L
  VARIANT 83..381: note = Derived polymorphism lacks residues 83 to 381
MLPSILLPTSTTTPPLPPRRLPRPRHVLPGRNDRSPTVVPASKPKLVGEKSKGGAEACLPSSSGPYGDPAPPGLGNSKVVKVQSEEAWDLFTDRASNEGWARYRRCPRRHRNLLRGHRRARPVQRPVGLGRELESCLDDWSSHSSSAGNPNIPYVVVSKSSIVTAVCKEILGCYRKLLGIPDLLNQPNMSILKQLLQTLQPTENFDDVLSEFQSSLGPCNVDYLYCGECKMLEDIMDSVSSFSYLLSSDVLITIQSIVNSVVVLLDKSGEPNGKNIHMGCSKAIISFLRKRLGYSAHKLLSADFPSEDVGKGWQSKGDLIQKILQIYLRNSDSTSDLLAEIGRELPKVGHLFFSSDALELCICHHSALKRTSGIILNPAEE

SEQ ID NO: 1228 - protein, 1034 aa, Zea mays
  VARIANT 218..1034: note = Derived polymorphism lacks residues 218 to 1034
  VARIANT 242..1034: note = Derived polymorphism lacks residues 242 to 1034
  VARIANT 765..1034: note = Derived polymorphism lacks residues 765 to 1034
MLLHSSACHGSRLLSPCSSSCSRHYLLSSFASTPLKTLNALRTLVVMSYRGGRGGGGPNSHRGRGRGGGGGAGRRGGGGGRGEQRWWDPEWRAERLRQMHGEVEKVDENEWWNKIGQLREGSQQELVVKRNFGRDGQNILANMAQRQGIYFNAYNKGKTLVFSKVPLPDYRADLDDRHGSTQKEIKMSNQTEARVEDLLSRSKWNNNSASTSTVSTRQIFPGASSSVVEPAAPIDKEKLSSQLRELQNSRKTTASARSMQSFREKLPAFSMREGFLKAVAANQVLVISGETGCGKTTQLPQFILEEEINSLRGADCNIICTQPRRISAISVAARVSAERGEELGEAVGYQIRLESKRSAQTRLLFCTTGVLLRRLVQEPDLIGVSHLLVDEIHERGMNEDFLIIILRDLLPRRPDLRLVLMSATINAELFSMYFGDAPVMHIPGFTFPVAELFLEDVLEKTRYRINSERDNFAGSSRRKRFSSVKSDPLSDVFEDIDITKEYGNYSSSTRQSLEAWSAAELDLSLVENTIEYICRYEAEGAILVFLTGWDEISKLLDKIKGNNFLGSPNRFLVLPLHGSMPTVNQREIFDRPPANMRKIVLATNIAESSITIDDVVYVIDCGKAKETSYDALNKLACLLPSWISKASAHQRRGRAGRVQPGFCYRLYPKIIHDAMPQFQLPEILRTPLQELCLTIKSLQLGAVSSFLAKSLQPPDPLSVKNAIELLKTIGALDDMEELTSLGRHLCTLPLDPNIGKMLLMGSVFQCLDPVLTIAAALAYRNPFVLPIDRKEEADAVKRSFAGDSCSDHIALVKAFVAWKDAKRSGRERTFCWESFLSPMTLKMMDDMRNQFFDLLSDIGFVSKTAGVKAYNRYGNDLEMVCAVLCAGLYPNVVQCKRRGKRTAFYTKDVGKVDIHPSSVNAFVNQFPLPFLVYSEKVKTASIYVRDSTNISDYALLLFGGSLSPSKTGEGIEMLGGYLHFSAPKRTIELIQKLRGELDKLLQKKIEEPGLDIFSQGKGVVAAAVELLHSQNFDH

SEQ ID NO: 1229 - protein, 166 aa, Zea mays
  VARIANT 134: note = Ancestral polymorphism is G, Derived polymorphism is V
MEASGEKAAVVRRLMEAKEVSGKTFSGIAAETGLTNVYVAQLLRRQAQLKADTVPALRAALPTLTDDLIELMMQPPFRSYHPNIVHEPAIYRLNEAVMHFGESIKEIINEEFGDGIMSAIDFYCSVDKVEGADGKDRVVVTFDGKYLPYTEQKSEHMMSRPTRKTS

SEQ ID NO: 1230 - protein, 695 aa, Zea mays
  VARIANT 604: note = Ancestral polymorphism is P, Derived polymorphism is L
  VARIANT 607..695: note = Derived polymorphism lacks residues 607 to 695
MNTIDQPSSSTPAHATRYAIPFHSQRVPRKRPETYKDRSYYGGPSDECPHCGAVFWFQERVKSVSAVAQRRLVYNLCCRGGKIVLEPYKCPPAPLCDLLRFDGDNRARRFLRQIRSYNSLFAFTSLGAVVDRSINNGTTPYVFKINGVVHHRIGSLLPSHGLRPQFAQLYIYDTEHEMQNRLGMFESEADVHDRPDPEVARLLLNMLDEHNKLVAAFRFAKERLDEEGNQKVTLRLLGCNTRHDAQYNLPANGELAAVIVGDCSSSQYKYDVLVQAREGGLKHVSCLHPSYMALQYPLLFPYGDRGYHLGIKYSDVGGGDASCRKYVTMLEFVRHRSHYRLNEPNPLAVDAYYGRLSNQLAVDAYSTIEASRLQFIADHQKELRCESVQGITDAIGRGLTSADSVGGRVIVPASFTGGRRYHVMNYQDAMAICRVYGPPDLFVTFTCNPKWKEIVDALRFEPGQQPCDRSDIVVRVFHMKVDEFIADIRENKVFGPIRADFGSSFILRMTVGSCILILFCLMKRDAGPTVDVVLWGERATSFPAEQVHRDSDSSPQIIIFVGTLVRSYADNVSLSGGSSCKWYINAPVPEVNALRASTEPNHRPVIWDQGKVGAERTIVAVPEHKKLKDIKYLHPFENKKKEWLVIVKVLKIDSSWWYNACKKCLRTTKPHGDTYRCTNNSCDNIGSPTPRLNTL

SEQ ID NO: 1231 - protein, 333 aa, Zea mays
  VARIANT 157: note = Ancestral polymorphism is L, Derived polymorphism is I
  VARIANT 188: note = Ancestral polymorphism is A, Derived polymorphism is T
MDVDSRMATESDSDSDARGGSGSGSETPTASSSPSVMLKNDGFSHVIAEDRTDQVYLSKQIFMVLYNRDNVESIGLDEAAKCLGVERRRIYDIVNVLEGVGNFISALHILLSVYNSRWSRNPNGVPQESLGYKQGYRVDVDIPDQTWVEACSFHDVLIFNTGHWYVNVTIHRQISIKLALQRDAKLMAFYDLTGIPHLKWFGVEGQYNVMVIDLLGPSLKGLFNYCSRKFSLKTVLMLADQMISVVCYLARWSPVRLPPPINSSPSVSPSMTTILSLVSSRTYKIVDYVEADTTHLSAPGLGVEFGSTHDHVIALELIWSAEKLRKKSFLPIS

SEQ ID NO: 1232 - protein, 346 aa, Zea mays
  VARIANT 12..346: note = Derived polymorphism lacks residues 12 to 346
  VARIANT 36: note = Ancestral polymorphism is P, Derived polymorphism is R
  VARIANT 87: note = Ancestral polymorphism is V, Derived polymorphism is M
MKERRQCSVAAQQAAPGTSRRALLLLAHLVLFSFSPRPANSAQGEAEALLRWKDSLPPPRPADALASWSLNGSAVAAAPVPCAWRGVSCDFLGRVVGVDVAGAGLASGTLAALDIQSLASLGSLNLSFNALTGRFFTPNVSAPLLSVRSIDLSNNNLSGPVPDTLPAWMPNLEHLNLSSNQFMGEIPVTLGKLTKLRNLVLHSNHLSGGIPPVLGNVSGLRDLELSSNPLGGTIPATLGKLLSLERINVSLTRVESTIPTELSLCTNLTVIGLAGNKLTGGLPPSLAKLARVREFNVSKNMLTGEIPPGYFTSWTHLRVFQADGNRFTSMIPVEVVAARRLEFLHF

SEQ ID NO: 1233 - protein, 768 aa, Zea mays
  VARIANT 314..768: note = Derived polymorphism lacks residues 314 to 768
MGKSSKKSSVKAAPAAVSVPEGKSAKKGKRNAEDEIEKAVSAKKQKTVPEKAVPVKKQPPPKKVESSSSEEDSSDSEVEVKVQPKKVIQPKKSTQPAKQESSDDSSSESSSDDEPSKKPVAGSKKPPASSSSSDDSSDSDDSSSDEEPAKKPTVLSKKPTVLSKKPTVLSKKPVTAVSNGSKQVKPDSSSSDSSSDEDEKPAASLKKPVVASVQKKTQESDSSDSDSDEDESEDDIPAKAQVVAKKKEESSSSSDSDSDSESEDEKPAANLKKPPVPSVQKKTQESDSSDSDSDEDESDDIPAKAQVVAKKKEESGSSSDSDSEFESDDEDSNAKTVQPAKAAAIKKKEDSSESSETDSQSDSEDSEPEKPTVPAKRPLATNKKNEQSSEKSDDSSDESSDESDEEPPQKKTKNSAPSGAAKAATNVSKKKSSSDEDDESSEESSDDEDTEQVETKSGYNSFFDVQETSVVTTQKPAHNEPKTPAKSQSQATGSKTIFVGNLAYSIEREQVKEFFEEAGEVVDVRLATFDDGSFKGFGHVEFATVEAAQKALEFVGHDLMGRPLRIDMATERGAYTPSSGLSSILFIGAVVIQKDNGSFKKFAPRSGNTVFIKGFDTSGGEDQIRTALEEHFGSCGDITRISIPKDYDTGVSKGMAYMDFKDPDSLNKAYELNGTDLGGYSLYVDEAKPRPDNSGGFSGDRGGGRGRSGGFSGGRGGRSDRGRGGSRGRGFGGRGGRGDRGRGGRGTPFRQTAGTASTGKKTTFGDDD

SEQ ID NO: 1234 - protein, 528 aa, Zea mays
  VARIANT 122: note = Ancestral polymorphism is L, Derived polymorphism is V
MDLPESSVPRADKGPAPRRLCPVDREELVRAMAQSLYSLGYRRAAAALEAESGVPLYPPEHDRLLLEVMAGQWDASAEIVRSVAGVGEADRTVAEFLVWRGYYLELLGMRGDAGLRRAREVLRRRIAPLGVDRRCVHLLARAMVSSEGAVAPEAVVGWRIAVFLDLVEVLPPWFHVASGRLEHLVESAVTKQVESCIYHNLPDEITLFEDHRCHEEHIPSQCAQILCGHNNEVWFVRFSNNGSYLVSSSSDCTAIIWKVENDDTLTKKHCLQGHEKPISFASWSPNDRMLLTCGTGESLKLWNVDTGECNLKFRGSADCIISSCAWFPNSEKIVCASSEPASAPNRIFTCDLEGQNLEVWAGDRIPKVSDLAVTPDGRHLIFVSCNDIWIRELPRGREWRFREKQTISSLSLSGDGQSLIVNLNSQEIHLWKINESCTVPEKFMGHKQDKFVIRSCFGGSNSSFIASGSEDSQVYIWKRHVEMPIKVLHGHTMIVNCVSWNPARPHMLASASDDRTVRIWVGRKNATK

SEQ ID NO: 1235 - protein, 197 aa, Zea mays
  VARIANT 125..197: note = Derived polymorphism lacks residues 125 to 197
  VARIANT 121..197: note = Derived polymorphism lacks residues 121 to 197
  VARIANT 92..197: note = Derived polymorphism lacks residues 92 to 197
MVSDQEIASCVGSVLRGSAGGPGEVSLAAVLQQAEDTLGVDLSHKAGFIRDQLDLFFGPRLQPQPLTTPQPTPPSPQAVVAPADAVPQPQHQVLPQAPPSAQQMQPQPQQLTSLQQQLMFQTIHQLPAIAPVLVVSSPPAVPAMAFYPPPPLAFRYTTGLAGAAAGGTVSFQQSAPGAGGTASPTAAPQVTGDNKER

SEQ ID NO: 1236 - protein, 155 aa, Zea mays
  VARIANT 140: note = Ancestral polymorphism is G, Derived polymorphism is S
  VARIANT 138: note = Ancestral polymorphism is D, Derived polymorphism is N
  VARIANT 136: note = Ancestral polymorphism is K, Derived polymorphism is M
  VARIANT 134: note = Ancestral polymorphism is S, Derived polymorphism is L
  VARIANT 113: note = Ancestral polymorphism is H, Derived polymorphism is R
  VARIANT 87: note = Ancestral polymorphism is Y, Derived polymorphism is H
  VARIANT 85: note = Ancestral polymorphism is E, Derived polymorphism is K
  VARIANT 64: note = Ancestral polymorphism is R, Derived polymorphism is C
  VARIANT 61: note = Ancestral polymorphism is S, Derived polymorphism is F
  VARIANT 60: note = Ancestral polymorphism is A, Derived polymorphism is T
  VARIANT 49: note = Ancestral polymorphism is R, Derived polymorphism is C
  VARIANT 37: note = Ancestral polymorphism is L, Derived polymorphism is M
  VARIANT 8..155: note = Derived polymorphism lacks residues 8 to 155
MAPKLEVLVVCDAMKAYISAPNLSVVSWDSGTGYNPLCHHFANAACHLRLLHLGSKCVSASLMCQFNEVDVLKLKLNLLNFKGTEAYTNLLNETVALHKCEELKLRVSLRAYHHNFASILFHILRSCNNTRRISIKVDSGMVISILHASANVSFN

SEQ ID NO: 1237 - protein, 410 aa, Zea mays
  VARIANT 12: note = Ancestral polymorphism is P, Derived polymorphism is S
  VARIANT 17: note = Ancestral polymorphism is T, Derived polymorphism is I
  VARIANT 37: note = Ancestral polymorphism is I, Derived polymorphism is N
  VARIANT 61: note = Ancestral polymorphism is R, Derived polymorphism is K
  VARIANT 62: note = Ancestral polymorphism is L, Derived polymorphism is P
  VARIANT 168: note = Ancestral polymorphism is Y, Derived polymorphism is N
  VARIANT 189: note = Ancestral polymorphism is V, Derived polymorphism is A
  VARIANT 194: note = Ancestral polymorphism is T, Derived polymorphism is I
  VARIANT 199: note = Ancestral polymorphism is C, Derived polymorphism is Y
  VARIANT 260..410: note = Derived polymorphism lacks residues 260 to 410
  VARIANT 265: note = Ancestral polymorphism is T, Derived polymorphism is I
  VARIANT 289: note = Ancestral polymorphism is A, Derived polymorphism is V
  VARIANT 290: note = Ancestral polymorphism is K, Derived polymorphism is M
MLAYCKSLDELSQNGATIVHWIKKVVRGDFIIYFNKIFDALCKLSADSDANVQSAAHLLDRLVKDIITESDQFSIEEFMPLLRERMNVLNPYVRQFLVGWITVLDIVPDIDMLGFLPDFLDGLFNMLSDSSHEIRQQADAALSEFLQEINNSPINEFVKLGGEQLVPYYADILCAILPCISDEEEKIRVVARETNEELCAIKADPTEGFDIGAILSIAKRFSIKSFGNEITYKKFEAEIYVLTKDEGGRHTAFVTNYSPQFYFRTADVTGRVELLGEMKMVLPGDNVTAKFELISPVPLEPDSETLDEIVSFVRQILSICVTPCGSKVGKMDIGGGPEAIPTLPINLEDVARSEADFEKAELLKTVTKFQWIKVDSVRFEDEKLKDTSYWANITIPMALLPFHVSNALRV

SEQ ID NO: 1238 - protein, 526 aa, Zea mays
  VARIANT 384..526: note = Derived polymorphism lacks residues 384 to 526
  VARIANT 370..526: note = Derived polymorphism lacks residues 370 to 526
  VARIANT 353..526: note = Derived polymorphism lacks residues 353 to 526
  VARIANT 320..526: note = Derived polymorphism lacks residues 320 to 526
  VARIANT 181..526: note = Derived polymorphism lacks residues 181 to 526
  VARIANT 135..526: note = Derived polymorphism lacks residues 135 to 526
  VARIANT 26: note = Ancestral polymorphism is R, Derived polymorphism is W
  VARIANT 25: note = Ancestral polymorphism is R, Derived polymorphism is W
  VARIANT 24: note = Ancestral polymorphism is E, Derived polymorphism is K
  VARIANT 20: note = Ancestral polymorphism is G, Derived polymorphism is R
  VARIANT 19: note = Ancestral polymorphism is S, Derived polymorphism is L
MICAISGEVPDEPVVSKKSGLLFERRLIERYIEDHGKCPITKDELTMDDIVPVNTNKVVKPRPLQAASIPGLLGIFQNEWDALMLSNFALEQQLHTARQELSHALYQHDAACRVIARLKKERDEARALLAQAERQIPASVAGAAPAAVVSNGKRAMEDEIGPDGKKIRPGINPVMIDELTECNTMLSAQRKKRQVPPTLAPLDALERYTQISSHPLHKTNKPGILSMDVHPSKDVVATGGIDTNAVIFDRSSGQILCTLTGHSKKITTLKFVPRDQLFVTGSADKTVRIWQENENGNYNCVHTLKDHTAEVEAVTVHATQKYFVSASKDNSWCFYDISTGSCLTQVGEASGQEGYTSASFHPDGLILGTGTTDAVVKIWDVKTQSNVAKFEGHVGPVTAMSFSENGYFLATAAHDGVKLWDLRKLRNFRTFSPYDSDTPTNTVEFDFSGNYLAIGGSDIRVYQVANVKAEWNLIKTLPDLSGTGKVTSVKFGADAKYIAVGSMDRNLRIFGLPGDDQMEESTTAAE

SEQ ID NO: 1239 - protein, 96 aa, Zea mays
  VARIANT 3: note = Ancestral polymorphism is A, Derived polymorphism is E
  VARIANT 14: note = Ancestral polymorphism is P, Derived polymorphism is L
  VARIANT 25: note = Ancestral polymorphism is G, Derived polymorphism is S
  VARIANT 30..96: note = Derived polymorphism lacks residues 30 to 96
  VARIANT 32: note = Ancestral polymorphism is P, Derived polymorphism is S
  VARIANT 36: note = Ancestral polymorphism is C, Derived polymorphism is F
MNAQYFGEIGIGSPQQKFTVIFDTGSSNLWVPSSKCYFSIACYFHSRYKSGQSSTYKKNGLTLPFLSCYCIVFPICSLWTKICITFVIRLYFPAGF

SEQ ID NO: 1240 - protein, 62 aa, Zea mays
  VARIANT 24..62: note = Derived polymorphism lacks residues 24 to 62
MSSRECIGGATRPTSSRPSLAATEDLNPTKAHACGGQEEAQIWNPVRMFLTSQLQQRLLLQF

SEQ ID NO: 1241 - protein, 394 aa, Zea mays
  VARIANT 341: note = Ancestral polymorphism is P, Derived polymorphism is S
MLFQVGGQGARPTFFEMSAAQQLPASLRAALTYSLGVFALRRPLLHTVLDYEDDFFALLMGVLESHSLRTTDGSFSESLYGLRRRPVKVAVKRKSPGTESNDKVYGSALRKRQKILSVVFLVVLPYFKSKLQSIYNKEREARLQATLWGQDDVRFDEVDFVLDQEQTSQAQTEPTTGEMSNLTRFKKNFASLIGVCYPWIHATNEGLSFAYQLLYLLDATAFYSPALHVLGIHVCRATGQELMDSSSRISRIRSRELERLRGPPWFKAVQRVFLSCVYTTLDYAQTGLIAAVFFFKMMEWWYQSAEERMSAPTVYPPPPPPPTPKVAKDGIPLPPDRTLCPLCCQKRANPSVLSVSGFVFCYSCIFKSVSQHKRCPVTLMPAGVEQIRRLFHDL

SEQ ID NO: 1242 - protein, 351 aa, Zea mays
  VARIANT 26..351: note = Derived polymorphism lacks residues 26 to 351
  VARIANT 65: note = Ancestral polymorphism is P, Derived polymorphism is L
  VARIANT 310..351: note = Derived polymorphism lacks residues 310 to 351
MWCEWHSSYPIVALPLPLPALSVNWEKTERDHAREKSSRGKFRQHGRVINPEEFYIKSRLLLRDPEMASTLFGKQDESVLQGVTHVICCTGTTAFPSKRWDGENTPERVDWDGIRNLVSALPQTIKRLVLVSSIGVTKYNEIPWSIMNLFGVLKYKKMGEDFVRNSGIPFTIIMPGRLTDGPYTSYDLNTLLKATTGERRAVHELHRLYHVHKTLMAECDSHRYQPRAEGTHEVVQGSRSNLNCSPSTLRTNQSALLGNAQYPAPQQVHEDLSLHECKPVNCLSLFGEENSAAKERFHGENHKSVEDESWSAAVESDLDLKLSIGPSSHSPETPRWLFSGSMERNPSGQHR

SEQ ID NO: 1243 - protein, 337 aa, Zea mays
  VARIANT 25: note = Ancestral polymorphism is M, Derived polymorphism is L
  VARIANT 61: note = Ancestral polymorphism is S, Derived polymorphism is C
MDRELWPCGLRVLVIDNNSSYLSVLEELLIKCSYKVTTYNDVRQAMSFIYGNIQIVDLIISDVFFPTEDGLLILQEVTSKFDIPTVIMSSNADTSIVMKYITSGASDFLIKPVRIEELKNIWQHVLRKQIGENRSCSNSAHHQHLDQVSISYPPPAGIAPAGTTAREREMTTTANGTVTDIQDLRKSRLSWTMQLHRQFIAAVNSLGEKAVPKKILETMKVKHLTREQVASHLQKYRLHMRKVNQALHNDDDTPPSSSLPNESNILRTEFDGSLNPTYFDQDGCTEYSLPKDDLSSGSDCMLGERNNYSPQGFQDFRWDSDKQASETTYLWNFEADE

SEQ ID NO: 1244 - protein, 323 aa, Zea mays
  VARIANT 254: note = Ancestral polymorphism is F, Derived polymorphism is C
  VARIANT 234..323: note = Derived polymorphism lacks residues 234 to 323
  VARIANT 217: note = Ancestral polymorphism is P, Derived polymorphism is H
  VARIANT 195: note = Ancestral polymorphism is V, Derived polymorphism is A
  VARIANT 194: note = Ancestral polymorphism is M, Derived polymorphism is I
  VARIANT 173: note = Ancestral polymorphism is G, Derived polymorphism is R
  VARIANT 158: note = Ancestral polymorphism is T, Derived polymorphism is A
  VARIANT 137: note = Ancestral polymorphism is T, Derived polymorphism is I
  VARIANT 53: note = Ancestral polymorphism is A, Derived polymorphism is E
MACVRALACAGVRMRRFQVAAWLVVRFGEVAELMDCSYLDIYGRLPAVVLTRATSYAAYLVYGIAEGHRGLSFPDQEAALRFDSILSEVFVSFHEAALADEEAEYSSWDSDDEYQKFIQNMNPPRVTIDNTSCPSATVIHVDSTNKYGILLEVVQVLTDLKLIVTKAYISSDGGWFMDGSGSLDESLPYRSQLMVVSWYHQIRQQKIYKAIKDKGLPVDLVECEGERHGFLKAQLSLYRPQLLAQGNIFQGIRFTRHICNCNNFFCLLLGHPLAQVLADSDLLVLVVGGNGSKEQIIATSYSSRLLDYNTVWRQVSSGMTLIF

SEQ ID NO: 1245 - protein, 294 aa, Zea mays
  VARIANT 250: note = Ancestral polymorphism is M, Derived polymorphism is L
  VARIANT 249: note = Ancestral polymorphism is E, Derived polymorphism is Q
  VARIANT 246: note = Ancestral polymorphism is W, Derived polymorphism is G
  VARIANT 245: note = Ancestral polymorphism is W, Derived polymorphism is R
  VARIANT 234: note = Ancestral polymorphism is G, Derived polymorphism is S
  VARIANT 222..294: note = Derived polymorphism lacks residues 222 to 294
  VARIANT 203: note = Ancestral polymorphism is S, Derived polymorphism is L
  VARIANT 126: note = Ancestral polymorphism is G, Derived polymorphism is D
  VARIANT 56: note = Ancestral polymorphism is H, Derived polymorphism is Y
MGEEETRAGDLPEPCLAHAIALTSPRDACRCAAVSPAFRAAADSDYVWGRFVPEDHRRAIALHLHDAGRDRGPRKDAYLALCDGGGGGVPVDVDGDGWCRLWLDQASGAKCYALSARRLSLPWEDGDFCWRWAPHARSRFGEVAELMDCSYLDIYGRLPVAVLTRATSYAAYLVYGIAEGHRGLSFPDQEAAVSLGGRVPAESHHRRSVCLRPDEAEARKFWGAGAVIPYGVGGVHVPRLRDDGWWEVEMGRLRTVEAGEHEAPGEDVVASFEVVGSYPKRGLILEGIEFRKLQ

SEQ ID NO: 1246 - protein, 576 aa, Zea mays
  VARIANT 299: note = Ancestral polymorphism is K, Derived polymorphism is M
  VARIANT 244..576: note = Derived polymorphism lacks residues 244 to 576
MYRAAASLASKARQAGSSSAARQVGSRLAWSRNYAAKDIKFGVEARALMLRGVEELADAVKVTMGPKGRNVVIEQSFGAPKVTKDGVTVAKSIEFKDRVKNVGASLVKQVANATNDTAGDGTTCATVLTKAIFTEGCKSVAAGMNAMDLRRGISMAVDAVVTNLKGMARMISTSEEIAQVGTISANGEREIGELIAKAMEKVGKEGVITIADGNTLYNELEVVEGMKLDRGYISPYFITNSKAQKCELEDPLILIHDKKVTNMHAVVKVLEMALKKQRPLLIVAEDVESEALGTLIINKLRAGIKVCAVKAPGFGENRKANLQDLAILTGGEVITEELGMNLENVEPHMLGSCKKVTVSKDDTVILDGAGDKKSIEERADQIRSAVENSTSDYDKEKLQERLAKLSGGVAVLKIGGASEAEVGEKKDRVTDALNATKAAVEEGIVPGGGVALLYASKELDKLQTANFDQKIGVQIIQNALKTPVHTIASNAGVEGAVVVGKLLEQGNTDLGYDAAKDEYVDMVKAGIIDPLKVIRTALVDAASVSSLMTTTESIIVEIPKEEAPAPAMGGMGGMDY

SEQ ID NO: 1247 - protein, 461 aa, Zea mays
  VARIANT 28: note = Ancestral polymorphism is R, Derived polymorphism is C
MVKPSAVSRPCFLLVTAAALWALTLYLRLLALMSVPVAFTGRVASFVPDDTTNASVAGDDPCRGRYLYVHDLPPRFNADIVRGCAEANDRWQDMCEDMRNAGLGRPLSGGALTGARGWYATHQFALDAIFHGRMRQHGCLTNDSSAAAAVFVPFYAGFEFARHVWGYDSAARDAASLDLVRWLVQRPEWRRAGGRDHFLVAGRTGWDFRRDRNSTWGTNLFLLPAVKNMTFIVVETATMGWGNDMAVPYPTYFHPRTDFDVLSWQQRIRNSDRWWFMSFVGAARPSDPRSIRSQVMAQCGASPACRQLGCAFGSAQCHYPGDIMVLFQSSTFCLQPPGDSASRRSTFDAMVAGCIPVFFQPRSAYLQYRWHLPRDHATYSVFIPAEDVRSGNVSVEAELRKIPPAAIEKMRKEVIKLVPRLLYADPRYKLETMKDAFDVTVDGVLERMAETDDSQTGSYWR

SEQ ID NO: 1248 - protein, 117 aa, Zea mays
  VARIANT 50: note = Ancestral polymorphism is K, Derived polymorphism is N
  VARIANT 88: note = Ancestral polymorphism is R, Derived polymorphism is H
MNIHLKEDTYKGKKFNAICHFLGYQARGALPSKFDCDYAYASPSPAHLVKNIDCCWFNTYMATVTNLKNPVNKWRCGATPISYYYFIRLMGRKASHVALECALQSHPNMVCFFLTYL

SEQ ID NO: 1249 - protein, 63 aa, Zea mays
  VARIANT 4: note = Ancestral polymorphism is L, Derived polymorphism is R
MKDLIEMGVCCLNEVSFVVLDEADRMLDLGFEPEVRAILSQTSSGLYPLLSLPTEEAAFCSRT

SEQ ID NO: 1250 - protein, 484 aa, Zea mays
  VARIANT 26: note = Ancestral polymorphism is P, Derived polymorphism is R
MKPMKPSFQKDGADKVDGGTGGVLWPSRICYLVVLATTLWAVASILFPPSAFPHPLVSSVTVSHHPAPHDSASEDNRTATETADRCAGRYIYVYRLPPRFNDDIARGCRTLRPWMDMCPYMPNCGLGRLLGDEGGVFPGRGWYATDQFMLDVIFRCRMRRYECLTGDPARAAAVFVPAYASLDGGRYLWNSTATRDALALDLVAWLARRPEWRATGGRDHFLVAGRTAWDFLRKTDGDDDWGTKLLSIPAVRNMTALVLEIDPWTRSNNLAVPYPTNFHPATAADLRAWQEKARALDRRWLFSFAGAARPGSNKTVRAQIFQQCGASSRCGMFRCKKGSECEASPGAMMRLFESSTFCLQPRGDTTTRRSTFDAVVAGCIPVFFHPDSAYTQYADHIPADPERWSVLIMHTDVTDRNVSIEEALAKIPPAAVKAMREEVIRLIPRLVYADARSARADFKDAFDIALDVVLDRVAKRRRRDVDGR

SEQ ID NO: 1251 - protein, 165 aa, Zea mays
  VARIANT 43: note = Ancestral polymorphism is I, Derived polymorphism is M
  VARIANT 88: note = Ancestral polymorphism is P, Derived polymorphism is H
  VARIANT 128: note = Ancestral polymorphism is G, Derived polymorphism is R
  VARIANT 132: note = Ancestral polymorphism is T, Derived polymorphism is I
  VARIANT 140..165: note = Derived polymorphism lacks residues 140 to 165
MTISVLSSYLLLEFISENFGNFGNGDMGYPTLTPMGKRSKGRMGLLSRGKHSIGKIINKAARISGFKQTTVEPKIDREAVIHTEPDAPILEHQEPKEVASFGSLPTMSELMQRILYASLPVLAQGRTGSCYTVVQYMETWHIFIYFIYKEHALPWFLSLSNVTVS

SEQ ID NO: 1252 - protein, 190 aa, Zea mays
  VARIANT 142: note = Ancestral polymorphism is S, Derived polymorphism is Y
  VARIANT 138: note = Ancestral polymorphism is R, Derived polymorphism is L
  VARIANT 121..190: note = Derived polymorphism lacks residues 121 to 190
  VARIANT 104: note = Ancestral polymorphism is Q, Derived polymorphism is R
  VARIANT 64..190: note = Derived polymorphism lacks residues 64 to 190
  VARIANT 30: note = Ancestral polymorphism is D, Derived polymorphism is N
  VARIANT 19: note = Ancestral polymorphism is D, Derived polymorphism is G
MDNLANSSCSSQKDITLFDDGYLVQLRFSDEDFIYNFRDSQECVVRANLNPPLLGDVSETGQGWLAEKSQTVYGLVQCQEDMLKGTGQDCPSSAMANREQMVDQMGGAILGVGCSLWYQTEVQFFAGTPVLSLNMPTRKFISNTAWLTFFGTIFHLPFHLTIRLELRNRGTYRKQDCQHQKDKSQICRRV

SEQ ID NO: 1253 - protein, 374 aa, Zea mays
  VARIANT 294..374: note = Derived polymorphism lacks residues 294 to 374
  VARIANT 205..374: note = Derived polymorphism lacks residues 205 to 374
  VARIANT 167..374: note = Derived polymorphism lacks residues 167 to 374
  VARIANT 158..374: note = Derived polymorphism lacks residues 158 to 374
  VARIANT 143..374: note = Derived polymorphism lacks residues 143 to 374
  VARIANT 133..374: note = Derived polymorphism lacks residues 133 to 374
  VARIANT 68..374: note = Derived polymorphism lacks residues 68 to 374
MEKVLSVNILSSDYFKELFKYKTYHEVVDEIYNQVDHVEPWMTGNCRGPSSAFCLLYKLFTMKLTVKQMHNLLKHQDSPYIRARDSQTRRNFPTKRSNSPTKMTHVTPVKMLMEQDMWKERRPDEEPLNVVARLMGLHEPPGQQPNFPLGRQLDKKYQCGGFEENYWNLKSKKESKCHQNQKAGRRHQHTWNGSGDQPSRISSSQSMHQGNETCEKRMSIVHEKFAEAKRLATDEKLLHLKEFQDALQFLSSNRDLFLEFLDEPNPLLSSNHYEFRPVALPSELKQITILKPLEPAKRKDSILVGRQLFSDGDGGESERNRYKRHQSLDVSPANSKLYEPTKIVVLKPGFPSSHDSRIARSSLSSAEDNEDEIN

SEQ ID NO: 1254 - protein, 201 aa, Zea mays
  VARIANT 50: note = Ancestral polymorphism is E, Derived polymorphism is D
  VARIANT 60: note = Ancestral polymorphism is A, Derived polymorphism is V
  VARIANT 74: note = Ancestral polymorphism is C, Derived polymorphism is Y
  VARIANT 78: note = Ancestral polymorphism is N, Derived polymorphism is Y
  VARIANT 102: note = Ancestral polymorphism is N, Derived polymorphism is K
  VARIANT 115: note = Ancestral polymorphism is M, Derived polymorphism is I
  VARIANT 125: note = Ancestral polymorphism is G, Derived polymorphism is R
  VARIANT 133: note = Ancestral polymorphism is G, Derived polymorphism is C
  VARIANT 173: note = Ancestral polymorphism is D, Derived polymorphism is N
MSAAARVLPKAVTFVTGNAKKLEEVRAILGSSVPFQSLKLDLPELQGEPEYISKEKARIAASQVNGPVLVEDTCLCFNALKGLPGMNRKWFLEKIGHEGLNNLLKAYEDKSAFAMCIFSLALGPGEEPITFVGKTAGKIVPARGPNYFGWDPVFQPDGFEQTYAEMPKSVKNNISHRGKALALVKEHFASASYTVQSNDST

SEQ ID NO: 1255 - protein, 51 aa, Zea mays
  VARIANT 39: note = Ancestral polymorphism is N, Derived polymorphism is K
  VARIANT 25: note = Ancestral polymorphism is G, Derived polymorphism is R
  VARIANT 8..51: note = Derived polymorphism lacks residues 8 to 51
  VARIANT 3: note = Ancestral polymorphism is D, Derived polymorphism is N
MCDIEAKQPNSTIRKCTRVQLVKNGKKIAAFVPNDGCLNYIEENVSSYRML

SEQ ID NO: 1256 - protein, 98 aa, Zea mays
  VARIANT 54: note = Ancestral polymorphism is A, Derived polymorphism is T
  VARIANT 48: note = Ancestral polymorphism is M, Derived polymorphism is T
  VARIANT 45: note = Ancestral polymorphism is A, Derived polymorphism is E
MLCSVDDDPEHEFKFQRPRKDEQGREDLLPRKVEQESKWQGAPSARYMWRRSGAMYLSFTGAAIDSATFVHPQCLGTTVVAKPAIEPGECLEIAKLST

SEQ ID NO: 1257 - protein, 231 aa, Zea mays
  VARIANT 168: note = Ancestral polymorphism is D, Derived polymorphism is N
  VARIANT 201: note = Ancestral polymorphism is C, Derived polymorphism is Y
MRDDGSNQETLLSYSKLAIHKLLLLKRKHFALLLLIGLTGSFGAVSSSEVVTTFVCVFILAVLVPFCFLLQVARFETCFLGHNKGARGEDDASRRVKCSPPRESSTWFAASAAVHHMTGNQSLLLTGGHGNGNNGEGAVVHQVVNGRELPLRVRGSGSVRTERIVLDDVWYVPGLDLNLVSTGQLVRQGCAVTLGPGPGGCRITRAGALVGSARFTEASNFQLDFLNLADP

SEQ ID NO: 1258 - protein, 301 aa, Zea mays
  VARIANT 43: note = Ancestral polymorphism is C, Derived polymorphism is Y
MDSEAVQHGLLPLSACPPTANSCAHYSRGCSVVAPCCGQAFGCRHCHNDAKVRWFPSFRFRFGSGSADVLKQPCPVPRQNSLEVDPRDRHEIPRHEIKKVICSLCSKEQDVQQNCSSCGACMGKYFCKVCKFFDDDVSKGQYHCDGCGICRTGGVENFFHCDKCGCCYSNVLKDSHHCVERAMHHNCPVCFEYLFDSTKDISVLQCGHTIHLECMNEMRAHHHFSCPVCSRSACDMSATWRKLDEEVAATPMPDIYQKHMVWILCNDCSATSSVRFHVLGHKCPACSSYNTRETRAACPRI

SEQ ID NO: 1259 - protein, 247 aa, Zea mays
  VARIANT 25: note = Ancestral polymorphism is G, Derived polymorphism is A
  VARIANT 38: note = Ancestral polymorphism is A, Derived polymorphism is V
  VARIANT 74: note = Ancestral polymorphism is L, Derived polymorphism is H
  VARIANT 84: note = Ancestral polymorphism is R, Derived polymorphism is W
MGSPGAGSSGGHECSFKILLIGDSGVGKSSLLVSFVAASHLDGDIAPTIGVDFKIKFLTVGGKKLKLTIWDTGHRVLFVYVYLWVGSLKSLWLHCSLLRRACHQAGQERFRTITSSYYRGAQGIILVYDVTKRESFSNLADVWTKEIEANSTNKDCIKMLVGNKVDKDDERMVTEEEGLAFAEESGCLFLESSAKTRENVEKCFEELALKILEVPSLLEEGSSSVVKRNILKQKQESHAKNGSGCCQ

SEQ ID NO: 1260 - protein, 268 aa, Zea mays
  VARIANT 172: note = Ancestral polymorphism is A, Derived polymorphism is V
  VARIANT 169: note = Ancestral polymorphism is A, Derived polymorphism is V
  VARIANT 149: note = Ancestral polymorphism is A, Derived polymorphism is T
MGFVRYQVSLHELEKAIEQANVRGQIHRLPFDGLALCFCVAIRSLEKAIELLSKRKVQGRILLCGYSFNYISGTASIKKVSHTTRNLGAVGFVVAVENIYPGIKFDPVPVSIPRILITDVSKTEDLIDYYNSSTIIDWAGRATTFKATADVDVLKLKPDILAPGNLIWAAWAPNGTDESNYAGEGFAMVSGTSMATPHFAGIAALIKQKNPKWSPSAIKSAMMTTTNTLDKGSRPLRAQQYTTSEMMTLSQATPFDCGSGAVNPKAAL

SEQ ID NO: 1261 - protein, 323 aa, Zea mays
  VARIANT 28: note = Ancestral polymorphism is C, Derived polymorphism is Y
  VARIANT 31..323: note = Derived polymorphism lacks residues 31 to 323
  VARIANT 40..323: note = Derived polymorphism lacks residues 40 to 323
  VARIANT 43: note = Ancestral polymorphism is S, Derived polymorphism is Y
  VARIANT 53..323: note = Derived polymorphism lacks residues 53 to 323
  VARIANT 54: note = Ancestral polymorphism is D, Derived polymorphism is N
  VARIANT 95..323: note = Derived polymorphism lacks residues 95 to 323
MAWRGLFALCKTLNLDNSHAYIPSFFYCLLQCLQFCHAMQVKSVFLDGVPPHWDEDKVREIFRKFGEIDSIQLARNMFTAARKDFGFIGFTARQSALDCIKMVNKDGVGEGSGKVPIKASLQRPRHAFKKYSRQGSSSLLGVRRGFVDKSSSGRGHHSDRYRHFSPVRHSYSDNHSRRHSIDVEERHTSVRGYRAYYRRDSPVHAPSYKYGRTHLETRISEEYAEGRYTSKYPKHRYAMHGTMERDAYRRIKYGHSYQERAHRTCPDCKLCGQNYNYPNGEEFSAISGCQEAYYQTDRDLIPSTSQVASHCEGSCCKVGINKR

SEQ ID NO: 1262 - protein, 255 aa, Zea mays
  VARIANT 13..255: note = Derived polymorphism lacks residues 13 to 255
  VARIANT 29: note = Ancestral polymorphism is V, Derived polymorphism is I
  VARIANT 51: note = Ancestral polymorphism is T, Derived polymorphism is I
  VARIANT 65: note = Ancestral polymorphism is L, Derived polymorphism is F
  VARIANT 66: note = Ancestral polymorphism is C, Derived polymorphism is R
  VARIANT 163: note = Ancestral polymorphism is G, Derived polymorphism is S
MLAAAKVPKEVFQSPKTLPSQDKSWLLFVLFLQMRMRKKPLWRYAEILERTGKGLGGNVRIRCRFCNHVWNGSCSRVKAHLLKIPGFGVKFCRVVTVHVLEELKAEVAAASVVANRSLPRDIPLPVEGNEKRKRRGVSAIESSFNLDVRRQLDELIARMFYTGGLPFNLARNPYFRKAFMFATNNPIGGYVPPSYNKLRTTLLVQERTHVERMLQPLKETWSSKGVSICFRWMVRCSKTPTLEFLGCYRRWSNVS

SEQ ID NO: 1263 - protein, 842 aa, Zea mays
  VARIANT 219: note = Ancestral polymorphism is T, Derived polymorphism is I
  VARIANT 7: note = Ancestral polymorphism is A, Derived polymorphism is V
MEARYEVLRRATEEVAAVDAHAHNLVEHGSAFPFLRCFSEAEGDALALAPHSLSFKRSLRDIAALYNCEASLEKVEKFRSAEGLKSIGSKCFQAANISVILIDDGIAFDKMLDLESHKAFAPVVGRVLRIERLAETIINAESFSGSSWTLDSFTESYISKLNSFSNQIVALKSIAAYRSGLEINPNVSKTDAEDGLRKELTGPRPFRITNKNLIDYLFTCSLGIAVSLSLPVQIHTGFGDKDLDLRKCNPLHLRAVLEDERFAKCQIVLLHASYPFSKEASYLASVYSQVYLDFGLAIPKLSVHGMTSSLKELLELAPIKKVMFSTDGYAFPETYYLGAKRARDVVYRVLSAACEDGDLSIQEAIEAIEDIFRRNALNLYKLNVVNGSINHETAIVGKRVSLSSVEEDVLFVRIIWCDASGQHRCRVVPAGRFYEITRNKGVGLTFAAMGMTSFCDGPADGSNLTGVGEIRLVPDMPTLVRLPWSRHEEMVMADMQIRPGEGWEYCPRNTLRKVTKVLLDEFNVTMKAGFENEFFLRRKLVSNGVEMWIPYDNTNYCSTSAFDGASSILQEVYSSLKDSGIVVEQLHAEAGKGQFEIALKYILCTVAADKLIYARETIKSIARKHGLVATFLPKPDLDDFGSGSHVHLSLWENDQNVFMGSSKDNFHGMSKTGEQFLAGVYHHLPSILAFTAPHPNSYDRIQPDTWSGAYLCWGKENREAPLRTACPPGVPLDLVSNFEIKSFDGCANPHLGLAAIVAAGIDGLRRHLKLPEPIESNPSDHSSKLKRLPQNLQESVESLSADKVLHELIGDKLVTTAIAIRKAEINHFAKNPGALKDLIDRY

SEQ ID NO: 1264 - protein, 227 aa, Zea mays
  VARIANT 14: note = Ancestral polymorphism is L, Derived polymorphism is F
  VARIANT 15: note = Ancestral polymorphism is S, Derived polymorphism is T
  VARIANT 166: note = Ancestral polymorphism is G, Derived polymorphism is R
MATKHLALCLLVLFSIGMGMATAAANRKLGYGPGGGGGGGGSGGGGGGGYGGPGYGSGSGYGEGGGSGGAAGGYGHGGGGGGGGGEGAGAGGSGYGSGQGSGYGAGSGAAGGYGSGGGGGGGGGQGGGSGYGHGGGEGYGSGSGFGGGAAGGGGGHGGGGGGGQGGSGYGSGSGYGSGEGYGQGGAHGGGYGSGGGGGGGGGQGGGGSGYGSGSGSGYGGGNDNGHY

SEQ ID NO: 1265 - protein, 322 aa, Zea mays
  VARIANT 155: note = Ancestral polymorphism is R, Derived polymorphism is W
  VARIANT 199: note = Ancestral polymorphism is D, Derived polymorphism is N
  VARIANT 272: note = Ancestral polymorphism is A, Derived polymorphism is V
  VARIANT 287: note = Ancestral polymorphism is G, Derived polymorphism is D
MSALSTAATINAHADPPSSPPPPLQSTAWKVRHYRGRRHLVLRAGITASMEGLSPPPRPVAKITFERRSIQSWLDGGHLTCPVTNLPLPPSPPLIPNHALRRLIAAVSPSAAASLVPAEGGAHARQEAVSAAVPTRPASPMPALLGLAKSSATGRREVLESGNAAVLLRQAKVGDEAVARALLHLSLDGNDTRVGLVANGAVDALSAVVSRAERRRLHHWGAPSAIPALVGLLRRSGPQEGREAATALYELCKLPENRRRRVVREGAVPALADFAVAGSARAVEVLGLLARCWEGWQELCRVPGVVSVLTGAAGSGNARAIE

SEQ ID NO: 1266 - protein, 164 aa, Zea mays
  VARIANT 112: note = Ancestral polymorphism is A, Derived polymorphism is D
  VARIANT 102: note = Ancestral polymorphism is S, Derived polymorphism is L
  VARIANT 98: note = Ancestral polymorphism is S, Derived polymorphism is Y
  VARIANT 57: note = Ancestral polymorphism is C, Derived polymorphism is Y
  VARIANT 55: note = Ancestral polymorphism is G, Derived polymorphism is V
  VARIANT 54..164: note = Derived polymorphism lacks residues 54 to 164
  VARIANT 53: note = Ancestral polymorphism is K, Derived polymorphism is R
  VARIANT 42: note = Ancestral polymorphism is D, Derived polymorphism is G
  VARIANT 40: note = Ancestral polymorphism is A, Derived polymorphism is T
  VARIANT 36: note = Ancestral polymorphism is S, Derived polymorphism is Y
MRGARAGVGAGCSGRRWDGKPIIFGLQNFDRSSVAYVVTTVDKTSLRLYDVKKRGLCYTVFVCCFLLEGGATHVDIACDKDLVKLAMDLTNLPICVSSVDPSGFHSAVQAGAKMVEIGNYDSFYEMGIEFSSEQILKLTRETRKMLPVITLSVTVPHTLSLPDQ

SEQ ID NO: 1267 - protein, 218 aa, Zea mays
  VARIANT 76: note = Ancestral polymorphism is N, Derived polymorphism is H
MSSPSKRREMDLMKLMMSDYKVEMVNDGMQEFFVEFKGPAESNSPRAESRLLFSLPASRADVIVYHRILPNKFALHLVGIYQGGVWKVRVELPDAYPYKSPSIGFINKIYHPNVDEMSGSVCLDVINQTWSPMFDLVNVFEVFLPQLLLYPNPSDPLNGEAAALMMRDRPVYEQKGKGLLCHNVLLQVHSFFCHMHCNLSVTHTRMFRFFMHQIIKNS

SEQ ID NO: 1268 - protein, 575 aa, Zea mays
  VARIANT 282: note = Ancestral polymorphism is M, Derived polymorphism is T
  VARIANT 66: note = Ancestral polymorphism is S, Derived polymorphism is R
MAGNPAPPLPLKSSSSAPAFKSNASGSSRGHEPAKASSTSPAAAELPVPIPSDSLVAVLGVVGELSARGLLQGFTIPEAGGLTDEGASAVFDGMLTAFLAEHGVDPAAASCLPIPPPPLGDGKKVELVSLFLAVRARGGFSAVESWAAVAEAVGLDPTADTAVKLLYGKYLALLEQSCDKPLKQDHMVVSSGNADVLMGSKKERFLSPIKCLTSTAGSASAHLKRKRETLVGMLDWVHLVAKNPGKQGKNRAAGHKQAVVVELRRQMFADKDCLAREELVKTLNWVRLVAKSAGHPGIIGMNNRPDHLATAVELRSAMSLVGMLEWVRLVATSPAEPVVMEGNSLSYRSTALLFREQKFANKKCSRWSAASPQSGISIRPCGQADIPEWTGKRSSPYDDPRTLRFLGEPILLPGSTEHLDGASIGKGRQDDCNCQFPGSIACIRFHVAEKKIELKHELGSAYYEMGFHRIGEDLALTWTKDEETKFNSTVQDNMPASKNKLWDKLLAVLHAKGKEGLVSYYHNVFQVWRRAYQNRLAGNADSDDDSIEPGFLYFRQGGDRSRSRSAASSRKRRRS

SEQ ID NO: 1269 - protein, 70 aa, Zea mays
  VARIANT 16: note = Ancestral polymorphism is P, Derived polymorphism is L
  VARIANT 40: note = Ancestral polymorphism is R, Derived polymorphism is W
  VARIANT 44: note = Ancestral polymorphism is D, Derived polymorphism is G
  VARIANT 49: note = Ancestral polymorphism is A, Derived polymorphism is V
  VARIANT 58..70: note = Derived polymorphism lacks residues 58 to 70
  VARIANT 60: note = Ancestral polymorphism is T, Derived polymorphism is M
MAAAGAASSSSSSEVPIAARTCVSVGEVAVGAVATSSGDRVATDCGVCAICLDRIALQETALVKGCTSDR

SEQ ID NO: 1270 - protein, 92 aa, Zea mays
  VARIANT 52: note = Ancestral polymorphism is W, Derived polymorphism is C
  VARIANT 42: note = Ancestral polymorphism is T, Derived polymorphism is S
  VARIANT 25: note = Ancestral polymorphism is A, Derived polymorphism is T
MAGDVARRVPRTALQGSRKARRKMAVARLGGSGRTRRRFLGTALIRRLRLRCVAALYRRALRRLRAACASDAVQRVLESAALVGAVRMDAGV

SEQ ID NO: 1271 - protein, 363 aa, Zea mays
  VARIANT 54: note = Ancestral polymorphism is C, Derived polymorphism is Y
  VARIANT 183: note = Ancestral polymorphism is S, Derived polymorphism is C
MVCWYDLAEVVALTESIGKPLAEVLKELGKRVPDSLVKTRIEDDGFTIKFYFACGQVKSYERAIISVEQLNAILRQASKTKEKEDLRKIDNWQYISCVTLWVRFLCCHYKDYNLHPLFSQVLQLLFDCLELREVSQKEQTQRTKINFSSLLKVPKNLLKPRDFQEECILSAIQILSAHFAQWSYHVSFLEVATIPLVLLKRLHEQTTVESLRHPIKCLIDQVTENKDFIERKREVVSFSPNDKASVDSFLQSIASHLLFNIWPAEFAEKHITVECRRRSPHRMSDRDAVAPAGGGDRKAAKLGSWSSMSSNYGNKKRKSSSSSFGRRSTSTCEERQGVFRMLMSWNQESRFSNKIKTTTSKER

SEQ ID NO: 1272 - protein, 149 aa, Zea mays
  VARIANT 2: note = Ancestral polymorphism is A, Derived polymorphism is S
  VARIANT 11: note = Ancestral polymorphism is M, Derived polymorphism is I
  VARIANT 15: note = Ancestral polymorphism is G, Derived polymorphism is V
  VARIANT 16..149: note = Derived polymorphism lacks residues 16 to 149
  VARIANT 33: note = Ancestral polymorphism is G, Derived polymorphism is R
  VARIANT 102: note = Ancestral polymorphism is G, Derived polymorphism is R
  VARIANT 115..149: note = Derived polymorphism lacks residues 115 to 149
  VARIANT 133..149: note = Derived polymorphism lacks residues 133 to 149
MAYLPLYKECMNSNGRLLPQRLRGDLWRVYNSGEWSAGRFLLAIRYSDSYSRKRYFVLEDAALRCFKSAPSSKGELFFVLQVCAVLQGRGGFFHCFCSLSFGVDLQEIRLMGVLQRIAIAYLLTVLYEIWIRGDEDVDYGYDLLKRYRY

SEQ ID NO: 1273 - protein, 132 aa, Zea mays
  VARIANT 12: note = Ancestral polymorphism is T, Derived polymorphism is I
  VARIANT 15: note = Ancestral polymorphism is S, Derived polymorphism is R
  VARIANT 23: note = Ancestral polymorphism is P, Derived polymorphism is L
MPLQPLEDENDTVISFLYPLEPPRIGDTLDFEIKRWSTGKQGNLRALLSTLQYICPSDKKVDYQIQKLTNAADNATAREKSGNAEVNGKDGHSDEEDLLKYRPNPDMMDTDWSSWSGDAFHFLNDSIHSLHR

SEQ ID NO: 1274 - protein, 155 aa, Zea mays
  VARIANT 106: note = Ancestral polymorphism is Q, Derived polymorphism is H
MHCAPSSNNCYLTPQICVWCWHHIIDMAEKEETKGRCPACRTRYDKDMIVKMAATCDRVIQRNLVYIIGLPAHLCNESVLERKEYFGQYGEVLKVLVSRLTGPPSQQASANSSISVYVSLNYTVYMHDLFILHMNLDFYFQYWSISLMKYQITIY

SEQ ID NO: 1275 - protein, 100 aa, Zea mays
  VARIANT 58..100: note = Derived polymorphism lacks residues 58 to 100
  VARIANT 6: note = Ancestral polymorphism is G, Derived polymorphism is R
MHKSKGKFSGVLHKGFKPDKCKTSLRMAVGRIKLLRNRKEVQVRQMRREVAQLLEANQDMTARIRVEHVIREEKFMQAYDLIEVYCELIVARLSIIDSQK

SEQ ID NO: 1276 - protein, 249 aa, Zea mays
  VARIANT 37: note = Ancestral polymorphism is R, Derived polymorphism is W
  VARIANT 42: note = Ancestral polymorphism is A, Derived polymorphism is V
  VARIANT 60: note = Ancestral polymorphism is G, Derived polymorphism is D
  VARIANT 106: note = Ancestral polymorphism is E, Derived polymorphism is K
MRKFQDSIKALQADIDHANAMASEFLRDYDGSVIQMRVAYSAVAHFLLQWTDCKLAGALGLLKVMLYKVCADGSSALPDWEMEASIREFYGVIFPSLLQLPSGITELDDRKQRKLCLKKFRSRDEQLSEVDTERELECGICLEVSPKVVLPDCAHMLCMRCFEDWNEKSKSCPFCRACLEEVKPGSLWIYTDDSDVVDTDTLTRENIRRLFMYINKLPLVVLHVVDLDVYKYRIKGVFLAQGRVRLSPW

SEQ ID NO: 1277 - protein, 439 aa, Zea mays
  VARIANT 55: note = Ancestral polymorphism is V, Derived polymorphism is L
MDSSLASAAAIADQRQKIEQYRHILASVLSSSPPDISQAKRFLDHMVSDEVPLVVSRQLLQTFAQDLGKLESDAQKEVAHYALTQIQPRVVSFEEQVVVIREKLAELYESEQQWSKAAQMLSGIDLDSGIRMLDDTNKLSKCVQIARLYLEDDDAVNAEAFINKASFLVTNSHQEVLNLQYKVCYARILDLKRRFLEAALRYYDISQIEQRKIGDEEIDENALEQALSAAVTCTILAGAGPQRSRVLATLYKVVQQIPINLDVYGFSGKYGLTEIIASGLSWVVSDLVQCQPDERCSKLKIYPILQKVYLERILRKPEIDAFAEELRPHQKALLPDKSTVLDRAMIEHNLLSASKLYTNISFDELGTLLGIDPRKAEKIASRMIYEDRMRGSIDQVEAVIHFDDDTEELQQWDQQIAGLCQALNDILDSMSSKGITIPV

SEQ ID NO: 1278 - protein, 336 aa, Zea mays
  VARIANT 29: note = Ancestral polymorphism is Q, Derived polymorphism is L
MEHSLYYYCRSWLLVCSSVLALCLGSRGQLTPGFYRSTCPQLYYTVQRHVFDAMRAEMRMGASLLRLHFHDCFVNLLKRYGTQGCDASILLDGDDGEKFALPNRNSVRGFEVIDAIKADLESVCPEVVSCADIVALAASYGVLFSGGPYYDVLLGRRDGLVANQSGANSGLPSPFEPIDSIIHKFAAVDLNTTDVVVLSGAHTIGRARCALFSNRLSNFSATESVDPTLDAGLAESLQSLCAGGDGNQTSALDVSTPNAFDNAYYKNLLLEKGLLSSDQGLFSSPEGVARTKALVETYSQDSEHFFCHFASSMIKMGNIPLTASDGEIRKNCRVAN

SEQ ID NO: 1279 - protein, 810 aa, Zea mays
  VARIANT 699..810: note = Derived polymorphism lacks residues 699 to 810
  VARIANT 687..810: note = Derived polymorphism lacks residues 687 to 810
  VARIANT 377..810: note = Derived polymorphism lacks residues 377 to 810
  VARIANT 235..810: note = Derived polymorphism lacks residues 235 to 810
  VARIANT 6..810: note = Derived polymorphism lacks residues 6 to 810
MASQGEPSASASDPKEKKDYSTAILERKKSPNRLVVDEATNDDNSVVALHPDTMERLQLFRGDTVLLKGKKRKDTVCIVLADETCEEPKVRMNKVVRQNLRVRLGDVVSVHQCQDVKYGKRVHILPIDDTVEGITGNLFDAFLKPYFLEAYRPVRKGDLFLVRGGMRSVEFKVIETDPSEYCIVAPDTEIFCDGEPIKREDEERLDEVGYDDVGGVRKQMAQIRELVELPLRHPQLFKSIGVKPPKGILLYGPPGSGKTLIARAVANETGAFFFLINGPEIMSKLAGESESNLRKAFEEAEKNAPSIIFIDEIDSIAPKREKTNGEVERRIVSQLLTLMDGLKSRSHVIVMGATNRPNSIDPALRRFGRFDREIDIGVPDEVGRLEVLRIHTKNMKLAEDVNLELISKDTHGYVGADLAALCTEAALQCIREKMDIIDLEDETIDAEILNSMAVTNDHFKTALGTSNPSALRETVVEVPNVSWEDIGGLENVKRELQETVQYPVEHPEKFEKFGMSPSKGVLFYGPPGCGKTLLAKAIANECQANFISVKGPELLTMWFGESEANVREIFDKARQSAPCVLFFDELDSIATQRGSSVGDAGGAADRVLNQLLTEMDGMNAKKTVFIIGATNRPDIIDPALLRPGRLDQLIYIPLPDEQSRLQIFKACLRKSPVAKDVDLNALAKYTQGFSGADITEICQRACKYAIRENIEKDIERERRMKDNPEAMEEDEVDEIAEIKAAHFEESMKYARRSVSDADIRKYQAFAQTLQQSRGFGSEFRFSEQSATAGAAAADPFASAGAAADDDDLYS

SEQ ID NO: 1280 - protein, 298 aa, Zea mays
  VARIANT 84: note = Ancestral polymorphism is G, Derived polymorphism is A
  VARIANT 96..298: note = Derived polymorphism lacks residues 96 to 298
  VARIANT 133..298: note = Derived polymorphism lacks residues 133 to 298
  VARIANT 152: note = Ancestral polymorphism is K, Derived polymorphism is M
  VARIANT 189: note = Ancestral polymorphism is L, Derived polymorphism is P
  VARIANT 198: note = Ancestral polymorphism is R, Derived polymorphism is H
  VARIANT 199: note = Ancestral polymorphism is P, Derived polymorphism is L
  VARIANT 208: note = Ancestral polymorphism is P, Derived polymorphism is L
  VARIANT 222: note = Ancestral polymorphism is T, Derived polymorphism is I
  VARIANT 232: note = Ancestral polymorphism is H, Derived polymorphism is R
  VARIANT 234..298: note = Derived polymorphism lacks residues 234 to 298
  VARIANT 260: note = Ancestral polymorphism is F, Derived polymorphism is V
  VARIANT 271: note = Ancestral polymorphism is Y, Derived polymorphism is H
MQVVNFKTIVQINFSSYNVGDKDYCGYDYSLVRQLSEVYEKEAAAAVITGTAVATTATPTVNAGATTADATPKSGRSGERGRGGRKKYVLHLDKFQSSSVFLSVTHQPDSCFRAKEQDTDELINKRGGCGAQQLNITVDGMKMVAEFTAPKKKTDDQDQLPEPVERKQILSDERVLNVLKRISDEDCLLMGLNPKYARPDWMILQVLPDPPPHVRPSVMMDTSSRSEDDLTHQLAMLIRHNENLRRQERNGAPAHIIIEFAPLLQFHIATYFDNDLPGQPRVSGLECQFACIKSTDSR

SEQ ID NO: 1281 - protein, 492 aa, Zea mays
  VARIANT 40: note = Ancestral polymorphism is L, Derived polymorphism is V
  VARIANT 206: note = Ancestral polymorphism is S, Derived polymorphism is R
  VARIANT 215: note = Ancestral polymorphism is T, Derived polymorphism is R
MGQEEAVAANGTGTGVGRGRPHAVVMPYPLQGHVIPAVHLALRLAERGFAVTFINTESVHHQIGAGGDIFAGVRARGGGTTTEELDVRYELVSDGFPLGFDRSLNHDQFMEGVLHVLPAHVEDLLRRRVVVDPATTCLVVDTFFVWPATLARKLGVPYVSFWTEPALIFNLYYHMDLLTKHGHFKCKDPRKDTITYIPGVASIEPSELMSYLQDTDTTSVVHRIIFRAFDEARRADYVLCNTVEELEPSTIAALRADRPFYAVGPIFPAGFARSAVATSMWPESDDCSRWLGAQPPGSVLYISFGSYAHVTKQELREIAGGVLASGARFLWVMRPDIVSSDDPRPLPEGFAEAAAAAGRGLVVQWCCQVEVLSHPAVAAFLTHCGWNSVLESVWAGVPMLCFPLLTDQLTNRRLVVREWGAGVSIGDRGAVHADEVRARIQGIMAGEHGLKLRDQVRKLRATLEAAVAPGGSSRRNFDDFVDELKRKLKDAS

SEQ ID NO: 1282 - protein, 668 aa, Zea mays
  VARIANT 388: note = Ancestral polymorphism is S, Derived polymorphism is L
  VARIANT 561: note = Ancestral polymorphism is P, Derived polymorphism is L
MKASNFQLRSSRLPWLESWLLPPGFPVAMNSSYFLGGQGLSTLKFRVRCSQLQLSTNSVHNKKEKEKYSCFDQSTSYLHVQCLRDFPTEKLSGEVVVVRLDSSLILGHLGPCTSSLERALLTIKYLCKARAKVAIATSWDTILQYDNPVTESVASFAEYMSSLLQVEVIPVDGAPSSTSFKQEEWAQNSIILFENLLNFTGEVANCKDFSQKLASGAMIFVNDSFSLSHKILASTVGITCFCYASLAGFHFEEELMKLIKITDSTRRPYIAIIGGSNFLRKAPALQTLTCLCDGLFFVGKLSFQIMNGFGMTVPSQFIERNAVKEVLQIIQVARDRNIPIYYPTDLWCLKNGDSEISGVINSTGQLAGWTPADIGPSTLEKISSIITSYKKILWIGPTNYGLTEKNSVGGTQLGEILESASSDGCDVILVGDAACKAVKRKTDSSPQYTEFQKSTVVWEFLKGRILPGIAALDKCYPYRIPWSTVFCEPTLPLVVDIGSGNGLFLFQMAKSCESSNFLGFEMNEKLVIRCLQGMASDEKRNLYFVSTNATSTFRSIVSSYPGRLTLVTIQCPNPDFNKEQNRWRMVRRMLIEAIVDLLHTNGQVYLQSDVESVLLVMKEQFLSYSKGQLVTDGDGGNCIDNPFGVVSDWERHVLARGAPMYRAMLKKM

SEQ ID NO: 1283 - protein, 686 aa, Zea mays
  VARIANT 42: note = Ancestral polymorphism is G, Derived polymorphism is V
  VARIANT 22: note = Ancestral polymorphism is A, Derived polymorphism is V
  VARIANT 10: note = Ancestral polymorphism is M, Derived polymorphism is I
MAAKTWQPMILVVMIVGMGVEACGAVEFAYHGFGGAGLQLDGMATVTPAGLLQLTNDTSMPKGHAFHPEPVTFRRPASAMSSFSTTFVFAIVSEFQDLSTSGFAFLVAPSKDMSSAMPNQYLGMFNGTNNGDARDRVFAVELDTVRNPEFADINNNHVGVDVNSLNSSAAAPAGYYDDATGAFRDLSLISREPMQVWVDYDGATTEMTVTMAPAPAPRPQRPLLSTKIDLSTVITDTAYVGFSSASSIVLVKHYVLGWSFSLSGDAPALDYGKLPKLPRIGPKPRSKALTIALPIATTVSVLAAVGVAFLFLRRRLRYAELREDWEVEFGPHRFAFKDLYAATGGFKDDCLLGAGGFGRVYKGVLPGSGAEIAVKKVSHGSRQGMKEFVAEVVSIGQLQHRNLVRLLGYCRRKGELLLVYDCMPNGSLDKHIHGRADRPVLDWAQRLHVIRGVAAGLLYMHEDWKQVVIHRDIKASNVLLDGEMNGRLGDFGLARLYDHGSDPHTTRVVGTMGYLAPEVVRTGKATTRSDVFAFGVFLLEVACGRRPIEDVACSRRRVEENGDINTGDCFMLVEWVRAHWRNGSITSAVDARLGSEYDATEADLVLRLGLACLHPSPAARPTMRQVAQYLDGSAHLPEFPATYTSSFRMFAGMERHRRLFDSWSVRQSRAAISVATMSDIGLSGGR

SEQ ID NO: 1284 - protein, 187 aa, Zea mays
  VARIANT 9..187: note = Derived polymorphism lacks residues 9 to 187
MPAPSPSLRCSRPGGSTAFTVPPPNHTFARGASAPALVRRHGRRIIPAPPSPIPSGHPATPRVAHTPRIRSPVPSPPTIPPPTRAAHTSPSLLSIPPPPAVVCCPAHLRSSTRPMAAAASSALHAVGVVASAKPRSVAPGTCTPPQANLLTLSPPPRRANRRVTGVTDLHRSCSGGKEEERAHGSPA

SEQ ID NO: 1285 - protein, 257 aa, Zea mays
  VARIANT 14: note = Ancestral polymorphism is V, Derived polymorphism is F
  VARIANT 174: note = Ancestral polymorphism is E, Derived polymorphism is D
MKTPKPLAVFLVVFVALAAAPAVVDAGWSRGTATFYGGSDASGTMGGACGYGNLYATGYGQYTAALSQVLYNGGASCGQCYQVSCDAQTDARWCRPGGGAVTVTATNLCPPNYAYSGGTGGWCNPPRPHFDMSQPAWLQIGVYQGGIIPVLYQRVPCAKQGGVRFTITGFNHYELVLISNVGGSGSVDSAWVQGSSTNRVPMSRNWGANWQSLAGIAGQALTFGVTSSGGQTIVFQNVVPPNWVFGMSFTSNLQFSY

SEQ ID NO: 1286 - protein, 35 aa, Zea mays
  VARIANT 13: note = Ancestral polymorphism is G, Derived polymorphism is R
MQHHVALPPGSMRKISYIAPAGQYNLQDTVLELEF

SEQ ID NO: 1287 - protein, 217 aa, Zea mays
  VARIANT 113: note = Ancestral polymorphism is H, Derived polymorphism is Y
  VARIANT 36..217: note = Derived polymorphism lacks residues 36 to 217
MSSYAALIFYFSSFTQTQMRDLSGFVETRQQLLSLKPNHRMNWIGFAVAHHLNSDSSKAVEVLEAYEGTLEDDYPPENERYEHNEMLLYKMTTAISIEDVRREVKILKALSGHSNLVKFYDALSPEAKDFVKRLLNKDYRKRMTAAQALLVGRGDLCMSPVEFEPSVSDDLVLEKKSGNGQHDVRGTHHHRTSMKPEKPIDLLRKLMAIICVLTVVL

SEQ ID NO: 1288 - protein, 259 aa, Zea mays
  VARIANT 82: note = Ancestral polymorphism is S, Derived polymorphism is L
  VARIANT 236: note = Ancestral polymorphism is Y, Derived polymorphism is S
MAGTTVVAPQLKPSLLAALVLALLLTSAMAANYWNSGTATFYGGADGSGTMGGACGYDNLYNAGYGVLNAALSQVLFNDGASCGQCYSIRCDASRSVWCKPGTSVTVTATNLCPPNYALPNGGWCGPPRPHFDMSQPAWENIGVYRGGIIPVLYQRVSCSRQGGVRFRITGSKYFQLVLITNVAGSGSVQSMSVKGTSTGWIAMTRNWGAQWQSNSALLTQALSFTVTSTAGQTLYINNVVPAWWDLGMTFATNAQFDY

SEQ ID NO: 1289 - protein, 257 aa, Zea mays
  VARIANT 176: note = Ancestral polymorphism is N, Derived polymorphism is T
  VARIANT 21: note = Ancestral polymorphism is L, Derived polymorphism is H
  VARIANT 9: note = Ancestral polymorphism is S, Derived polymorphism is F
MYMDTSSRSLVLCTLVLAACHGLAAAGWSQGTATFYGDADGSGTMGGACGYGNLYNAGYGINNAALSQTLFNDGASCGQCYLITCDASRPGGQYCRPGSNSVTVSATNLCPPNYGLPGGGWCGPGRPHFDMSQPAWERVGVVQGGIVPVLYQQVACARRGGVRFAIAGSAYYLLVNIQNVGGSGSVKAASVKGDRTAGWVQMSRNWGANWQALSGLVGQGLSFAVTTTGGQYLQFLYVVPGWWQFGMTFATNQNFAY

SEQ ID NO: 1290 - protein, 293 aa, Zea mays
  VARIANT 47: note = Ancestral polymorphism is S, Derived polymorphism is C
MSTGLLYLSSGSIPMPCIIPAANILIGHLAHLLPKTHTFSLSEMASSFMLCTVVVAACLAAAAADWSQGTATFYGGVDASGTMGGACGYDNLYNAGYGVNTAALSPTLFNDGASCGQCYLITCDGTRPGGQYCKPGNSITVSATNLCPANYALPNGGWCGPGRPHFDMSQPAWENIGIFGGGIIPVLYQQVKCSRTGGVRFGLAGSQYFLLVNIQNLGGSGSVGAAWVKGDRTNWIQMSRNWGANWQALAGLVGQGLSFAVSTTGGQYIQFWNVAPGWWQFGQTFGTNLNFYY

SEQ ID NO: 1291 - protein, 252 aa, Zea mays
  VARIANT 10: note = Ancestral polymorphism is C, Derived polymorphism is R
  VARIANT 132: note = Ancestral polymorphism is W, Derived polymorphism is L
MKMNMSLVLRVAFSACLASLAAAGWSPGTATFYGGADGSGTMGGACGYDNLYNAGYGVNNAALSATLFNDGASCGQCYLIACDTSRPGGQSCKPGSSITVSATNLCPANYALPNGGWCGPGRPHFDMSQPAWEHIGIYGAGVIPVLYQQVKCSRTGGVRFSLAGSQYFLLVNVQNLGGSGSVGAAWVKGDRTNWIQMSRNWGANWQALAGLVGQGLSFAVTTTGGQYIQFWNVAPGWWQFGQTYTTTQNFYY

SEQ ID NO: 1292 - protein, 252 aa, Zea mays
  VARIANT 53: note = Ancestral polymorphism is A, Derived polymorphism is V
  VARIANT 171: note = Ancestral polymorphism is V, Derived polymorphism is D
MAPRMMLVLWGVLAAASSTVVAGWSAGTATFYGGSDGSGTMGGACGYGNLYSAGYGVNNAALSQTLFNDGASCGQCYLITCDASRAGGQYCKPGGASVTVTATNLCPPNYALPSGGWCGPGRPHFDMSQPAWENIGVVRGGIVPVLYQQVRCSRSGGVRFNVAGSSYFLLVSIQNMGGSGSVAAAWVKGTSTAWIQMSRNWGANWQALSGLTNQALSFAVTSTGGQYIQFLNVAPAWWQFGQTYSTNQQFYY

SEQ ID NO: 1293 - protein, 123 aa, Zea mays
  VARIANT 42: note = Ancestral polymorphism is A, Derived polymorphism is V
  VARIANT 7: note = Ancestral polymorphism is S, Derived polymorphism is R
MLAVTVSQVVALLSKAAGAEAERWRRRCGGGGHDRSAASPAVGYCCVCISACRDDGDDVRRLPCGHAFHRDCVDRWLARCRRTCPLCRLHVAAGPAVGFVDQQQLQLSDDLVIWFSSLFVAGL

SEQ ID NO: 1294 - protein, 365 aa, Zea mays
  VARIANT 226: note = Ancestral polymorphism is R, Derived polymorphism is G
MVSRRTLLVMMATVVVLHRSRTLCAAASAAAAPPATTKQARTPALFVFGDSIVDPGNNNALTTTVRCNFPPYGQDFPGHNATGRFSNGRVPGDIVASRLGIKEHLPAYLGTELSDFDLLTGVSFASGGCGFDPLTAELVSVLTMDNQLDLFKEYKEKLERVAGGAHRAADIVSRSLYMVVTGTDDLANTYFTTPFRRDYDLESYIEFVVQCASDFIKKLYGLGARRINIAGAPPIGCVPSQRTNAGGLDRECVPLYNQAAVVFNAALEKEIKRLNGSDALPASVLQYIDLYTPLLDMIQRPDAYGFNVTNRGCCGTGVFEVTLTCNRYTAEPCRDPSKFLFWDTYHLTERGYDLLMAQIINRYGV

SEQ ID NO: 1295 - protein, 266 aa, Zea mays
  VARIANT 157: note = Ancestral polymorphism is R, Derived polymorphism is I
MGSGSLTMKQKKRVKHAKNKYLKPGALAQIRYSRSTSRDIGKKRILLNAKDELELPPQPEVLLESSTTILSPARLNFKPFGSNKGQILPKTPKTPDASAFDGDSNLESLPLDLLVKIMCCLHHDELKVVFHVSKRIRKAVELARQYHFNYTTPDRSRQELLLNRTPLPTEHWPFLRIDGKDVRVSTPRTPRAPKHASRLSRLKLVDVKPITAVLFQESPTLFPSKRLRCSMPPPRLARPACKAAPSPRVLRYEEELCEAVAQNKLL

SEQ ID NO: 1296 - protein, 246 aa, Zea mays
  VARIANT 147: note = Ancestral polymorphism is S, Derived polymorphism is L
  VARIANT 92: note = Ancestral polymorphism is R, Derived polymorphism is C
  VARIANT 18: note = Ancestral polymorphism is S, Derived polymorphism is F
MGIPISGRLYEEFIPPCFDVHGHLETLYTIYASLCPSELQPGLGLVSPTAWLDHFFDDKADSFGSSLLDGFANPKDPLLQKLRFHVAVQGDRLAAILGAETLSYRSIYPSTVYRAAFITAWLCTYCIPVEAGQYIRPGVFQMAVQISEGIHRAIGVASLAFLYNCLDNIHDNIISGTRATMLFGFFKILHSFVIGFLCQLQSQQQSLPLQVTKLPRIVRVSKTRVTSYNDNQLLAYLMKVGGKPLM

SEQ ID NO: 1297 - protein, 211 aa, Zea mays
  VARIANT 73: note = Ancestral polymorphism is N, Derived polymorphism is K
MASSKREYEDFVPPHKTEREPATHTLTVNLSGQGKQCARARIHTWFKKEHVRVQMVHSQRRLIVRGERPVDGNRWRRFGLELLVPDGCDAKAIHARFENGVFRVTMPAVPPEQVPVVASAAKQDGGDRAARGREDNKHETPRKQEARQRVVSSARDPGGSSSKNDGAGGGSSAPPSSCQGFLSNPKMATTVLAVVLVLISLGIYVKNSVWP

SEQ ID NO: 1298 - protein, 901 aa, Zea mays
  VARIANT 102..901: note = Derived polymorphism lacks residues 102 to 901
MEADEASAPPPPPWMQNKSAAAIEASSGPLSAAASRLSARSRALPSSRDFHFYNNFPAFKSPVGAAAAKADASLGVLGGASILPTRQQPFPVGGDLDDAHDWLVALNDDLLERFGASTDEFKTLRRKEETSGRRAAPQAGDGFQVVCGKKKKKVGDGGEERVGRVEAFGGFGSVRMVTKDKAAAPGVKAKVPFHIRTIPRPQDVYCIVVDNSSKPFEHILLDRSEDGTRVVHPLEKLPVEQIISRNVPDNEPVKPPALDNTPFTFVEDLKTLEVLATKLKDATEFAVDLEHNHYRSFQGLTCLMQISTRTEDFIVDTLKLRKYLGDYLREFFRDPTKKKVMHGAGRDIIWLQRDFSIYVCNLFDTGQASKVLQMDRNSLEHLLHHFCGVAANKEYQAADWRLRPLPDEMIKYAREDTHYLLYIYDLMRLRLVNGSSCENDLLLEVCKRSNEICLQLYEKEQLTDTSYLHIHGLKENELNATQLSVLSSLYRWRDGIARAEDESTGYILPNKTLLEIAKEMPVTSGKLKRMIKSRNSILERNLNHVINNIRDAIAASGAFESIVEQLKKGKLEELTLADVKNSSEDTEMIPAVDVDNIEDPSDESAVVPAVITNVGAAPCITSEASLGNMHLEDPVPKTKDSGASSGFTGLTDNKKLSNDQQQAAKATVQVSKRPTAFGALFGKAAAGRRPDLFLGFSNVQGKTKVDKITSSVVLPFHHFSGGAKLSSAALPAKESLHSEPDSIQHSDPACQLEEVIQLDMGTDEQQPPENGNEDDGHCETEDTEMSKSPSGDPSVTEQRFRSLNEERNVKQNQKTPREFEFSVPVVPFDYAEARKNLVSSLPKAERRKDDAVARAINTDAGDKQRGSKKPPGGGENEGNFQHPRRRQAFPPSGNRNATYHQ

SEQ ID NO: 1299 - protein, 466 aa, Zea mays
  VARIANT 349: note = Ancestral polymorphism is H, Derived polymorphism is R
  VARIANT 285: note = Ancestral polymorphism is S, Derived polymorphism is W
MVMRARAMGLSSIRREVLVSAVFTALLVASILLLPSLLLTGAGPIRWPSLSPSKDAGIGEEEEQQARYPVTFAYLISASTGDASRAARLLAALYHPGNSYLLHLDREAPAEEHRRLAELVSGRGVYARAGNVWIVGRPNLVTYRGPTMLTTTLHAVAVLLRLRRRWDWFINLSASDYPLVTQDDLMEAFAGLPRDLNFIQHTSHLGWKIKKRARPVILDTALYEDGRAELIRPVNISTNLRRLPTAFKLFTGSPIQAETIAVGNGKAKHARIRPPILSRAMTTLSRAGSAWTMLSRAFAEYVTMGWDDNLPRTLLLYHANIVSSPEFYFQTVACNSRRFRNATVNHDLHFIRWDTPPKQHPLYLTARDYRRMLLSGAAFARKFRDGDPVLDRIDRDILRRRDPAAHFAYGGWCSEAGDQNGGAALCSNPQEPGRRGAVKPGAGSRRLKAMLRKTLSPRNFRRQQCR

SEQ ID NO: 1300 - protein, 565 aa, Zea mays
  VARIANT 374..565: note = Derived polymorphism lacks residues 374 to 565
  VARIANT 409..565: note = Derived polymorphism lacks residues 409 to 565
  VARIANT 511..565: note = Derived polymorphism lacks residues 511 to 565
MVRLEEELRHLMVCHAVPIDLTVLFFSLRRLSLESMDDLDTCPDFDAATLHSLDATPAGPKIARGASLGSNPFEDQVFDPMRPEAVEDLRAIAHRMAHAGSAATCSTRSGTLGENDPFWKASSEADILPGGQFARVYHYFAASEIYNAIRVFIACYVWMTRFGNFSYYYIKKDFSIARFAQMMWRLNFFVAFCCIVLDNDLMLYYICPMHTLFTLMVYGSLGLFNKCNVVPSIMAIKIACYFLSVILIWEIPGVFELLWAPFTFLLGYKDPSPSKAHLPLLHEWHFRSGLNRYIWIIGMIYAYFHPNALLGQDALALHDDVDAIAAYTFGCLCVVTGGSVPSQGLVGFNRGPLSFPSQNKNVYGSVFSYCLPSYKSSNFSGTLRLGPAGQPKRIKTTPLLSNPHRPSLYYVNMVGIRVGGRPVAVPASALAFDPASGHGTIVDAGTMFTRLSAPVYAAVCDVFRSRVRAPVAGPLGGFDTCYNVTISVPTVTFLFDGRVSVTLPEENVVIRSSLDGIACLAMAAGPSDSVDAVLNVMASMQQQNHRVLFDVANGRVGFSRELCTA

SEQ ID NO: 1301 - protein, 586 aa, Zea mays
  VARIANT 338..586: note = Derived polymorphism lacks residues 338 to 586
  VARIANT 210..586: note = Derived polymorphism lacks residues 210 to 586
MAKPSASAAAAALRASLGVAFALLLLLASSRLPHRALSAELSSPSVVAHERRGHGACAGVRTPDERYRAIAAGSDGRYRYPRGGGHVDYLYLFYCVLGGDRRPALGYAAMAAWLAVLFYLLADTAAVYFCSSLEGLARLLRLPPAIAGATLLSLGNGAPDALSAVASFFAGDGGEGGGTAAAVGLSGVLGGAMFVSSAVLGVIAIRLGGQEVAVHRASFFRDAAFLFLALVAVAVVVAAGQVTIWAAAGFASLYLVYVLAVAFTPDRWTRRHDAHAVDDPASAAAVSELHNVTETKFYTDQEARDPLLPDTAPLLQYYAGEANSNSNDGSTGNKSVFWTVLRLLELPLSLPRRLTIPDASKERWSKTAAVTAATLAPIFLSLLWSHRATGGPFVTVLLGGLAGLALGLIAFLTTDPFAPPTRFLGAWLAGGFAMSVAWAYVIANEVLSLLVSAGIILSVDSAALGVTVLAWGNSISDLIANVAVASRGGGAQVAVSGCYGGPVFNVLVGLGLSMLLACWSGYPQPVEIPRERGLYRTLAFVVAGLLWAVVMLPRRGMRVDRTLGVGLLVVYFCFLCINVSELKNAR

SEQ ID NO: 1302 - protein, 156 aa, Zea mays
  VARIANT 73..156: note = Ancestral polymorphism lacks residues 73 to 156
  VARIANT 29: note = Ancestral polymorphism is N, Derived polymorphism is K
  VARIANT 24: note = Ancestral polymorphism is S, Derived polymorphism is F
  VARIANT 22: note = Ancestral polymorphism is M, Derived polymorphism is T
MMQAAENAVLGQAPRGEAAAVMQSASRRKGRLGVVPRDEATDAAADGWVAVTEARVPGFRVKHARSSWPTRCRPFRVDATVALNCLKPSVRHLLRRNSKARRGVRGVLDGREQDNDRQGAGGDRVLRRRRACGVEASDAAEARATGLDEADKEVER

SEQ ID NO: 1303 - protein, 144 aa, Zea mays
  VARIANT 13..144: note = Derived polymorphism lacks residues 13 to 144
  VARIANT 34: note = Ancestral polymorphism is G, Derived polymorphism is S
MADKMKTVVVLVQENRSFDHMLGWMKSLNPEIDSVTGAEVNYTVAGDASSTPVHFGNASQPCRYRELVREFAVCDRWFASVPTSTQPNPMFVHSATSHGLVGNDRKMLLAGMPQRTIFDALQPPRRRPLLRHLLPVPARRPPLQ

SEQ ID NO: 1304 - protein, 813 aa, Zea mays
  VARIANT 432..813: note = Derived polymorphism lacks residues 432 to 813
MSTTYTTKSNGTTSDDNKWPKDHVKKSASVDRPPLVRTTKLSTITIKLYSSTGTDDKSTVLGMWMVSMAGELWFALMWVLDQVPKMQPVRRVVYLAALDEPMLPAMDVFVTTVDTEKEPPLVTVNTILSILAADYPAEKLTCYVSDDGGALLTRDAVAEAARFSALWVPFCRKHAVEPRNPEAYFSPGASNGFKAWRADYKGTAWPELARDRRRVRREYEELRLRIDALQAGGRAAVDAVAADRSCWRRGAAEDHAGAVELLVDNPGPGSTPRLGVSGTVDGVSNLLDLSSVDVRVPALVYMCREKRRGRVNHGKAGALNALLRASAVLSNAPFILNLDCDHYVNNSQALRAGVCHMLDGEGGNGNDVAFVQFPQRFDGVDPADRYANHNRVFFDCTELGLDGLQGPIYVGTGCVFRRSALYGVDPPLWRPQGDDAGKGAANGIETGKLGVSTPFLRSVYAVLTNQSDQWDTVSISSPPCSFDAAAIGEATALVSCGYEDRTAWGRDIGWIYGTVTEDVATGFCMHRRGWRSSYCATAPDAFRGTAPINLTDRLYQVLRWAAGSLEIFFSRNNALLAGRRLHPLQRLAYLNTTVYPFTSIFLIAYCGLFPAIPLVTGNGATTGAFFSIIIRPPSATYIAFVAALMLTLAVVAVLEVRWSGISLGDWWRNQQFWMVSATSAYLAAAVQVALKIAAGKEISFKLTSKQRATSTVASVKDRFAELYAVKWTVLMVPTAVVLAVNLTSIVAAMEGGSWRDGPMAVFALAFNAYVVVHLYPFALGLMGRWSNTLSPLLLLIAFFTVRLLCIVLYVQML

SEQ ID NO: 1305 - protein, 524 aa, Zea mays
  VARIANT 91: note = Ancestral polymorphism is R, Derived polymorphism is C
MSTATDAVPVAVAPAKRPPINKYAFACALLASMNSVLLGYDISVMSGAQLFMKEDLKITDTQIEILAGVINIYSLFGSLAAGLTSDWLGRRYTMVLAAAIFFTGALLMGFAPGYGFLMVGRFVAGIGVGFALMIAPVYTAEVAPTSARGFLTSFPEVFNNFGILLGYVSNFAFARLPVHLSWRAMFLVGAVPPVFLGVAVLAMPESPRWLVMRGRIDDARRVLQKTSDSPAEAEERLLDIKKVVGIPEGVSDADDVAAIVRASGKGSSSSRHDGVWKELLINPSRPVRRMLMAGLGLMFIQQATGVDCVVMYSPRVFERAGIKSKTNSLGASMAVGACKTFFIPISTLLLDRIGRRPLLLASGGGMAIFLFTLATSLHMMDRRPEGEATALGAVSIAAMLSFVASFASGLGPVAWVYCSEIYPLRLRAQAAAIGTGLNRIMSGATTMSFLSLSNTITISGSFYLYACIAAAGWVFMYFFLPETMGKSLEDTVKLFGKDADDEDVSDIRRHVPTKKPSTELSAQH

SEQ ID NO: 1306 - protein, 267 aa, Zea mays
  VARIANT 163: note = Ancestral polymorphism is G, Derived polymorphism is C
  VARIANT 103..267: note = Derived polymorphism lacks residues 103 to 267
  VARIANT 47..267: note = Derived polymorphism lacks residues 47 to 267
  VARIANT 31..267: note = Derived polymorphism lacks residues 31 to 267
MLAMSSLPRQPSGLAVRPPEEEARSVPVTPQLGQKSSPGSSLAERMQTRAGFMVLKLNMPFSTTVGADNSVPKVPSPYLTIPPGLSPATLLESPVFVSNSMGQGSPTTGTLFMFGSTNDNDPIRFGGGPPSVGDGPNDFCFKPLDLKSSHYTAEAMKVCSCGGYTLIINLILRQVVLGTVLAALVPVVGFNAVMTSEHFASFLVEVKRMLARAQDKLMTQLTLARHSADKKRVVAQLKKNCVAARTTKQAEHQEIWPENGIGFPGYF

SEQ ID NO: 1307 - protein, 667 aa, Zea mays
  VARIANT 63..667: note = Derived polymorphism lacks residues 63 to 667
MFHNKVLIRAAAASSSTSSPTSSLPPFILRQLSVSAAAPVPAVDLEILCCRVSRRHRLACLPQPPADALLVFQRCQSLVAVEAVSEIAAAFLGASVEVGEEEALVCSGSLVAEAVRCELRSMMLDHGWRCLGENIYVDSKFDQNDGRTDLCAVNVEVRLGRNDDFEFIVSPDAFRYTMHKEGRVIGYSKMLPSEQCLGRFMELCLLKHGLDTNCNYHVAVKLTYGASWETKWWPSSLVLQGPGLQPALKSIRVSKAMSALQSFVELLKAWSFFGHNSLTIKEQVLLNCSSTLPAWDKAASDLPPHSSRTVNTENLDLGHTDVMSKHKSFILDFRTPKPAVICSLSAKPWNTNVHKIAHSLDDNENLSELSPISFRFQAQQLATNSSYKSQVSMMKPSFSRSKSTEKRKLICSSEQPYTDNSKKSSHPDAVANCANHVSSSSAILHMPVIQVSENHGRKLAELLKISGKGGGRIAEVQQGYLETKNLDTGRKSEYYAPGIQVTKPTQCIEKGVLASKVINPTLLSVVPKDGVIAEAKRKAKPDLDKNVMTAASRHKTMPEVVKNEFAIKVRDNQNDELNKKVTKVKAKAVYKDLLNSKTRTKAKPDVASDELIAKVIDHHRRGELRLLTVSDLKCFLGAKKAKVGGTKEVLIQRVTELLLDKCIAISN

SEQ ID NO: 1308 - protein, 311 aa, Zea mays
  VARIANT 65..311: note = Derived polymorphism lacks residues 65 to 311
  VARIANT 37: note = Ancestral polymorphism is T, Derived polymorphism is I
  VARIANT 36..311: note = Derived polymorphism lacks residues 36 to 311
MEATDLSAIRGPVSNSHHLGYPPSLATLSSRVLPLQTMLLMLSDAVARSKSERSFAIKRWAWGRSSGATLSLLVSSSARRVNSSKQCDHPQQSRTWAEVVAKPSPSTLLADVIAKSQLQEHRNPLLASQPIDLHVLDHPFGRVVEVLQPLKEEASIIKLWLARVANHLEHADAHGEHAFVSDLPKLFDPCSPVKHDSPSSILASLAVAYTNADSLVCEDTIANTTIPILGEMPTRISGTEIHRETDLTSNEVVIGAFEADSRQMMSTKQTIKVPSETSTLLQVVTSVEDVVVVEDASDDEEATLVVQTNYF

SEQ ID NO: 1309 - protein, 315 aa, Zea mays
  VARIANT 4..315: note = Ancestral polymorphism lacks residues 4 to 315
  VARIANT 84: note = Ancestral polymorphism is H, Derived polymorphism is R
  VARIANT 133: note = Ancestral polymorphism is C, Derived polymorphism is R
  VARIANT 163: note = Ancestral polymorphism is S, Derived polymorphism is L
  VARIANT 206: note = Ancestral polymorphism is C, Derived polymorphism is W
  VARIANT 253: note = Ancestral polymorphism is A, Derived polymorphism is T
  VARIANT 278: note = Ancestral polymorphism is A, Derived polymorphism is T
MLPCLRLHARFCCCRDAAGLGGSAWHHSSLACTCREAFVASEASVFMNQPPPHMSRPTIIIKLILWLLWTITHLAISILNLWSHLIYSLDCYLISSGLLRKYQNLHLGRLKYLAIVVDSKEAKSTVKVKRLLCWLSSMGVKYVCLYDIEGVLKKSFEPAVNVSRDRTAGEHFVSCATELSATFYIRGIGANIKDLHCSQREMMIDCLSGSDGKEGIAKAASLLCSTYLNGDTHGDDKRKPAFTEADMAGALKAVGCGGPEPDLLLMYGPARCHLGFPTWRLRYTEIMYMGPLKSMKYGAIVKALYNFSKKHQNYV

SEQ ID NO: 1310 - protein, 629 aa, Zea mays
  VARIANT 138: note = Ancestral polymorphism is A, Derived polymorphism is T
  VARIANT 142: note = Ancestral polymorphism is T, Derived polymorphism is I
  VARIANT 145: note = Ancestral polymorphism is C, Derived polymorphism is Y
  VARIANT 178: note = Ancestral polymorphism is S, Derived polymorphism is C
  VARIANT 270..629: note = Derived polymorphism lacks residues 270 to 629
  VARIANT 274: note = Ancestral polymorphism is W, Derived polymorphism is G
  VARIANT 288..629: note = Derived polymorphism lacks residues 288 to 629
  VARIANT 447..629: note = Derived polymorphism lacks residues 447 to 629
  VARIANT 515: note = Ancestral polymorphism is S, Derived polymorphism is L
  VARIANT 571..629: note = Derived polymorphism lacks residues 571 to 629
MEGDEMLRVKLGRQGLEVSKLGFGCMGLTGVYNAPVPDQAGIDIIKHAFEAGITFFDTADAYGPHTNEVLLGKGNGDPTSSRRKRWRKKKRLEREDEPTLEIVAPPPPVQMLPAVDATACVIDWSVQMSIAEDNLKTAAVITVVCSRDISANEIVSVLAPRLEMEEGGLVLRQLSQSSFLAVLPSRVQLDTLVDSFPIIREENFMLSSRRWTRFGGAGGNSLKHLVELELRGLPVHAWETSVVQQLINPHACISQVLPDTLEVRSLEAFRCLAWCSDPERIPATKDLWITEPDQASAADGKKALVYPVQIRWVPADLSLLTGDPPLLIGGDDQDKSDTPLHGEDVVTTLHVLNMMQSMTFLALKHFPREKVQIATKCGIAGFDASGMRVKGTPDYVRACCEASLQRLATDYIDIYYQHRIDQSVPIEETMGELKKLVEEGKVRYVGLSEASADTIRRAHAVHPITAVQLEWSLWTRDIEEDIIPVCRELGIGIVPYSPLGRGFFAGRAAVERVPSESLLSKHPRYSGENLEKNKVLYTRLEMLSKKYGCTPAQLALSWVLHQGEDVVPIPGTTKAKNLDENIGAVKVRLSKEDLEEISGAFPAGEVAGSRLLGVLEPFSWRLANTPPPK

SEQ ID NO: 1311 - protein, 240 aa, Zea mays
  VARIANT 74: note = Ancestral polymorphism is S, Derived polymorphism is L
  VARIANT 97..240: note = Derived polymorphism lacks residues 97 to 240
  VARIANT 107: note = Ancestral polymorphism is A, Derived polymorphism is V
  VARIANT 134: note = Ancestral polymorphism is S, Derived polymorphism is F
MAVPTSTSSPLPLLFLHRCTANSSPSVLSFPSSLRGASLRSRAAAAPPAETLSDDGIPDAPPEGAGTGIPLPSSIGDDGEQDKDVSQEEMVIINRYGEILVGVLHEAGSKGLVVLCHRFRSSKEGVLIPSNYMFVVQLAPKQKIRIKLRSYWVPLIEDSCKKIIEAAKTTNAKTMGPVPLPTKRRVYCVLNSPHVHKDSRFHFEIRTHQRLIDIMYPTAQTIDSLMQLQLPAGVDVEVKL

SEQ ID NO: 1312 - protein, 182 aa, Zea mays
  VARIANT 162: note = Ancestral polymorphism is P, Derived polymorphism is L
  VARIANT 158..182: note = Derived polymorphism lacks residues 158 to 182
  VARIANT 156: note = Ancestral polymorphism is R, Derived polymorphism is L
  VARIANT 112: note = Ancestral polymorphism is R, Derived polymorphism is Q
  VARIANT 78: note = Ancestral polymorphism is K, Derived polymorphism is R
  VARIANT 67: note = Ancestral polymorphism is P, Derived polymorphism is L
  VARIANT 61: note = Ancestral polymorphism is D, Derived polymorphism is H
  VARIANT 58: note = Ancestral polymorphism is S, Derived polymorphism is N
  VARIANT 52: note = Ancestral polymorphism is R, Derived polymorphism is C
  VARIANT 43: note = Ancestral polymorphism is E, Derived polymorphism is K
  VARIANT 38: note = Ancestral polymorphism is D, Derived polymorphism is E
MAPQAWVVAENGEDLQQPREFLPLSKLEDVGVLYWHLDPKKSESEEELAKIRRDRGYSYMDLIEICPDKLENYEEKVKNFFCEHMHADEEIRYCLEGSGYFDVRDKDDKWIRIRIREGDMIILPAGIYHRFTLDSAKYTKLMRLFIGEPVWTALNRPQEDHPARQEYVKNVSAGTGFALAAH

SEQ ID NO: 1313 - protein, 346 aa, Zea mays
  VARIANT 263: note = Ancestral polymorphism is A, Derived polymorphism is V
MNLASAVRVFLSYYLLVQRWMGSEQGGGVFDQGGHSVSLTRLDEARAPPRCAVRSSPSSAASLPPKPLLVAAPRETGEYPVILFLHGYLAVNSFYSQLFEHVASHGFIVVGPQLYTISGADTTEEINSAAAVIDWLATGLPSTLPLGVRANLTKVSISGHSRGGKVAFALALGHAKAKLAVPLAAVVAVDPVDGMGVGKQTPPPILTGRHGSLHVGAPAMVIGTGLGELPRGSLLPPCAPRGVSHAAFYDELDGAAPACHLVVRDYGHTDMMDDDTPGARGMLTRTICRSGGARAPMRRFVAGATVAFLKKWVAGDAAAMDSITARPDQAPVALSVVEFGDEKAIA

SEQ ID NO: 1314 - protein, 161 aa, Zea mays
  VARIANT 121: note = Ancestral polymorphism is A, Derived polymorphism is V
  VARIANT 72: note = Ancestral polymorphism is A, Derived polymorphism is V
  VARIANT 32: note = Ancestral polymorphism is A, Derived polymorphism is V
  VARIANT 30: note = Ancestral polymorphism is G, Derived polymorphism is R
MSELARCSAARLLLLLPVVFLVLALLGGARHAGGASVCDTANCGKGNCSETPAPALLPPGYECNCDPGWSHVLELIPFSPCIVPNCSFDSACLKLNLSQTPAPPTDVCAVVSCGAGGACKAGAAPFSYSCECRPGYANLLNLTALPCVNCMTQLLRFYSIR

SEQ ID NO: 1315 - protein, 206 aa, Zea mays
  VARIANT 2: note = Ancestral polymorphism is V, Derived polymorphism is A
MAAVAMSPDLALFLTALLLLALAGARPGAAATTDSSTICDTAECGKGTCSEVPGILPVVMASYKCTCDPGWSQPKLLNLTVLPFMPCIIPDCTFDSSCYNFSLFSLRGIPLTDPCVIIDCGLGECRKGQGFSYTCECQPGYVNFLDQTYLPCVKNCSFGSDCSKQGIAPPPAPPPSTASPPAHGSVSSWRLLQLLLPHAILLLLLL

SEQ ID NO: 1316 - protein, 428 aa, Zea mays
  VARIANT 28..428: note = Derived polymorphism lacks residues 28 to 428
MGKAGRWLKSILAGRKSGVRDKALRHQQQQGDATPLPAASSPREKRRWSFRRPATAPTKQEGKANNAAPSPLSSLEPSARELDQSEHAVAAAAAATEVARLTAADESHLSVSCCPVEEAAAVRIQATFRGYLARKALCALRGLVKLQALVRGQLVRRQANATLRRMQALVDAQSRLRAQRARMLDADHATPPAAYQRRSPHHPIPMRRSSYEAMDRSGEEHVKVVEMDAGDPARRGRSSCSAAATESRERRLAEYYHHGGGGQCSPAPFLFAPDLSPQRGDSGHLEDVFAFDPAATARSSPYVAPYDDAADAYGVVPSYMANTESSRAKVRSQSAPRQRTDAALERQPSRRRAQQGAPRKMQRSSSHVGVPAAAAYGYPAQPWAGVRLDRSSASLVGSECGSTSSVLTAATVGYCRSLVGFEVHRGHY

SEQ ID NO: 1317 - protein, 499 aa, Zea mays
  VARIANT 168: note = Ancestral polymorphism is G, Derived polymorphism is A
MNRLASTRFTAALTRSVLPQCRRPIGRALCSGAPQNGEMEAAVREVVCFGSGSLDEVGSRLDRLGVAVSPHLIGRVIDSCGETGGGSGRRLLRFLAWCRSKHSGVLGEEALDRAIGVLARAGDLTAMRIAIADAEKDGRRMAPETFSTVIDALVKAGREDEAVRLFRGLERQRLLPECGSRVGGHGVWSSSLAMVHALCKRGHAREAQGVVWHHKSELSAEPMVSIVERSLLHGWCVHGNAKEARKVLNEMKSSGVPLGLPSFNEFLHCVCHRNLNFNPSALVPEAMDILTEMRTCGVPPAASSFNILLSCLGRARRVKEAYRILYLMREGKAGCSPDWVSYYLVVRVLYLTRRILRGKRLVDAMLESGVLPTAKFFHGLIGILCGTEEVDHALDMFKLMKRCELVDARIYDLLIEKLCRIGRFEIGRELWDEATNSGLVLGCSQDLLDPLKTEVFRPICPAQRLSPQNYKRLAWKKKVTAVGVKKDIAISASRKKSGV

SEQ ID NO: 1318 - protein, 314 aa, Zea mays
  VARIANT 113: note = Ancestral polymorphism is A, Derived polymorphism is V
MAACVDKWHPTHAGRLTGAIYRYLPDGATDRAVAAAAAAPASASGGDDDDVWDELRAEAQADADAEPLLRKYYADLVLSRPSLEAALAAHLSAKLCVPGALPQDALRDLLAAALAARPESGRAARADLRAARDRDAACGRMVHCFLYYKGFLALQAHRAAHGLWCEGRSAPAFLLQSRASEVFGVDIHPGARIGSGILFDHATGIVIGETAVVGNDVSILHGVTLGGTGKESGDRHPKVGDGVLIGAGASVLGNVRVGAGAKIGAGAVVLRDVPEGTTAVGNPAKAVGKKAAPQRRPEEQPGVTMEQGWSDYVI

SEQ ID NO: 1319 - protein, 282 aa, Zea mays
  VARIANT 7: note = Ancestral polymorphism is L, Derived polymorphism is H
  VARIANT 111: note = Ancestral polymorphism is V, Derived polymorphism is A
  VARIANT 141: note = Ancestral polymorphism is A, Derived polymorphism is T
MAANSNLFRDYIGAIFNGVQFSDVPINPDVEFDYILAFVIDYSTETDPPSPTNGQFSIFWQDSVLTPSAVAAIKQSNPNVRVAVSLGGATVNNSPVFFNVTSIDSWVQNAVSSLTTIIQQYNLDGIDIDYEQFQEDPATFAECIGRLVTTLKSNGVIKFASVAPFADADVQSHYQALWSSYGISVVDYINFQFYAYDASTTAEQYVNYFDEQMANYPGGNILASFTTAPTTTSVPVDTALSACQTLQSQGKLYGIFVWAADYSKDQGFKYETQAQALLANST

SEQ ID NO: 1320 - protein, 286 aa, Zea mays
  VARIANT 24: note = Ancestral polymorphism is T, Derived polymorphism is I
  VARIANT 160: note = Ancestral polymorphism is R, Derived polymorphism is S
  VARIANT 216: note = Ancestral polymorphism is N, Derived polymorphism is K
MATAANSNLFRDYIGAIFNGVKFTDVPINPRVRFDYILAFVIDYTTATEPPTPTNGQFNIFWQDSVLTASAVAAIKQSNPNVRVAVSIGGATVNDRPVFFNITSVDSWVQNAVSSLTTIIQKYNLDGIDIDYEQFQADPATFAECIGRLVTTLKSNGVISFASIAPFDNADVQRHYQALWATYGSVIDYVNFQFYAYGASTTEAQYVDFFNQQLVNYPGGNILASFTTAPTTTSVPINTSLSACQTLQSQGKLYGIFIWAADHSRSQGFKYDTQAQALLANAPAGY

SEQ ID NO: 1321 - protein, 495 aa, Zea mays
  VARIANT 307: note = Ancestral polymorphism is S, Derived polymorphism is Y
MAVMSRRRVIQLVLVGVVVFLVAPRLSWNLPGGLEKLGLQQSPAAVAVACWAAAVAAWAYAVSRPRPVYLVDLSGYVAGASHEASRAKTIAHFGRCGRFSDESMAFQKRMLERSGLGEQTHFPASLISVPVDMCLRTAREESHAVIFGVVDDLLRRARVAGGDVGVLIFNSSLLSPTPSFTSLIANRYGMRRDVVSHNLSGMGCSAGIIAIDLAKRLLQVHSDTYALVVSTENITLNAYMGNNRPMLVTNTLFRVGGAAILLSNRRADRRRAKYQLIHTVRTHRGAHDQSFGCVTQEEDDAGCVGVSLAKELMVVAGEALRTNITTLGPLVLPMSEQLRFLATVVLNRVFRARVRAYLPDFKLAFDHFCIHAGGRGVLDELERSLNLSAWHMEPSRMTLCRFGNTSSSSLWYELAYCEAKGRIRKGDRVWQIAFGSGFKCNSAVWKALRTVDGGEEGNPWTPEIDVLPIHVPKVSPIDETTYKFADGATYKISLG

SEQ ID NO: 1322 - protein, 380 aa, Zea mays
  VARIANT 13..380: note = Derived polymorphism lacks residues 13 to 380
MGSSEKTVTAYGEYTYAELEREPYWPSEKLRISITGAGGFIGSHIARRLKNEGHYIIASDWKKNEHMTEDMFCHEFHLVDLRVMDNCLKVTHGVDHVFNLAADMGGMGFIQSNHSVIMYNNTMISFNMLEAARINGVKRFFYASSACIYPEFKQLDTNVSLKESDAWPAEPQDAYGLEKLATEELCKHYTKDFGIECRVGRFHNIYGPFGTWKGGREKAPAAFCRKAQTSTERFEMWGDGLQTRSFTFIDECVEGVLRLTKSDFREPVNIGSDEMVSMNEMAEIVLGFEDRKLPIHHIPGPEGVRGRNSDNTLIKEKLGWAPTMKLKDGLRFTYFWIKEQIEKEKTQGVDIAAYGSSKVVSTQAPVQLGSLRAADGKEGL

SEQ ID NO: 1323 - protein, 826 aa, Zea mays
  VARIANT 185..826: note = Derived polymorphism lacks residues 185 to 826
  VARIANT 6: note = Ancestral polymorphism is R, Derived polymorphism is I
MVVLVRVLVACAKFRCPAANLLLSASTSRVRAQPGGPLLRQRTSKVSLRSIAMSTTQASEAAADKGLPLAVDATMIDEYASQSKLLQEFVKIPTIGKAWIFNSKDDDMSKAVVSIGKSDLLANKRRQFLLNTHISKSPSKSVDFQWSPFPTEISGVSAIVPSPSGEKLLLVRNSEDDSPTKLEIWGPCQLENEIHIAKSVHGSLYTDEWFEGISWNQEETFIAYVAEEPPQPKPVFNDYGFKKEGLSEKDCKSWKGQGDWEETWGETYSKKRIPALFVINISSGEVRPVKQIPRSLSVGQVIWAPSSSYSLVFVAWSSDNGFQGTPRKLGIKYCYNRPCALYAAPDPFGQEAEKSLTEGNKGETTTMIKLTANLSSAFFPRFSPDGKYLVFISAKSAVDSGAHNATNSLHRIEWCTDGKLDGSLGVADVVPIVLCPKDNCFPGLYCFGLLRDPWLTDGQTMIISSVWGSREVILSVNVVSCELSRVSPQDSDYSWNVLAVDKNNILAVSSSLITLPQMYYGIKVSQTESNWEWQGVSTPFPKPSDKISSVLAEHKFSILKIPISNPSDELANGAKLPFEAIFVSHKDSASNPTIVVLHGGPHSVYPSSYSKSLAFLFSQGYNLLVVNYRGSLGFGEEALQSLPGNIGSQDVNDVLTALDLVIKRGLIDPSRVAVVGGSHGGFLTTHLIGQAPDTFVAAAARNPVCNLSLMVGTSDIPDWCFVEIYGKEGKKYFSESPSVDDLCQFHQKSPISHIAKVKTPTLFLLGAQDLRVPVSNGLQYARALKERGIETKTIVFPEDIHGIDKPQSDFESFLNIGVWFKKHMGK

SEQ ID NO: 1324 - protein, 223 aa, Zea mays
  VARIANT 198: note = Ancestral polymorphism is V, Derived polymorphism is G
MKGLDGIQGPIYVGTGCVFRRHALYGYDAPTTTKPPSKTCNCWPKSCCLCCGSKRKCSKAKKKQEHQKKVKCRNASKQVHALEVAGRETAPPVPREKFEKRFGQSDAFLASTLQDNGEGCRFDMLKSLDDCIHVLSCGYENKTQWGKEVGWIYGSVTEDILTGFKMHCHGWRSVYCMPKRPAFKGSAPINLTDRLHQVLRWALGSVEIFLSKHCQNGTGIDVV

SEQ ID NO: 1325 - protein, 131 aa, Zea mays
  VARIANT 105: note = Ancestral polymorphism is C, Derived polymorphism is Y
  VARIANT 65..131: note = Derived polymorphism lacks residues 65 to 131
  VARIANT 44: note = Ancestral polymorphism is K, Derived polymorphism is N
  VARIANT 27..131: note = Derived polymorphism lacks residues 27 to 131
  VARIANT 14: note = Ancestral polymorphism is T, Derived polymorphism is I
MIGHNPIRLQRSTIMAWLNKEWSIHIRSQRSFPMVMMIRVSYSNRMMMRMMNTYSSGNVYDETNEDIEIDGTQDESTAIDLHDPYDNVYNNMPEETHMLKSVPNYDYCTAEKFEYEPPRFCCRGGEVELAH

SEQ ID NO: 1326 - protein, 157 aa, Zea mays
  VARIANT 2: note = Ancestral polymorphism is R, Derived polymorphism is Q
  VARIANT 4: note = Ancestral polymorphism is C, Derived polymorphism is Y
  VARIANT 10: note = Ancestral polymorphism is R, Derived polymorphism is W
  VARIANT 19..157: note = Ancestral polymorphism lacks residues 19 to 157
  VARIANT 42..157: note = Derived polymorphism lacks residues 42 to 157
  VARIANT 56: note = Ancestral polymorphism is R, Derived polymorphism is Q
  VARIANT 57: note = Ancestral polymorphism is P, Derived polymorphism is S
  VARIANT 58: note = Ancestral polymorphism is R, Derived polymorphism is H
  VARIANT 99: note = Ancestral polymorphism is G, Derived polymorphism is E
  VARIANT 106: note = Ancestral polymorphism is G, Derived polymorphism is S
  VARIANT 120: note = Ancestral polymorphism is F, Derived polymorphism is S
  VARIANT 124: note = Ancestral polymorphism is V, Derived polymorphism is L
MRGYEGCARRWLKLGRTRQRVWAIVGAKVGLWRCARPRRWRRGESLHHAAHVTKVRPHNLGSSNLSLFGHYALGSFNLTSQQSLRRHSTVHSCVAPTNEARASPPGNGPLIVFITKSARFHQWVFMLVSPSLAGWMTNDNPSLHHAMFGHSNIYVCS

SEQ ID NO: 1327 - protein, 890 aa, Zea mays
  VARIANT 94: note = Ancestral polymorphism is V, Derived polymorphism is A
  VARIANT 166: note = Ancestral polymorphism is A, Derived polymorphism is T
MKLLSPAAAPSSSPLFPPRIVEAAARQSGPCRIRIRIRGKAAAAGGGGGAGATGPRGSLRLAGWWRAQQQAPATATTTQQPDNVSSAKGASLLVIFDLTSLIIHPPVTFPPLRNVLLELGFPAVFQTSRVETESEIAKWPGKPQDLEDEHQAEEAELQPLIDQVRAMLRSMNDGDTSASAYDTAWVAMVPKVGGDGGAQPQFPATVRWIVDHQLPDGSWGDSALFSAYDRMINTLACVVALTKWSLEPARCEAGLSFLHENMWRLAEEEAESMPIGFEIAFPSLIQTARDLGVVDFPYGHPALQSIYANREVKLKRIPRDMMHRVPTSILHSLEGMPDLDWPRLLNLQSCDGSFLFSPSATAYALMQTGDKKCFEYIDRIVKKFNGGVPNVYPVDLFEHIWVVDRLERLGISRYFQREIEQCMDYVNRHWTEDGICWARKSNVKDVDDTAMAFRLLRLHGYNVSPSVFKNFEKDGEFFCFVGQSTQAVTGMYNLNRASQISFQGEDVLHRARVFSYEFLRQREEQGMIRDKWIVAKDLPGEVQYTLDFPWYASLPRVEARTYLDQYGGKDDVWIGKTLYRMPLVNNDTYLELAIRDFNHCQALHQLECNGLQTWYKDNCLDAFGVEPQDVLRSYFLAAACIFEPSRAAERLAWARTSMIANAISTHLRDISEDKKRLECFVHCLYEENDVSWLKRNPNDVILERALRRLINLLAQEALPIHEGQRFIHSLLSLAWTEWMLQKANKEENKYHKCSGIEPQYMVHDRQTYLLLVQVIEICAGRIGEAVSMINNKDNDWFIQLTCATCDSLNHRMLLSQDTMKNEARINWIEKEIELNMQELAQSLLLRCDEKTSNKKTKKTLWDVLRSLYYATHSPQHMIDRHVSRVIFEPV

SEQ ID NO: 1328 - protein, 617 aa, Zea mays
  VARIANT 603: note = Ancestral polymorphism is D, Derived polymorphism is V
  VARIANT 556..617: note = Derived polymorphism lacks residues 556 to 617
  VARIANT 540..617: note = Derived polymorphism lacks residues 540 to 617
MAAKDGSGSQDQGHRLWPMLSYACGELCVIMLLYVAAFASHAATRLARICGLRPPCILCTRLDRALHGNLPWFSADLVCSVHRSEVSSLAHCKSHGRLARSGDLCKSCLLSCTAVGAREEVVNSRPTTSSSRLCSCCSDPFKNNTGDTQRHSGAANAVVSWDSVPADHPNEKTSVVGIEEVQESDGPTKDSAAPSANGGAAKSNHRSAAPTRIAVDSNGSVKNASVVARANLTSPRPSEIISARDSSSTTQQEVKALLSQMSYARGGLDSSSIEGSPDAPNEESNATSNKSPYLERNYCVLEPSDGSLADDVEGGSSLENVKRQLELNRKAMAALHKELEEERSASAVAASQTMAMINRLQEEKAAMQMEALQHLRMMEQQADHDHLAIQDLHDLLTEREKELLDLDAELAHCRRLLQNDDPFNGDRFDGTDYTTNNNTDFVGSAMSHFEDDKAYILESLSRLEENLGISTIRLASGDARNCQEDILFEDQARADASPSSCDESSGVASLKIQISLLNIRLRALEEDQEFLNQVLLCNGKPICSHLDSRLLSDEEEQELQILPVPSDIHVCIHGYDHRHLRSNALLWGLRISLLCSWVLHPMDFVLPAMALIKTNDD

SEQ ID NO: 1329 - protein, 356 aa, Zea mays
  VARIANT 335: note = Ancestral polymorphism is T, Derived polymorphism is I
  VARIANT 216: note = Ancestral polymorphism is P, Derived polymorphism is S
  VARIANT 212: note = Ancestral polymorphism is R, Derived polymorphism is S
  VARIANT 210: note = Ancestral polymorphism is A, Derived polymorphism is T
MAAAVYALSIASAVIADWGRRKRFGLDITLRWVVEEEESEGGRRGCLAEPRGEGERHLQGHSLGETATMSVPHGRHQDLELAIDDFDEELIDPELRFSFQRNNKSIQQTLALLTYRSLFGIAIRPPVCGVDLTDKVVDIIFHVFDANCDGRMSCKPIEEGVVAADDNDVKAPFLVHVGVEDRQRPVLLQALELLSDLLTTPIGHNLYESAKRLRLPELPAFALEHLPNRNSLIYGDLYGISKEASTIYRATLRYKGFSEIMATLTKIGFFDAANHPLLEDTNRPTLKGFLDELLNNISTTNTNFDIEASGGYDDELIARLLKLGHCKDMEIAVKTVKTIKLVLIPCYKIHIFYELL

SEQ ID NO: 1330 - protein, 271 aa, Zea mays
  VARIANT 124..271: note = Derived polymorphism lacks residues 124 to 271
MAINFFEPLANVLRRMDNDVPAMGFFHGCMLEAKKEIATRFDNNESKYRAAWDIIDKRWDNKLRTPLHLAGYYLNPYFYYPNKSSIELDAKWWMNHGTTTPHLRILATQILNLTCSSSGCERAWSVFEQIHTKKRNKLLHDRMRDLVFVKFNSKLREKRDNKSKDPIEKGLNDILEDDGNEFITSVVPDENVDQDEDHEGAHDESSPEPTISKAQLPTKRKRHGRPRKKKLRSLKSLLSSDLERATCASSSKSEDNESMLIEASNSDSGDE

SEQ ID NO: 1331 - protein, 357 aa, Zea mays
  VARIANT 211: note = Ancestral polymorphism is W, Derived polymorphism is R
  VARIANT 167..357: note = Derived polymorphism lacks residues 167 to 357
  VARIANT 91..357: note = Derived polymorphism lacks residues 91 to 357
  VARIANT 85..357: note = Derived polymorphism lacks residues 85 to 357
MGLLCFASHLALFALVHFPLVKLTTHSFTFAMGGGDLFSSPSRGSVRSEFGTVVSPGDSNLGSLLTCADYLSDSDSNSSKEGIAWTRNRTWVTILATASGKSVFAILACCSCSWLMEMDCSIREVGQKHGRLLADLEEDEQPKKNVRLGSPATQWISVYNARRPMKQSKHGWTDPVKFSISTLEAWQQSLKCKKTALKTVMLLAERLPIVRWPLLSLPGKHISSSWVLLRPGGTGTHVKCIFRVKGKYKLRPAILETNIIFCVVSLNSCFDGFHFLNTKSKSVFSVLIKGPPSALAWLLDAFASATFDQIDSAYREAGGDPFVATAAMFLHLFGRFVIQFFFVGSVTTDLQTGGLDS

SEQ ID NO: 1332 - protein, 162 aa, Zea mays
  VARIANT 45..162: note = Ancestral polymorphism lacks residues 45 to 162
  VARIANT 47: note = Ancestral polymorphism is C, Derived polymorphism is S
MEVPMNSTQSGPHFPVQHQSLSLDIKGNKTDIVISKYEDTFLVRRKSDCGTNRLHGNHTSCQVRLFLSRQIRSPKHATIFPFTLKLCILYFFIKSLTPLDRKDESVFSDPTYNVSVLFGKRNEWQWLSSVIGYFSGSERSFSGNTEGYHCSCDRESPLVMIE

SEQ ID NO: 1333 - protein, 521 aa, Zea mays
  VARIANT 53: note = Ancestral polymorphism is V, Derived polymorphism is E
MEEAVEAVVAAGVEPFPTVDKCDASGRGAHAVVADLDGALLRSRSAFPYYALVAFEAGGVPRLLLLLLLAPLAAALRALASESACARVLVFAATAGARVRDIESAARAVLPRFYAADVHPAAWRVFSACARRRVVLTAAPRIMAEPFLRDCLGADAVAGTELATWRGRATGMVDSRRGVLVGWSRADALREILAGDDDDDAAPDVGLGNSRSDYPFMSMCKEAYIVPRAPVEPLPMDQLPRPVIFHDGRLVRRPTPLAALLVVLWFPVGFALACLRIAAGALLPMPLVYYAFWALGVRVHVRGAPPPPRAERATGRRGVLFACSHRTLLDPIFLSTALGRPVAAVTYSLSRLSEFLSPIRTVRLTRDRASDAAMIRDLLAEGDLVICPEGTTCREPFLLRFSALFAELTHEVVPVAMENRMSMFHGTTARGWKGMDPFYFFMNPSPAYVVTFLNKLPPELTCAGGRTSHEVANYIQRLIAATLSYECTSLTRKDKYLALAGNDGVVATPKPPAPAKKPNGC

SEQ ID NO: 1334 - protein, 372 aa, Zea mays
  VARIANT 79: note = Ancestral polymorphism is H, Derived polymorphism is Y
  VARIANT 55: note = Ancestral polymorphism is R, Derived polymorphism is S
METVRWAMEVGVWARCLGVGLLATARRFRRKRTFWDSGPRIGGSAVTGSSDITHRFFPSSSATPLVAFPSRRDMNFCRHLLLAAVFALLLAVCASAASRGAGSFDPSRVVQLSWRPRAFLHKGFLSDAECDHLIALAKDKLEKSMVADNESGKSVQSEVRTSSGMFLERKQDEVVTRIEERISAWTFLPPENGESIQILHYQNGEKYEPHYDYFHDKKNQALGGHRIATVLMYLSNVEKGGETIFPNAEGKLLQPKDNTWSDCARNGYAVKPVKGDALLFFSLHPDATTDSDSLHGSCPVIEGQKWSATKWIHVRSFDLPVKQPGSSDGCEDDNILCPQWAAVGECAKNPNYMVGTKEAPGFCRKSCKVCAE

SEQ ID NO: 1335 - protein, 113 aa, Zea mays
  VARIANT 45..113: note = Ancestral polymorphism lacks residues 45 to 113
  VARIANT 46: note = Ancestral polymorphism is L, Derived polymorphism is I
  VARIANT 47: note = Ancestral polymorphism is S, Derived polymorphism is L
  VARIANT 52: note = Ancestral polymorphism is A, Derived polymorphism is S
MLLDVNGGWCMHVSFLQVYNCISSIPPIGVHAVSIVTSRPFILSWLSIAYMASTLLPFQPMVSSSLAGWMANDNPSLHPVVFRLSNISVCSQRLEPLQVHLALVTNQQIHNIS

SEQ ID NO: 1336 - protein, 171 aa, Zea mays
  VARIANT 55: note = Ancestral polymorphism is W, Derived polymorphism is R
  VARIANT 73: note = Ancestral polymorphism is G, Derived polymorphism is D
  VARIANT 143: note = Ancestral polymorphism is T, Derived polymorphism is M
  VARIANT 144: note = Ancestral polymorphism is V, Derived polymorphism is A
  VARIANT 150: note = Ancestral polymorphism is S, Derived polymorphism is F
  VARIANT 154: note = Ancestral polymorphism is R, Derived polymorphism is W
  VARIANT 167: note = Ancestral polymorphism is P, Derived polymorphism is L
MRARQMIARSALDEVTYTGDFDRSPSTFRSSVSRDGRFPTVAGRYHLYVSYACPWASRCLAFLKLKGLDHAIGVTVVKPIFERTKESDEHLGWVFPAAADEEPGAEPNPLNGARSVRELYEIASSNYAGKPTIPVLWDKQLKMVVNNESSEIIRMLNAEFNGIARNPGLDL

SEQ ID NO: 1337 - protein, 106 aa, Zea mays
  VARIANT 79: note = Ancestral polymorphism is A, Derived polymorphism is V
  VARIANT 89..106: note = Derived polymorphism lacks residues 89 to 106
  VARIANT 90..106: note = Derived polymorphism lacks residues 90 to 106
MLILQVCHHLILILDCQEVVISVLMKLAGGCPSLADKLNVDAFLEQARSYDKAASNPVGWYIRNAQTRELSHPLPVMRAREIDEWSRSQEYKTLMQKMFQMGLNKV

SEQ ID NO: 1338 - protein, 327 aa, Zea mays
  VARIANT 109: note = Ancestral polymorphism is N, Derived polymorphism is I
  VARIANT 110..327: note = Derived polymorphism lacks residues 110 to 327
  VARIANT 165: note = Ancestral polymorphism is G, Derived polymorphism is R
MVAAARWIAKLSGPCLAQALQMYPDFKIKVVGHSLGGGTAALLTYVLREQKEFASTTCLAFAPGAAACMTWKLAESGVHFITTVINGADLVPTFSAALVDDLGSEEVQNWRSNVETQVKTCQNELQGLKKGLDSKVEQLKSVYQENIYVEDKPFHSFKKIARSLGYTDDDLPLVSFQLVSKGYYGECGKRGGYMEITGFSPEVREQIYKAASVNLCSNVSGQILASLVMNPPKISAGDESFESFMSERDGILSSLARRAKVLEEAFNSLEGITCNKAEGAMYLFPRLHLPQKAIGAAQAVGTVPDAYYAKRLPEATGIVVVPGSEFG

SEQ ID NO: 1339 - protein, 151 aa, Zea mays
  VARIANT 5: note = Ancestral polymorphism is A, Derived polymorphism is T
  VARIANT 73: note = Ancestral polymorphism is P, Derived polymorphism is L
  VARIANT 83: note = Ancestral polymorphism is T, Derived polymorphism is I
  VARIANT 87..151: note = Derived polymorphism lacks residues 87 to 151
MPSRALTFSQLGAATDGFSSQNLLGEGDFGRVYKGLLKDTEEVIAVKHLNRDGLQGNDEFLVEVLMLSLLHHPNLVKLLGYSTDSNQRPCACRRTLPAGRGSATSSRRSPSPPTRNTTIPKARELSTRARIVGQTMIAVLLGLKWSGQTTT

SEQ ID NO: 1340 - protein, 387 aa, Zea mays
  VARIANT 1: note = Ancestral polymorphism is M, Derived polymorphism is T
  VARIANT 130: note = Ancestral polymorphism is V, Derived polymorphism is A
MEDLASSRGGGGCGGLDAQIEQLMECRPLPETEVKTLCEKAKEILMEESNVQVGLSESEKRKFWEDLDVMVRAVPTNEKLFIGGDLNGHVGSTNAGYELAHGGFEYGSRNQERGILDFAVTYNLPVKSPVTICGDIHGQFHDLLELFRIGGKCPDTNYLFMGDYVDRGYYSVETVTLLVALKVRYPQRITILRGNHESRQITQVYGFYDECLRKYGSANVWKIFTDLFDYFPLTALVESEIFCLHGGLSPSIENLDNVRSLDRVQEVPHEGPMCDLLWSDPDDRCGWGISPRGAGYTFGQDISEQFNHTNNLKLVARAHQLVMEGYNWAHEQKVVTIFSAPNYCYRCGNMASILEVDDCRNHTFIQFEPAPRRGEPDVTRRTPDYFL

SEQ ID NO: 1341 - protein, 183 aa, Zea mays
  VARIANT 152..183: note = Derived polymorphism lacks residues 152 to 183
  VARIANT 140: note = Ancestral polymorphism is D, Derived polymorphism is Y
MFLRRRLLSTAAAATAARGPPPIRVSLTESAGRGVFATRPVSSGELLHSAQPLVSHPSHSLLHEVCYNCLRRKPGEGRASSGGDYFCSDACRDHAKGFHDIEKNVDWSLFDYHCSSRDLKYPYMAKRLACMVISGAANADCLNILQPALLHQGTLIEMKEEFELLESTFRKAGFQEEITTCIL

SEQ ID NO: 1342 - protein, 198 aa, Zea mays
  VARIANT 17: note = Ancestral polymorphism is D, Derived polymorphism is N
MEMGRSGNGGRKVVTFDDAITGMRRNGSLSSYLDMGRAAPRPLPAISMGSRRRTYADGELDVFSAERYFKGAMDGDGDRKEGASVGVITPAVAVQVEPLVETAAARPPPATEAVVMTKPSSTTVSFTASSAFSANSQTALFGFGGRLRPRRSSRDSKCCVQVGVLMRTCSGKRSVRVDGCAAKEAPNAAAEPAATGID

SEQ ID NO: 1343 - protein, 514 aa, Zea mays
  VARIANT 278: note = Ancestral polymorphism is L, Derived polymorphism is I
MAAWAVPALAAAAWALRAAVWACLAASAMLVAEAAYMGLASLASAAAMLWRRPDARYRWEPMPGGCDVEAATGADFPMVLVQIPMYNEREVYKLSIDAACALTWPPDRIVIQVLDDSTDPIIKELVELECQDWATKKINIKYEVRNNRKGYKAGALKKGMEHIYAKQCEFVAIFDADFQPEPDFLLKTIPFLVHNPKIALVQARWEFVNYDVCLMTRIQKMSLDYHFKVEQESGSFVYSFFGFNGTAGVWRVSAINQSGGWKDRTTVEDMDLAVRASLKGWEFLYVGDIRVKSELPSTFKAYRHQQHRWTCGAANLFRKMAWEIITNKEVSIWKKHHLLYSFFFVRRVIAPLVTFLFYCVVIPLSAMVPGVSIPVWGLVYIPTAITCMNAIRNPWSLHLMPFWILFENVMSMHRMRAAVTGLLETARANDWVVTEKVGDLVKDDLDVPLLEPVKPTECVERIYFPELLLALHLLICASYDFVLGSHKYYLYIYLQAFAYVVMGFGFVGTKTPCS

SEQ ID NO: 1344 - protein, 51 aa, Zea mays
  VARIANT 32: note = Ancestral polymorphism is G, Derived polymorphism is D
MLGYCIQGDQRLLAYELAKMGSLHDILHGRKGVAGAQPGPALDWMQSQNCC

SEQ ID NO: 1345 - protein, 525 aa, Zea mays
  VARIANT 205..525: note = Derived polymorphism lacks residues 205 to 525
MAVAPMDCGAGSISLGHKVLCRFGVPNSSRLRWVGYDRKQRTDQLIARAVSVDRTQLDFSNPDWKTQFQEDFDKRFSLPHLTDVIDVEPRPTTFSLKSRAPLENANGTMQGSWNGYVNDDDRALLKVIKFASPTSAGADCIDPDCSWVEQWVHRAGPRKQIYFEPQYVKAGIVSCGGLCPGLNDVIRQIVLTLEKYGVKNIVGIQHGFRGFFEDHLSEVPLSRHVVQNINLAGGSFLGVSRGGANISDIVDSIQARRLDMLFVLGGNGTHAGANAIHDECRKRKLQVSIVCVPKTIDNDILLMDKTFGFDTAVEAAQRAINSAYIEAHSAFHGIGLVKLMGRSSGFITMHASLSSGQVDICLIPEVPFTVDGPNGVLRHLEHLIETKGFALVCVAEGAGQEYFQKSNATDASGNMVLSDIGVHLQQKIKSHFKDIGVHSDVKYIDPTYMLRAVRANASDAILCTVLGQNAVHGAFAGFSGITTGVCNTHNVYLPIPEVIKSTRFIDPNSRMWHRCLTSTGQPDFH

SEQ ID NO: 1346 - protein, 116 aa, Zea mays
  VARIANT 49: note = Ancestral polymorphism is K, Derived polymorphism is M
MENRKEGQQGATVGWMTVPAFGEWDVKNGAVPDYSMDFSKIREMRRQNKRELSRASLGGDEDLLQQQQQQSAKAQPPKSPAAAVADDDDHHRLPLHDDSPTGRKKFLSYFQCCIRA

SEQ ID NO: 1347 - protein, 151 aa, Zea mays
  VARIANT 99: note = Ancestral polymorphism is P, Derived polymorphism is L
MRRHGASEASPSIIHTSSIALLQERFRNLQKVKEMREGRELQRVHAADTTTTTTNRTASSPSSSSSLSSALSLGLQQAANANDHPRWFLHPDLIRPSRPLRGHACHGLGATGGGVVVQTTSPPPLPPSSSWGGAQNSGYRTDIDVDTSLHL

SEQ ID NO: 1348 - protein, 271 aa, Zea mays
  VARIANT 123: note = Ancestral polymorphism is I, Derived polymorphism is M
  VARIANT 126: note = Ancestral polymorphism is G, Derived polymorphism is R
  VARIANT 136: note = Ancestral polymorphism is R, Derived polymorphism is C
  VARIANT 145..271: note = Derived polymorphism lacks residues 145 to 271
  VARIANT 204: note = Ancestral polymorphism is T, Derived polymorphism is I
  VARIANT 238..271: note = Derived polymorphism lacks residues 238 to 271
MAELGVPLTKHPGFHQYDVYGDLLGLLASHPVAPIVTLHHLDVVKPLFPDARSRPSVVRRLFDGPVKLDTAGLMQQSICYDSANRWTVSVAWGFMRMGSKPLQICASSPTCTEFEGIGGRWYICGGHSLHCSKLCRILDGLFLQYPIAISSILDYLQSSCPTFLQVQGSGAGIAEAVSCASGAGISLGAHIPTFEPVPESSVSIVDDRTPEDKERWWRRGLRAISEGKLAIVLLVGSQSLDVPRIDWIVRCSLRSQGEWLHFVKCLALIAC

SEQ ID NO: 1349 - protein, 95 aa, Zea mays
  VARIANT 82: note = Ancestral polymorphism is R, Derived polymorphism is W
  VARIANT 77: note = Ancestral polymorphism is N, Derived polymorphism is D
  VARIANT 35: note = Ancestral polymorphism is K, Derived polymorphism is N
  VARIANT 34: note = Ancestral polymorphism is G, Derived polymorphism is A
  VARIANT 27: note = Ancestral polymorphism is T, Derived polymorphism is I
MQGNLLPFHECIKLITRKPDKSLQIRIDLGQLSGKSALYCLDASIARYLIARNWDKYLKKHKVRDWLRVIAANKDHDVYELWYFNIAENEGEEED

SEQ ID NO: 1350 - protein, 76 aa, Zea mays
  VARIANT 63..76: note = Derived polymorphism lacks residues 63 to 76
  VARIANT 58: note = Ancestral polymorphism is L, Derived polymorphism is Q
  VARIANT 40: note = Ancestral polymorphism is Y, Derived polymorphism is S
  VARIANT 35: note = Ancestral polymorphism is D, Derived polymorphism is V
  VARIANT 32: note = Ancestral polymorphism is A, Derived polymorphism is T
  VARIANT 30: note = Ancestral polymorphism is S, Derived polymorphism is F
  VARIANT 19: note = Ancestral polymorphism is G, Derived polymorphism is S
  VARIANT 18: note = Ancestral polymorphism is L, Derived polymorphism is H
  VARIANT 13: note = Ancestral polymorphism is T, Derived polymorphism is I
  VARIANT 12..76: note = Derived polymorphism lacks residues 12 to 76
  VARIANT 10..76: note = Derived polymorphism lacks residues 10 to 76
  VARIANT 9: note = Ancestral polymorphism is L, Derived polymorphism is V
MFVGWWVALQEGTYGNKLGVVPQTIQELFSRASEDGSCAYSFSMSMLEIYLGSLRDLLAAPRQPLFRRTECKAAAW

SEQ ID NO: 1351 - protein, 36 aa, Zea mays
  VARIANT 18: note = Ancestral polymorphism is R, Derived polymorphism is I
  VARIANT 8: note = Ancestral polymorphism is R, Derived polymorphism is K
MNEFRAERHLLHHGKQQRAARKVSIPREANQEELRG

SEQ ID NO: 1352 - protein, 163 aa, Zea mays
  VARIANT 142: note = Ancestral polymorphism is T, Derived polymorphism is I
  VARIANT 130: note = Ancestral polymorphism is G, Derived polymorphism is V
  VARIANT 129: note = Ancestral polymorphism is R, Derived polymorphism is H
  VARIANT 110: note = Ancestral polymorphism is R, Derived polymorphism is C
  VARIANT 107: note = Ancestral polymorphism is V, Derived polymorphism is D
  VARIANT 89..163: note = Derived polymorphism lacks residues 89 to 163
  VARIANT 66: note = Ancestral polymorphism is I, Derived polymorphism is T
  VARIANT 59: note = Ancestral polymorphism is D, Derived polymorphism is N
  VARIANT 46: note = Ancestral polymorphism is A, Derived polymorphism is S
  VARIANT 26..163: note = Derived polymorphism lacks residues 26 to 163
  VARIANT 14: note = Ancestral polymorphism is S, Derived polymorphism is P
  VARIANT 9..163: note = Derived polymorphism lacks residues 9 to 163
MVLPNPEFQIMSLSKLEILVSCLGSKSATGWEEDHAEKVAALKVKAFLRGDSPPYSAGDLEGMTFIANMHVKVARRLHSNSLRYWLLEYLRRQPKGRKYRALILKFVKDRMGALLLVEVGMQVTTTISRGKVGDQVSVTVEIAHPRDDILSVGEVVEDTEDSE

SEQ ID NO: 1353 - protein, 369 aa, Zea mays
  VARIANT 277..369: note = Derived polymorphism lacks residues 277 to 369
  VARIANT 38: note = Ancestral polymorphism is A, Derived polymorphism is E
MSSAAVPDQSPRPVRFGILGCAAIARKLARAMLLAPGAAVAAVGSRSEVKARLFAADNGLDVATTRLHGSYDALLDDPDIDAVYMPLPTSLHVRWATAAAARGKHVLLEKPTALCAADLDTILAACDTAGVQFMDSTMWMHHPRTAKMRETVDNKDAIGDIRTINSVFSFRANEDFLQNDIRVKPGLDALGALGDAGWYCIRAILWAVDYELPKTVIALRDPVKNQAGVLLACGATLYWSDGKTATFSCSFLTNLTMDITLVGTNGTVYVTDFVIPYEEKSAEFPVASKSNFAELHVGWDPLPSKHVVATDLPQEALMVQEFARLVQNIRDAGGKPEGKWPAITRKTQLVLDAVKASIDKGSAPVEVAS

SEQ ID NO: 1354 - protein, 178 aa, Zea mays
  VARIANT 4: note = Ancestral polymorphism is W, Derived polymorphism is R
  VARIANT 7: note = Ancestral polymorphism is K, Derived polymorphism is E
MGQRRFEDERAALATVASLLLILTTAQAAAAAASGRHLSLPTQKAAAARMNDTSSSDMQVITPAPLAISTAARMGPDGCSGEDVAVYQSSANPLPSGIPAYTVRIINVCSGGCTVYDVHVSCGDFASTELVDPAKFQRVGFNDCVVKGGGALEPSETVSFQYSNSFSYHLSVASVACR

SEQ ID NO: 1355 - protein, 183 aa, Zea mays
  VARIANT 132: note = Ancestral polymorphism is R, Derived polymorphism is C
MIYTAIDTFYLTEEQLRNSPSRKDGIDEATETVLRVYGCDLIQESGILLRLPQAVMATAQVLFHRFYCKKSFVRFSAKRVAASCVWLAGKLEESPRKSKHIIFVFHRMECRRENLPIEFLDVFSKKYSELRRDLIRTERHLLKEMGFICHVEHPHKFISNYLATLEAPPELTQEAWNLANDRK

SEQ ID NO: 1356 - protein, 415 aa, Zea mays
  VARIANT 141: note = Ancestral polymorphism is G, Derived polymorphism is R
MPSPSRSPTTPPVASEWSCVRCTLLNPDHSDSCVACEASRPVEVDIDSPVVVGAALALASPKRSRRKNERSASPPPQRFGRKREHDASPEVVELCDIAGKGPATKKGNLEICLDKKTFKIMTYNVWFREDLELRSRMDALGDLIKQHCPDFICFQVDALSYELFSFPVLMVLICGTVGQEVTPYIYMLMQKSDWWQQYTCLLSHENAIQMPYYCMQLSKMPTKPSDCIPFSNSTMGRELCIASVRTGEITKLILATTHLESPCPAPPKWDQMYSKERVAQAKQSLEILGGFPNAILCGDMNWDDKGDGPFPLQDGWTDAWVELKPGEDGWTYDTKANGMLSGNRKLQKRLDRFVCKLADFKMDSIEMIGKEAIPGVSYFKEKKIRKENQRIELPVFPSDHFGLVLTITQQKDDNV

SEQ ID NO: 1357 - protein, 58 aa, Zea mays
  VARIANT 46: note = Ancestral polymorphism is R, Derived polymorphism is M
  VARIANT 43: note = Ancestral polymorphism is T, Derived polymorphism is I
  VARIANT 40..58: note = Derived polymorphism lacks residues 40 to 58
  VARIANT 25: note = Ancestral polymorphism is L, Derived polymorphism is S
MHTLIRDKDITTPDFVFYSDRLIGLVMEHGLGHLPFTEKQVITLNRYFAGGTLYLVAA

SEQ ID NO: 1358 - protein, 658 aa, Zea mays
  VARIANT 60: note = Ancestral polymorphism is P, Derived polymorphism is L
MPPRTVSDGGDDNGTDVASRTSSHRRTEHGHGYKVGVPPEKNLLAEISDAVKETFFADDPLRQYKDQPRSKKIWLGLQHIFPVLDWSRHYSLGKFKGDFIAGLTIASLCIPQDIGYSKLANLPAEVGLYSSFVPPLIYAVMGSSRDIAIGPVAVVSLLLGTLLQNEIDPKTHPLEYRRLAFTATFFAGVTQAALGFFRLGFIIEFLSHAAIVGFMAGAAITIALQQLKGFLGIANFTKKSDIVSVMKSVWGNVHHGWNWQTILIGATFLAFLLVAKYIGKRNKKLFWVSAIAPLTSVIISTFFVYITRADKHGVAIVKNIRKGINPPSASLIYFTGPYLATGFKIGIVAGMIGLTEAIAIGRTFAALKDYQIDGNKEMMALGTMNIVGSLTSCYVATGSFSRSAVNYMAGCKTAVSNVVMSIVVMLTLLLITPLFKYTPNAILSSIIISAVLGLIDYESAYLIWKVDKLDFLACMGAFFGVIFSSVEYGLLIAVAISLAKILLQVTRPRTVLLGNLPRTTIYRNVEQYPDATKVPGVLIVRVDSAIYFTNSNYVKERILRWLRDEEEQQQDQKLTKTEFLIVDLSPVIDIDTSGIHALEELAKALEKRKIQLVLTNPGPAVIQKLRSAKFTDMIGEDKIFLTVGDAVKKFAPKMVDNV

SEQ ID NO: 1359 - protein, 467 aa, Zea mays
  VARIANT 282: note = Ancestral polymorphism is T, Derived polymorphism is I
  VARIANT 410..467: note = Derived polymorphism lacks residues 410 to 467
MAPSSKLVKTNSLPSHQRSLVQPLGSPRHKRVSALFRAPESSLLQEEFVTAASGEAHHQARARRASDETLAVHAGEKLAGKKDADVGGTGTETDSTATPIVSGTTHWFKSSEDLIAFKEGRRHSFEYGRYSNPTVKVLEEKISALERAEATLVTSSGMNAITTTLLALVPPGGHIVTTTDCYSEARVFIRDRLSMMGAIRSTFVDLDDGMKSLKAVLDENDDVALFYTDSPTNPMLKCVDIRHVAELCHRKGALVCIDSTMASPINQKPLTLGADLVLHSAIKYMAGHHDAIAGCVSGSEALITRIRAWHHHLGGVISPSAAYMVIRGLKTMALRVEAHNSTALRMARMLERHPKIERVHYPGLESSPWHELARTRMSGYGGVVSFELKADLRGTMRFVDALEIPFIATSLGGCESLVQQPAVMSFWGHSEEDKAKNGIKDNLVRFSFGIEKFEDLRDDILQALNKI

SEQ ID NO: 1360 - protein, 133 aa, Zea mays
  VARIANT 94: note = Ancestral polymorphism is S, Derived polymorphism is N
  VARIANT 108: note = Ancestral polymorphism is G, Derived polymorphism is R
MGSLTVVSIKAIGVAIKLTLDGVNQAAYPYTWLFLNCLWGFSNKLPEQGIGYLFFLICQNSYLSDVAEHSDSEDTKSNGIPINPIIYIMLTETSAPILDIHLGTVNQGSTLQLKERVHKPEIMLCHLKPSSEP

SEQ ID NO: 1361 - protein, 118 aa, Zea mays
  VARIANT 14: note = Ancestral polymorphism is R, Derived polymorphism is H
  VARIANT 38: note = Ancestral polymorphism is R, Derived polymorphism is G
  VARIANT 40: note = Ancestral polymorphism is R, Derived polymorphism is S
MAHPLLSSALVCSRLLPVGNSVTRPRLCVASARPAGRRVRLLSVRCEQGAKGGGGLDVWLSRGAMLGFVGAVAVELTTGKGVLQNVGLTAPVPTLALALTGAVGVLTAFLIFQSGTRD

SEQ ID NO: 1362 - protein, 395 aa, Zea mays
  VARIANT 124: note = Ancestral polymorphism is S, Derived polymorphism is L
MAVLALRLGFVAPPHPRTSSGRFAFSPPSSRAVANAGVAAGPSRPITVDGDPPTVVSAPGRRIVAIGDAHGDLSQTRAALVLAGVLSTESEGHVWTGGRTILVQVGDILDRGEDEIAILSLLSSLNMQAKSQGGAVFQVRLVNHSATARDFRYCDPGGFDECMRFLDYLDECDGNWDNAFLNWVNVCERRKKEYVALPNGDWGPWNFVKKQKGFAARSSLLKRGGPLAHELARHPVVLKINDWIFCHGGLLPHHVEYGIERMNREVSMWMKCSGEDSGDETDIPFIATRGYDSVVWSRMYSQDPAERTRRALMLSSIAAEQTLEAVGAKGMVVGHTPQTHGVTCKCDGKVWCVDVGMSCGVLCSRPEVLEIVNDRPRVLKERRELYDEMEVLDYL

SEQ ID NO: 1363 - protein, 386 aa, Zea mays
  VARIANT 282: note = Ancestral polymorphism is R, Derived polymorphism is L
MAPFPRRLPAAVPLLLLLGAAVASAGAEDTDGGNSRRRHSRLLFAFGNSLTDTGNGAIFPVTAGGPFTRPPYGETFFGRPSGRACNGRLVLDFLVEELKVPEPTPYLAGSTAADFAKNGANFALGGATALDQAFLASKGIKSFVPISLINETSWFQNVSKLLDASHYDERKIMAKSIFYVGEIGVNDYFAALSNNDSVDVAVSLVPHIIDTIRSALTVMIDAGARTVVITGMLPIGCEPQQLAQFAGGPAGDYDPTTGCITRFNQLAEHHNHMLRMMLRELRTKYRRRRPLTLHYADIYRPVIEAVASPASYGFGDTPLAACCGGGGGPNNFNFIAFCGTPASTTCTDPSKFVSWDGIHFTEATNRLLARKMLQELLSRGAYNVAI

SEQ ID NO: 1364 - protein, 416 aa, Zea mays
  VARIANT 268: note = Ancestral polymorphism is D, Derived polymorphism is Y
  VARIANT 290: note = Ancestral polymorphism is A, Derived polymorphism is E
  VARIANT 359..416: note = Derived polymorphism lacks residues 359 to 416
  VARIANT 376: note = Ancestral polymorphism is P, Derived polymorphism is S
  VARIANT 381: note = Ancestral polymorphism is S, Derived polymorphism is I
MPDVQPLVSDFVLKLKRRKVEGSHAVARQTAELLRSVVSQHRMGSSANQAAALADAVRAVGEQLISANPIELAVGNIVRRVLHIIKEEDISSTAVGIEGLSVTVDSDDEYDSEHDDRPALSAAVLAAHARNALRAPSLQTLLEDIPVSPAISGTASSTGDSDGKSKSAGDKSSTRKLKHDVIAAIGDLIDEIDSCYEPISEQAVELIHQNEVILTLGRSRTVKEFLYAAKEKKRSFRVFVAEGAPRYQGHVLAKELVEKGVQTTVITDSAVFAMISRVNMVIIGAHAIMANGGVIAPVGMNMVALAAQRHAVPFVVVAGSHKLCPLYPHNPQVLLNELKSPSDLLDFGEFSDCMNFSTQDGSPLLNVANPTFDYVPPKLVSLFITDTGGHSPSYMYRLIAEYYSADDLVVRRKATS

SEQ ID NO: 1365 - protein, 241 aa, Zea mays
  VARIANT 94: note = Ancestral polymorphism is A, Derived polymorphism is T
MKFGKRLKKQVEESLPDWRDKFLAYKRLKRLVRLVPASSPSRRGGRAADAAFLRLLHAEVDRFNAFFLEREEDFVIRHRARARPDELKETAEDARKAIVDLHGEMVLLLNYSAINYTGLAKILKKYDKRTGRLLRLPFIGKVLRQPFFATELISRLVRDCEATMEAVFEASTGHARSSAGTAPVASARQGIFRNTVAALVTMGELRSGSSTYGHFSLPPMAPPESDLLRRVCVQVAGQVSI

SEQ ID NO: 1366 - protein, 83 aa, Zea mays
  VARIANT 11: note = Ancestral polymorphism is A, Derived polymorphism is V
  VARIANT 23: note = Ancestral polymorphism is D, Derived polymorphism is N
  VARIANT 38..83: note = Derived polymorphism lacks residues 38 to 83
  VARIANT 41: note = Ancestral polymorphism is R, Derived polymorphism is C
MQCGALLTRAAVARLYLVVLNVDTHRCWAPDYYTNYAQFRRISLTGECSAGSRFDLALDDIAEGKVTVQEAINPFSEWVIGAD

SEQ ID NO: 1367 - protein, 1029 aa, Zea mays
  VARIANT 875..1029: note = Derived polymorphism lacks residues 875 to 1029
MDSKRLSLSSVHGDFLGQTSQSHSCSEKYEWRNLIFHQSDKATRDQCDHVATRHLPLHMPRRLGPSPGHGHSSEIYGPGDGVGGCHLSCCSYGGHRGKYHACHNHSSEWARHNISPEPGPIRSYWITKRTSSDHVSHCAKGSDRQIRPAGGYRKNYSANQGSGSQNRPYHDDRYLPTKFLDDRFPEIDAAKHQSYLCDFQSSSKHIPVHPSHGQSCQRDEVAKAHPKRPVNRFRPIHHKQLERCPNEDFHDCFDSSQKFRNAYNDKVVKRKFIKQDFLGNTYNGACVGKYDRNSCRKRNADHFGGEKTRKNDANKDRSKRLRCPLEQDQRQQVECNEMRNDSREGNVEMTRLVCQDGAKRNFNQKKNATAPASSDSTKCDGKNILSPKCSKTIASSHTPNLSEGSDDMDPKSDNYVDGCTERGILQHIPVTHTERNIQLKISDNFTQSEAFRRDCLILWRERQLRKDSAAKADNIVKTDQQQTAQRSKMSTGRRVGSGGSAASSCSKSDNKDDSAPECSDQFSGATSSDKLQKFGEGRANKKLEQTIKFPSNSKCNKRPQDATAEKVLKCSLKLLSEADPLEIAQPKGKEKLVDRRQVSTEHQDAKTHSSLNGCSDTCKVDQAAISHCHNSAHQNIFQQEKNSAVSDARREEKPGVKCEKKAAGHGAKLAEQSTGLYSDPISLDKETVVSCSKHGTSKVNALKVPDHEIESTSLDGSMLPRGTVVDMCLRKSINRSSESYCIDFKDCLDGNDCRDSQQETTHDNVLRKKQECSLLPETKDELNGKARKEDCEPQARRVEIESNQRITTEDCASDTILSGSAKQDDRIRCSSIPDLNCLPSMSSDEDFMAPPEEPVCQVSVDSFKPQSISKSLSASLTGHTPKRELFKQVEGKQCDRAEETNQIAREVCKDGTSEAATQLQISESNTGPPQLRTAEESSTPMNALKSALYEFVKGCVRPLWEDGLLSREVHKFVVKKAVDKVLDVWAHSTEINVPRILSDEAEGIRTLVKDYLKIYVGSEALRKSIPTSS

SEQ ID NO: 1368 - protein, 282 aa, Zea mays
  VARIANT 182..282: note = Derived polymorphism lacks residues 182 to 282
  VARIANT 137..282: note = Derived polymorphism lacks residues 137 to 282
  VARIANT 92..282: note = Derived polymorphism lacks residues 92 to 282
  VARIANT 90: note = Ancestral polymorphism is D, Derived polymorphism is G
  VARIANT 80..282: note = Derived polymorphism lacks residues 80 to 282
  VARIANT 72..282: note = Derived polymorphism lacks residues 72 to 282
  VARIANT 68: note = Ancestral polymorphism is L, Derived polymorphism is R
  VARIANT 65..282: note = Derived polymorphism lacks residues 65 to 282
  VARIANT 63: note = Ancestral polymorphism is Q, Derived polymorphism is R
  VARIANT 53..282: note = Derived polymorphism lacks residues 53 to 282
  VARIANT 38: note = Ancestral polymorphism is G, Derived polymorphism is R
  VARIANT 27: note = Ancestral polymorphism is T, Derived polymorphism is I
  VARIANT 16: note = Ancestral polymorphism is G, Derived polymorphism is D
  VARIANT 14: note = Ancestral polymorphism is E, Derived polymorphism is D
  VARIANT 13: note = Ancestral polymorphism is K, Derived polymorphism is E
  VARIANT 12: note = Ancestral polymorphism is K, Derived polymorphism is N
  VARIANT 10: note = Ancestral polymorphism is N, Derived polymorphism is H
  VARIANT 8: note = Ancestral polymorphism is V, Derived polymorphism is I
  VARIANT 7: note = Ancestral polymorphism is A, Derived polymorphism is T
  VARIANT 5: note = Ancestral polymorphism is T, Derived polymorphism is R
MDGVTQAVENLKKEWGQAVSQLDENITAIKSCGKTGKGTEEANSLPRLNGSAQDALQLLKSLQFQLDLLAQQLPTFDEVQSGQATLKSWDEQYKKLRISLRNANLEAKDNIRQAAEEERALLLGGGEESTIRRRNLQTKAGMTSAAESITESLRRSRQMMVQEVERSASTLATFDESTSVLQKAEGEYQGHRSLLMRTRGLLSTMQRQDVFDRIILTIGFTIFSLAVLYVVSRRIGLLALQRKLADAIRSGSLSAEDIVAKAQHGPAPANVPAPAPRVYNEL

SEQ ID NO: 1369 - protein, 198 aa, Zea mays
  VARIANT 11: note = Ancestral polymorphism is L, Derived polymorphism is V
MSKSPRTLQEVMAAVDARHAVDGRTDSASSDSSKLLGPRRRSTRYYGRGARKSAPPVAVAMVEASSDASFEFSAAASYSSASPASMVFSDGQLCAHQFPAVRSSASTGSSQSQATSQARSPSAGSCSTKRQQAGVTGSMKRVSFAMDGEDKAAAAVQAAGGRQGKKSGGLLGCMGSTCAPSRNQAVEPVVFCDVSLLV

SEQ ID NO: 1370 - protein, 84 aa, Zea mays
  VARIANT 53: note = Ancestral polymorphism is A, Derived polymorphism is V
  VARIANT 7..84: note = Derived polymorphism lacks residues 7 to 84
MGSKPGEAPTWADQWASGEGDGSIANGKAAGKRTVAGNVKAAASEGLVKAKAAALVGAHKLKTGTSSGIKWVREQYQKKRTSSK

SEQ ID NO: 1371 - protein, 705 aa, Zea mays
  VARIANT 61: note = Ancestral polymorphism is Q, Derived polymorphism is R
MPTVPQDSPSSRQNQETLLKPRELQLPSFPKHFIQAPAMEASAAVESSAAVSVFEVVSSKQRRPPDTAKLVLNSPSPPSLREELVGVVGKAFRPRAHAGAAAGAGGRPPPRRAWVLTALQCVFPVLQWGRSYTLESFRSDVMAGLTLASLGIPQSIGYANLAKLDPQYGLYTSVVPPLIYAVMGTSREIAIGPVAVVSLLLSSMIQKVVDPAADPATYRSLVFTVTFLAGVFQVSFGLFRLGFLVDFLSHAAIVGFMGGAAIVIGMQQLKGLLGLAHFTNSTDVVSVLKAVCSALRHDPWHPGNFLIGCSFLIFILTTRFIGRRYKKLFWLSAISPLLSVILSTAAVYATRADRHGVKIIQKVHAGLNPSSVKQIHLNGPHTTECAKIAVICAVIALTEAIAVGRSFASVRGYRLDGNKEMLAMGFSNVAGSLSSCYVATGSFSRTAVNFSAGARSTVSNIVMSITVFVTLELFMKLLYYTPMAVLASIILSALPGLIDIKEACSIWKIDKMDFLTCLGAFVGVLFGSVEIGLAVALGISFAKIIIQSLRPQVEILGRLQGTDIFCSVRQYPVACLTPTVLPIRVDTSFLCFINATSVKERITEWVWEGVETSNGKARERIQAVVLDMSSVVNIDTSGLTALEEIHKELVSLGLQMAIASPGWKAVQKMKVSQVVDRVGQDWIFMTVGEAVEACLAAHKGTALAC

SEQ ID NO: 1372 - protein, 317 aa, Zea mays
  VARIANT 40: note = Ancestral polymorphism is G, Derived polymorphism is R
  VARIANT 137..317: note = Derived polymorphism lacks residues 137 to 317
  VARIANT 233..317: note = Derived polymorphism lacks residues 233 to 317
MGEKPVTMISDEEAKEPTTLNEEEDMEAALVEPPDWLPDGWIMEVYRAEDGTIIRQYYTSPISNYTFTMKSEVLEYLFSGTDERMLESKERGAENTLQRQHEWLPKGWVMEVRAGGEKADKMYKFYVHSITGLRLLSKQDVLLYINEAKVSGCDTNEQCDTTSEDNILSKVDFRPSGLPEGWVKELVYRKTKEGLIRRDPYYTDPASSYTFRTLKSALSFLETGKVSERAFIQRTSVHDLYSFEISTDMHESLRNRLGINEKPYQEPTKSSRSRRAPKIDQEQNIDHCKFPTFVVIIINLVQFCAHLLDFFIVLFMF

SEQ ID NO: 1373 - protein, 458 aa, Zea mays
  VARIANT 340..458: note = Derived polymorphism lacks residues 340 to 458
MPANMISKILEKSSVLPLVDDVIAPIHVKTAGGAPRTSVLRNPNMEKLQKGYLFPEISIKREAHLKKYPDAKVISLGIGDTTEPIPSVVTSAMAEYVLALSTPEGYQGYGPEQGQMNLRKVIAEEVYPDMGIQESEVFISDGAQCDIARLQTLFGPNVTIAVQDPTFPGYVDNGVIVGQTGSADEAGKYAGIAYMRCAPENHFFPDLSRVPRTDVIFFCSPNNPTGHAASAAQLRELVDFARRNGSIIVFDTAYAWYVSSSSEAAGDGDKTKPRSIYEVPGAREVAIEISSFSKFAGFTGVRLGWAVVPDELRYADGSPVARDFDRIVCTCFNGASSVAQAGGLACLSTEEGRDAVRRVVGVYKENARVLVDTFASLGKEVYGGTDSPYVWVRFPGRRSWDVFAEILDKTHVITVPGSGFGPGGEGFIRVSAFNSRDRVLEAAARLKKFLPGLSAVPL

SEQ ID NO: 1374 - protein, 424 aa, Zea mays
  VARIANT 160: note = Ancestral polymorphism is N, Derived polymorphism is D
  VARIANT 63: note = Ancestral polymorphism is S, Derived polymorphism is F
MITTHLSPALKHRSPSPLHSTYHSHHHLPVHLPLPLPRRHCHLAKPAAAASPDLLASIESVASAASVLAAIVLVHESGHFLAAASRGIHVSQFSIGFGPALARFRLGAVECTLRAIPLGGYVGFPDDDPESGFAPDDPDLLRNRPVPDRLLVVSAGVAANLAFAFLVVYAQALTVGVPVQARLPGVLVPEVLPGSAAARAGLLPGDVILAAPGAAPDPSVPVLVDLMKASPGRKVPLTVFRAAPGKLEPDPRPVELTVVPDTSADGTGRIGVQLSPNVRVTRVRPENLADATVLAAREFALLTVTVFDGLRQTLLNFSQSADKVSGPVAIIAVGAEVARSSADGLFQFAAVINLNLAAINLLPLPALDGGTLALILLEAARGGRKIPREVEQGIMSSGILVVLMVGMFLIVRDTLNLDFIKEML

SEQ ID NO: 1375 - protein, 131 aa, Zea mays
  VARIANT 3: note = Ancestral polymorphism is E, Derived polymorphism is G
  VARIANT 8: note = Ancestral polymorphism is N, Derived polymorphism is S
  VARIANT 15: note = Ancestral polymorphism is L, Derived polymorphism is R
  VARIANT 19..131: note = Derived polymorphism lacks residues 19 to 131
MAELQKKNEDGITTLFYLQKIYPGRRERENQLEERRVRKLILFYQWRHGDWRTEGRSTGLQRGGKARSSRRQQEDVIDGDLCEQYPSLLADMQRKIANELDRTPTPAALLGEDCQGGRLEQARAALISDRA

SEQ ID NO: 1376 - protein, 377 aa, Zea mays
  VARIANT 215: note = Ancestral polymorphism is T, Derived polymorphism is M
MAAAAATVVTPSSPRSMAVAAAIIAFFFAVTAAAASPVPAIYVLGDSLADVGNNNHLVTLLKADFPHNGIDYPGQKATGRFSNGKNSVDFLAENLGLATSPPYLALSSSSNPNYANGVNFASGGAGVSNLTNKDQCISFDKQIDYFATVYASLVQSLGQAQATAHLAKSLFAITIGSNDIIHYAKSNSAANTKQASASGAAADPSQQFVDALIHMLTGQLQRLYALGARKVLFLGTGPVGCCPSLRELSPAKDCSAEANGISVRYNAAAASLLGAMAARYADMHYALFDSSAALLQYIDHPAAHGFTEAKAACCGLGDMNAKIGCTPLSFYCDNRTSHVFWDFYHPTETTARMLTSTAFDGSAPLIFPMNIRQLSAI

SEQ ID NO: 1377 - protein, 371 aa, Zea mays
  VARIANT 329: note = Ancestral polymorphism is V, Derived polymorphism is L
  VARIANT 322: note = Ancestral polymorphism is H, Derived polymorphism is R
  VARIANT 54: note = Ancestral polymorphism is G, Derived polymorphism is S
MSSRAGGGKPLWSASTIVAKVASGYHILRIDGYSRTMETPTGESIASLPFSVGGRCWRIRYYPNGDKLENKEYISLYLNLHDRSVEAEKAQLMFRFVGDVAEQPLILGRLHTFEKQGWGYAKFIKRKDLEESKHLVDDSFSIRCDVAVRFNDVRVEKAPEAAAAAAMISVQPSDLHQHLGSLLLTQKGADVVFDVAGETFAAHRCVLAARSPVFTAELFGAMKEGHTGGVVRIEDMEPRAFKALLYFLYTDLLFPKTMATTMNQSEDGDVGGDDEDVLCQHLLVAADKYNLERLKSLCEKKLSECIHVGTVAIILTLAEQHRCPGLKKVCLHFLRSPANLRAVASSDAFKHLSSSCPSVMVELVAMLGNSA

SEQ ID NO: 1378 - protein, 92 aa, Zea mays
  VARIANT 4: note = Ancestral polymorphism is T, Derived polymorphism is M
  VARIANT 8: note = Ancestral polymorphism is V, Derived polymorphism is F
  VARIANT 22: note = Ancestral polymorphism is R, Derived polymorphism is C
MTMTSRFVAAASSSSSSCPLARLISRRGLAGAADGHGPAKVPLWKDPLSPSKWKEEHFVLASLSMWGALFYGGFKFFGGKKEDKIEAASGQT

SEQ ID NO: 1379 - protein, 324 aa, Zea mays
  VARIANT 178: note = Ancestral polymorphism is I, Derived polymorphism is N
  VARIANT 162: note = Ancestral polymorphism is P, Derived polymorphism is L
  VARIANT 103..324: note = Derived polymorphism lacks residues 103 to 324
MAGRSRYDNPFEEGGADEVNPFADQAKRGGSTAQSGYSGGAFYTTQSQRPAPPSTRLSPLPPEPADFYNDFATPVDIPMDTNKDMKTREKELLAKEAELNRREKEIKRREDAAARAGIVLEEKNWPPFFPIIHNDIGNEIPVHLQRTLYVAFASLLGIDVYPDIRLVGLVLCLFWNIICITAAWAKGSGPKIWFLAIIYFILGCPGAYYLWYRPLYRAMRNESALKFGWFFLFYLIHIAFCAYAAVSPSILFVGKSLTGILPAISLIGDSVIVGIFYFIGFALFCLEALLSVWVIQRVYLYFRGSGKEAEMRREAARGAARAAF

SEQ ID NO: 1380 - protein, 353 aa, Zea mays
  VARIANT 189: note = Ancestral polymorphism is D, Derived polymorphism is Y
MAAAAVATVASPSPAASRRMLPSAAPSFLRLPRPTSRLRRATQVAAAGGEADVLPGPGAEGEAAVPGRLEEQRDEPLAGSQLDIGGLAFQGDVGGGFTGGGAGSGASGGGGDGNKMLDRGINTAIVLAASTYALTKLLTVDQDYWHGWTIFEILRYMPEHNWSAYEEALKANPVLAKMMISGVVYSLGDWIAQCYEGKPIFDFDRARMFRSGLVGFTLHGSLSHYYYHICEALFPFKDWWVVPAKVAFDQTVWSAIWNSIYFVVLGFLRLESPTTIYSELKSTFWPMLTAGWKLWPFAHLITYGVVPVEQRLLWVDCVELVWVTILSTYSNEKSEARNSDSTSTPDASKDNSR

SEQ ID NO: 1381 - protein, 289 aa, Zea mays
  VARIANT 103: note = Ancestral polymorphism is L, Derived polymorphism is Q
MGDHEGHGVDFEKKADQKLSGWGLFGNKYEEAADLLDRAGSFFKLAKNWSRAAAVYKKIADCHLQGDNKHDAASAYVEAANCYKKFSLQDAAQALNSAVNLFQEISRLNMAARYSKDIGEIYLQEQDLENAAVYLNRAADLFDSEGQSSQANSMTQKIAEIYAQLEKYQKATELFEEIARKSINNNLLKYGVRGTLLNAGICQLCRGDVVAINNSLERYQDIDPTFSGTREYKLLADLAASTDEGDVGKFTDAVKEFDSMTRLDPWKTTLLLKAKNELKKKEEDEDDLT

SEQ ID NO: 1382 - protein, 267 aa, Zea mays
  VARIANT 171: note = Ancestral polymorphism is P, Derived polymorphism is A
  VARIANT 177: note = Ancestral polymorphism is R, Derived polymorphism is K
MATLSSCSRLSSGTGAAAIHRQPARAGAVLVVTCRRSSSATVRAAAAATAAAPAAVELQNKGVSLPTWAEFELGRAPVYWKTSSGLPPSPGEGLTLFYNPAATKMAPNEVFGVAFNGGFNQPIMCGGEPRQMTLQERGKADPPIYTIRIRVPQHAVSLIFSFTNGAEWDGPYTLKFRVPKPWQNKPLSFFNEGLADELNREGACDLAIYPDENIAITSCAMDGYLEEGGDRCKLDIVSGCTDPSSDMFDPLATVDDGSCPLESDSEE

SEQ ID NO: 1383 - protein, 85 aa, Zea mays
  VARIANT 18: note = Ancestral polymorphism is C, Derived polymorphism is R
MAAAAPGPGPSPHQRPLRCFLLLVLLVSSPHYSSGARTSPDLAGGTLQYGARKLISIDNPVTPPPPAPVSGPPIGPGFVRPPQEV

SEQ ID NO: 1384 - protein, 449 aa, Zea mays
  VARIANT 249..449: note = Derived polymorphism lacks residues 249 to 449
  VARIANT 137..449: note = Derived polymorphism lacks residues 137 to 449
  VARIANT 64..449: note = Derived polymorphism lacks residues 64 to 449
MPARALASAALATLRPPPRCPRPPSAARSPPFPQTLSCTSCLRLHSRCSCPPHRRDNRLRIRRQIPALPPNPAPIVSADPAFARVSLPRRGPTAMVEEHGGRGEAGTSGGGGEARHPQHAHGARIPQGGVPQEEEGRCRAAARATTEGDVEYDDDDSMRPTAEPAKEEDIEGAVCSAPCRRAVRNTTPSPSRDMVDARASTGGEDPTAVDVVVTQLALHRLRPPLDFLASPIALLEDCKYSEHHRCQNQRSDVKGNCCRGLGSRTGGRARGCGPPSTCPSRRRSCRSKQSRGEQSRAAQIETSSRPSRAPHLHLGHPLARVEDELLLCLRQLCAPCSAACLPRPQGGCVGVASDNAKAPSRPSRALCLHQVAHPSKWRTSSSSTASRPSSSPRTHPQPRSIARSEPARHELHRGTDPISAPGRGLNLKHGKATSPLGPIRNWQGIPTQI

SEQ ID NO: 1385 - protein, 311 aa, Zea mays
  VARIANT 289: note = Ancestral polymorphism is S, Derived polymorphism is L
MSEEQFLAVAVEAAKSAGEVLLCTPCLLTLFSCRLLTGCWFPEQIIRKGFYQTKNVEHKGQVDLVTETDKACEDLIFNHLRKHFPDHKFIGEEESAALGATADLTDDPTWIVDPLDGTTNFVHGFPFVCVSVGLTIGKIPTVGVVFNPIMNELFTAVRGKGAFLNGSPIKASSQDELVKALLVTEDLLRKSAGDTKLIIILIDQAGTNRDKTTVDDTTNRINRLLYKIRSIRMCGSLALNMCGVACGRLDLCYEIGFGGPWDVAAGAVILQEAGGLVFDPSGGEFDLMSRRMAGSNSLLKDKFVKELGDTN

SEQ ID NO: 1386 - protein, 314 aa, Zea mays
  VARIANT 105: note = Ancestral polymorphism is R, Derived polymorphism is S
  VARIANT 110: note = Ancestral polymorphism is G, Derived polymorphism is D
  VARIANT 124: note = Ancestral polymorphism is P, Derived polymorphism is L
  VARIANT 145..314: note = Derived polymorphism lacks residues 145 to 314
MSMEAAVGAEFGPHLHPALGFRHSQRRVFFCCWRLHPPRPASLGLCGGGGARPRGAIPVADGDQRRRLRELEAEAEAEAGSILGPPRSSPREVREEMARCFDLVRRLGRGAVYLGSSRVPPTHPHFLQTTELAREIARLLGCTTWTGAGPGLMDAAIQGAFEADKPVGGLKIAKEAGEWTSSGFHPYLPPETYLTCRFFSARKHGLVDAAVRSSSTDRTAVVALPGGVGTLDELFEILALIQLERIGSALPVPVLLLNYDSYYSKLLEFLNDCQEWGTVAPGEVASLWKVCDGNHEALEYLAEFYGVPHNEREY

SEQ ID NO: 1387 - protein, 1081 aa, Zea mays
  VARIANT 793..1081: note = Derived polymorphism lacks residues 793 to 1081
MEMVRRNLKRQASRSLSAFAGAASPHAVDQENLHPNLASTPPASPAKGTSSPRPKHPAAAAAAAAQPAATAEEDHSTAPTTAPADDERFVKVVVRVRPTVSRPVNGKDLWFVRKTAPDSVAVGDRSFPVDGVLDDRASQADAFDLVGLPMIENAMAGFNTSLVCYGQSGTGKTYTMWGPLGAMVDSGSDHADRGVVPRVFQNLFSRIQRMGESSPEKQTSYQCRCSFLEVHNEQINDLLEPSQRDLQIRENASNGIHVENLTDEYVSTADDISQILMKGLSNRKVGTTSMNLKSSRSHVIFTCVIEAWSKGSSNGFSSSRTSRITFVDLAGPDTDELGAAKHSTKEERHLKKSLSRLGKLVNVLSETPESHKVDLPYEQSRLTHVLKDTLGGNSRVIFLCSISSEHRCRSGTLSTLRFGERAKLMPNKPVINEISEDDVNGLSDQIRQLKDELIRTKSGDTTTCKARYFSAQSARESLHTLRVSLNRSLIFPHIEVDSEEEMDVDEEDVQELRDQISKIHSSSEDTLDDFMDAESGDESTPCSVGRSEDDQVIIDDFEGPQQEEQKEVSNNTNANEDLGSDRKSNLSIIASTRLSPIQDPTLCSSPKIHNKARMSITSLGLSPSKIRISDSPGDRNVEMCTNSAFRSSLQSSKLSPTDSLAASLQRGLHIIEYHQQNPAPRKSFIGLSFDHFARQSVAKISSAVQALPEDQGNNLCSFCKKPMNTNDNQTENVNLDKQIKDGNITKEIASKRETELEALCEEQRAKIQELSSLIDQYKNRSEELTSEGKVSVSLSVNEREVLLAEIQSLREQLKNQTTVSTTGSLLDQLRNGSTDQEYELDKERQKWMESESKWISLTEELRVDLESNRMHAEKTEMELCNEKKCTAELDDALQRAMYGHARMVEHYVELQELYNDLLEKHRRVMEAISEVKRAAARAGRKGCGTAFAAALAAELSTVRIDREKERAQLKEQNRRLRIQLRDTAEAVHAAGELLVRLRETEEASTLEKERTAALLQENEKLKKQLEKLRKKHEMELETMKVHLAESRLPESALGAFYHHENERTPDDDLSWRAAFASAYSD

SEQ ID NO: 1388 - protein, 130 aa, Zea mays
  VARIANT 2: note = Ancestral polymorphism is N, Derived polymorphism is I
  VARIANT 6: note = Ancestral polymorphism is E, Derived polymorphism is K
  VARIANT 7: note = Ancestral polymorphism is R, Derived polymorphism is H
  VARIANT 14: note = Ancestral polymorphism is G, Derived polymorphism is S
  VARIANT 25: note = Ancestral polymorphism is D, Derived polymorphism is N
  VARIANT 28..130: note = Derived polymorphism lacks residues 28 to 130
  VARIANT 35: note = Ancestral polymorphism is S, Derived polymorphism is F
  VARIANT 39: note = Ancestral polymorphism is T, Derived polymorphism is I
  VARIANT 56: note = Ancestral polymorphism is N, Derived polymorphism is Y
  VARIANT 57: note = Ancestral polymorphism is D, Derived polymorphism is N
  VARIANT 64: note = Ancestral polymorphism is C, Derived polymorphism is F
  VARIANT 92: note = Ancestral polymorphism is A, Derived polymorphism is V
  VARIANT 94: note = Ancestral polymorphism is L, Derived polymorphism is P
  VARIANT 114: note = Ancestral polymorphism is P, Derived polymorphism is L
  VARIANT 120: note = Ancestral polymorphism is A, Derived polymorphism is V
  VARIANT 122: note = Ancestral polymorphism is G, Derived polymorphism is R
MNMDIERVLKEKFGDAFKEIHRVFDGDQLAAETTSEVCTSFLAFKDNIPFWPKKDNDLQHQSPCSQPHHASGSGLGTASTLSDLAPQVEVLAELSLRLRLVQDRYINFDKDVPPVRIIVADGEEDVTIKV

SEQ ID NO: 1389 - protein, 113 aa, Zea mays
  VARIANT 109: note = Ancestral polymorphism is T, Derived polymorphism is M
  VARIANT 88: note = Ancestral polymorphism is P, Derived polymorphism is H
  VARIANT 86: note = Ancestral polymorphism is K, Derived polymorphism is N
  VARIANT 84: note = Ancestral polymorphism is T, Derived polymorphism is I
  VARIANT 51: note = Ancestral polymorphism is A, Derived polymorphism is T
  VARIANT 46: note = Ancestral polymorphism is D, Derived polymorphism is G
  VARIANT 36: note = Ancestral polymorphism is S, Derived polymorphism is I
  VARIANT 30: note = Ancestral polymorphism is T, Derived polymorphism is M
  VARIANT 29: note = Ancestral polymorphism is W, Derived polymorphism is R
MNITVFASKIEGEVFLKSNRPSLVSSTSRTPDEDFSILLEAVLMYDRRVAAALGEDDSTDEEQLWIDIKNAKQFVYPRLLFIVTGKGPDRKKYEDQIKRLKLRRVALRTMWLA

SEQ ID NO: 1390 - protein, 297 aa, Zea mays
  VARIANT 224: note = Ancestral polymorphism is S, Derived polymorphism is L
  VARIANT 222..297: note = Derived polymorphism lacks residues 222 to 297
MTFTEKMVLAVFRDLTILWMTKSLMDDIHGWGVLFDGRVGDRTITVYIWNGEEPKPNKGHLAWADAFVITGDSISMLSEACSTSLILKNVASLFMNKDSLKVEADTKLGELIKSVSGAAHGGCQVSSKGQKCRPCGRAAWARGEVQATAVRACKEPGRQQPCESWITGINLLTVLHLIEVRTKSCGSGLVLGPHCQDSRISSCKVLDVMPCHNMTEWEELDQMSEAGGDINSRILPLKDIENQDLLMSETNSACEAHEDTEDQPSEKDAPVAWEEDENNVGWMPLLAAAHTENISRI

SEQ ID NO: 1391 - protein, 356 aa, Zea mays
  VARIANT 284: note = Ancestral polymorphism is A, Derived polymorphism is S
MSPLPPSSDTAVALSPSSMLTSILLPTSTATPPLPPRLLPRPRHVLLGRNDRSPTVVPAGKPKLVGEKSKGAQRLAYLARRGPMEIQHHRGWATPRWRRCRARRRGIYSPIKRAMKAGPESERCLDDWSSHSSSAGNPDIPYVVVSKSSIVTVVCKEILGYYRKLLGIPDLLNQPNMSILKQLLQTLQPTENFDDVLFEFQSSLGPCNVDYLYYGACKMLEDIMDSVSSFSYLLSSDVLITIQSIVNSVVVLLDKSGEPNGENIHMGCSKAIISFLRKRLGYSAHKLLSADFPSEDVGKDGRVKNSDSTSYLLAEIGRELPKVGHLFFSSDALELCICHHSALKRTSGIILNPAEE

SEQ ID NO: 1392 - protein, 864 aa, Zea mays
  VARIANT 272..864: note = Derived polymorphism lacks residues 272 to 864
  VARIANT 282..864: note = Derived polymorphism lacks residues 282 to 864
MRAFNGRRLHDPKPPSFLPLPLAPRTTTPPPPPPSSPPHAIPPLNFRYLTPCPRWSAWVATALSDPVFAPILASSAISGAVAASTAVVSPDRAALSALLSLWDPDTHAFRLPAGPATFTLEDALVLAGLPPAGAPLDRTLTPEEDDLRVRLVVEREKIKELHPCARAARRVSAEVWLEWFDGGGIRPGEDDELRWLGFLAYWLAFFVTPRLRSRGGELPERVFAHAARLSLGERIALGQGMVANLYAEMDKIVTCTVADGVCGRLDVCVPVWMLQVWMWERYKRLCPPELKAPQFPVSNVRVLYWSRRKKKSTSEEALKILLDEVCFEWRPYRHNSLNWMEPKWFNKDTILVTCHGKDKPEWLLDYIAVISQTMLTGFHSDDTDNSVLYNPQLVARQFGYDQAAPVSIVREIHFEGIELWIPSIGRYGMPGEDYVAWCSSSGQFYKHQNDVQYGCSVLRNHENGAISSQLNVNEKCVVVPTLDQFITQVTRRDHINYIVEGQPEKMDNGSHEDETEVIVCGLEACVKDSRTTSVKQNVQKQRDKFAEDGGDSKKKRKVESNTKRSSLQLEGQKYSSLQKALNSDSKKCEELAQVDSDDECIVLEQPKNKCEVINLDDDEEQSVSNREHHNMQLVLELEEFVRSGLLSQWEESSDEDDVSGSKQETQKKSNNDPYAEAAMREYPLFFEFIPQKPHYRGFVNYDETLGDLPYSGLWFLLIGLAKEVLKTSCDTDASEIAYLMKKAQHLEQLGFNVTHLIARLKEPQIRLKKLQDSRARLDHAREKEEGNVVESLSSHLNKLKGNIRMMDSHLDGTKQAFISNIQDKLNEGINLASLEKEVETAEKCCQAMKDEVAAMRMRYSDRGI

SEQ ID NO: 1393 - protein, 408 aa, Zea mays
  VARIANT 23: note = Ancestral polymorphism is G, Derived polymorphism is W
  VARIANT 42: note = Ancestral polymorphism is D, Derived polymorphism is E
  VARIANT 212: note = Ancestral polymorphism is P, Derived polymorphism is L
MWQTRSLLLLIVAVVVAAALPDWAVAAAAGRCTTSTPVKTYDKCIALPTQGATLAWTYDARNATLDAAFTGSFISPSGWVAWGVNADAPAMTGARVLAAFADPSTGALLALPFLLSPDVKLQASPLVSRPLDIPLLASSASLASPARTVRDGARVTVAATIRLSPNRTRVHFVWNRGLYVQGYSPTIHPTDASDLASHATVDILTTATEASPIASAALQWLHGSLNALSWGLLLPVGAAVARYLRPCASTGPAWFYAHAAMQATGYTLGAAGFALGLVMGSASPGVTYKLHRGLGIAAATAGSLQTLAMFFRPKTTNRYRKYWKSYHHLVGYGCVVVGVVNVFQGFEVMGLGASYWKLGYCLALATLMGACVALEVNAWVVFCRRQQEEKLMRREVEDVVVKDRAAAF

SEQ ID NO: 1394 - protein, 100 aa, Zea mays
  VARIANT 47: note = Ancestral polymorphism is L, Derived polymorphism is R
  VARIANT 53: note = Ancestral polymorphism is S, Derived polymorphism is L
  VARIANT 66: note = Ancestral polymorphism is S, Derived polymorphism is F
  VARIANT 68: note = Ancestral polymorphism is A, Derived polymorphism is D
  VARIANT 71..100: note = Derived polymorphism lacks residues 71 to 100
  VARIANT 79: note = Ancestral polymorphism is L, Derived polymorphism is F
  VARIANT 80: note = Ancestral polymorphism is C, Derived polymorphism is Y
  VARIANT 83..100: note = Derived polymorphism lacks residues 83 to 100
  VARIANT 97: note = Ancestral polymorphism is T, Derived polymorphism is N
MPVPAPPTLRARCAFPRSTHLHSHSHRGDPLFVGVSIHVKTFFAITLYGTANSHFTSVVRKASANSNALFLTAGAQNLLCLKLGEEIGVNIGNPWITWFE

SEQ ID NO: 1395 - protein, 159 aa, Zea mays
  VARIANT 2: note = Ancestral polymorphism is A, Derived polymorphism is V
  VARIANT 8..159: note = Derived polymorphism lacks residues 8 to 159
  VARIANT 13: note = Ancestral polymorphism is A, Derived polymorphism is V
  VARIANT 16: note = Ancestral polymorphism is M, Derived polymorphism is I
  VARIANT 29..159: note = Derived polymorphism lacks residues 29 to 159
  VARIANT 36..159: note = Derived polymorphism lacks residues 36 to 159
  VARIANT 46: note = Ancestral polymorphism is E, Derived polymorphism is A
  VARIANT 86: note = Ancestral polymorphism is S, Derived polymorphism is C
MAMINRLQEEMAAIQIKTLQYQRMEEQSEYDQGSLQLLIQLVSKWARDEQELERDLELYRQKVQHYEDKERRTMSFKANGVSPSGSGTFVSSSGEDSDGHSDDYYKLSDSRDGGNVWSSSDAALSSMRDQDGTKHLAALDDSLTYFEVERLYPGGTRDV

SEQ ID NO: 1396 - protein, 476 aa, Zea mays
  VARIANT 340..476: note = Derived polymorphism lacks residues 340 to 476
  VARIANT 292: note = Ancestral polymorphism is A, Derived polymorphism is V
  VARIANT 219: note = Ancestral polymorphism is S, Derived polymorphism is L
  VARIANT 193..476: note = Derived polymorphism lacks residues 193 to 476
  VARIANT 112: note = Ancestral polymorphism is P, Derived polymorphism is T
  VARIANT 106: note = Ancestral polymorphism is N, Derived polymorphism is S
  VARIANT 97..476: note = Derived polymorphism lacks residues 97 to 476
  VARIANT 94: note = Ancestral polymorphism is C, Derived polymorphism is Y
  VARIANT 71: note = Ancestral polymorphism is S, Derived polymorphism is L
  VARIANT 24: note = Ancestral polymorphism is M, Derived polymorphism is T
  VARIANT 16: note = Ancestral polymorphism is S, Derived polymorphism is N
MYTVGGFRFIVYKFSSTMFNMKLMEKLRFILSKFNSNLSHPKLMDKSRFEASEFNTLFDPNTMEKTAEDLSFDVLWLIFANLELPDLVRAGSVCSIWRDIYTSLCNSGSYNPQHTPCLLYTSESAGTKAACLYSLAEKKTYTLTLPDPPLCSRYIFGSSYGWIVTADERSELHIVNPITGDQIALPSVTTIDQVKPIFSDIGVVCGYEHSGYSGVWEVSDIPSIFDLSELRDHLFHKVFLSSDPSAGDYFMVLIHNPHCQLSFARAGDDKWTWLPQGDSYDDCLFNGQLLYACTQLGEIHEFDLGTPTITHKIFLGRVKDLYDEKIYMVQASCGQMLQIWRSDDTIEEGDNEDEYDPDFGPDLPWHSTSMIKVYKLEPTSKKLVEISSLGANVLFLGHNLSLCLHAEEHPQLKANHIYFADDEPYTYFKSKRRDIGVFDLERNCSEKIVSPQLWSNWPAPVWLVPNPRRIGLSLCK

SEQ ID NO: 1397 - protein, 370 aa, Zea mays
  VARIANT 247..370: note = Derived polymorphism lacks residues 247 to 370
MDRAYEVEELGANLTKKMHPSGRDDISVLAMQRLFNHQPNGPTTPVDMALDYFIYDYEFAEPPRVTSLQNTQPTPTNADFGEDNYFVADQRGYESIIHSIGSSYLSTDGNGKLKDRRILLNKVVRQIAYNKQGVVVKTEDGSSYRADYVVVSTSLGVLQTDLIQFKPQLPFWKIAAIYSFDMGVYTKIFLKFPERFWPVGEGKQFFMYASSRRGYYALWQSFEREYPGANVLLATVTDDESRRIERQSDDQTKAEVAEVLRDMFPGADVPGPDQIDIYVPRWWSDRFFKGSYSNWPVGVSRYEYDQLRAPVGRVYFTGEHTSERYNGYVHGAYLAGIDSANILINYIFKNEEYKVRGKYDVEDDLIAQAR

SEQ ID NO: 1398 - protein, 220 aa, Zea mays
  VARIANT 11..220: note = Derived polymorphism lacks residues 11 to 220
  VARIANT 23: note = Ancestral polymorphism is C, Derived polymorphism is Y
  VARIANT 38: note = Ancestral polymorphism is M, Derived polymorphism is R
MGRRPARCYRQIKNKPYPKSRYCRGVPDPKIRIYDVGMKRKGVDEFPYCVHLVSWEKENVSSEALEAARIACNKYMTKSAGKDAFHLRVRVHPFHVLRINKMLSCAGADRLQTGMRGAFGKPQGTCARVDIGQVLLSVRCKDNNAAHASEALRRAKFKFPGRQKIIESRKWGFTKFSRADYLKYKSEGRIVPDGVNAKLLGNHGRLEKRAPGKAFLEAVA

SEQ ID NO: 1399 - protein, 810 aa, Zea mays
  VARIANT 108..810: note = Ancestral polymorphism lacks residues 108 to 810
MAQSTPDPPALVAMTLAELEAAIAALPGKWGALREAFDRLAACSPSPLPFAWEDLDGYISSLQSSVALRFRQVRALEAAGAVPAAAASLVTRGDGKGENQELEEDDELDEDVAVEVEEKVAVEVEEEADEEIQEADSDKICNDEKDGKEAREVEVEKEVAELEKADEDMQEANSDKFCNDEKDGNETREVEVEDEVAELEKKADLEMQEVDYDKICNDEKDEKGGKEEVVEEEGVEEASNIKIGNEIKYEKESREEEQASKVNEQDPDKEMQVVDKDKLNTKGAFKASQDKEKDQDTNMDETVTKMASSVQHKEGEEACDRKQKEAQKQDLHEKVEGTKNAKDQGNRALPRRSDDCTVACAYMDAKRLVKLVCTNTDLKSELHAAFRCAPDAAAVALHVVELFLHNKTFVRTNKVWANCVELVQMVPVFVTKPSADTTEQAKRMAKDWKEMIDSPESCYVLGSLASWGLLYFLISYNIVTEFDMKEIFRLFGNIPFKQKKKSAMLLKGLGLSNRIPELMDYLIGNGQQMDVLCLARVLNMVDKYPPLSLLKGYVEKAKQTAMEISQKNMTRQLRVVIIKELDDLRRAHFLVKKEITNTNLCTSIREEINILLGELEKKKRGLANPLTASTSNSQQRQTKINKKRKVMQKQEHHKGQEDRMQGQLSGLAEKPEKKQRKPQQEQQQEQENKPEEKKQKQEDGPEEKKPKHEYKPEEKKRKQEDKSEEKQQQKKQKHHKWLRQRTPMLPAQGYPAMWNAAMRSDLEPPPYAATHGVHHGYHHPVQPGWPGVHCASPFIGPSTPWYPPPQFYPR

SEQ ID NO: 1400 - protein, 848 aa, Zea mays
  VARIANT 229..848: note = Derived polymorphism lacks residues 229 to 848
  VARIANT 44..848: note = Derived polymorphism lacks residues 44 to 848
  VARIANT 41..848: note = Derived polymorphism lacks residues 41 to 848
MVKRSKKSKSKRVTLRQKHKVLRKVKEHHRKKRKEAKKEGKAGQRKKVEKDPGIPNEWPFKEQELKALEARRAQALQELELKKEARKERARKRKLGLLEDEEIANLASAASAQGSEFAAKDAAKDKAPLTVAKSNDHSERSFYKELVKVIEASDVILEVLDARDPLGTRCIDMEKMVRKADPSKRIVLLLNKIDLVPKEAVEKWLTYLREEMPTVAFKCNTQEQRTKLGWKSSKLDKTNIIPQSSDCLGAENLIRLLKNYSRSHELKLAITVGIVGLPNVGKSSLINSLKRSRVVNVGSTPGVTRSMQEVQLDKKVKLLDCPGVVMLKSSNSGVSVALRNCKRVEKMEDPVTPVKEILGICPHEKLLSMYKVPSFSSVDDFLQKVSTVRGKLKKGGVVDVEAAARIVLHDWNEGKIPYFTLPPKRDAVEDSDVVIISEDGKEFNIDEIYKAESSYIGGLKSIEEFLPALLGAPDPHALLVRAVGGVLDMASAERDASKWWCANCVALVECAPRLPAPSPDALAHAKRLAGRWKEMVVAGPAGGGDTGGMAGWGLLTFIASYDIAPEFDADEIIRLFGDIASEVKDNCVELCKRLGLIGKMTDSVDHFIENGQPIDAIRLARTFGLTGKYTPLAIMNDYIENAKKDAEDILSKESYTPESRKQAMAKKVDALIFLWSAIDGYDMDSVQRSSIKAEITQLLHKYANKQQSLAGVPASISSSHQQQKFQEEYRQRPPVEQETQQRKAHELQQETEEKQHHQQRKAQETQHQHIQDQQETQKREMWQNRKRRRQNKNRKRKQRRQNLQQQSKRPRLPPYVRPGVGNQHGQPFSGGRFAACATTIPPYYWSMG

SEQ ID NO: 1401 - protein, 217 aa, Zea mays
  VARIANT 34: note = Ancestral polymorphism is E, Derived polymorphism is K
  VARIANT 45..217: note = Derived polymorphism lacks residues 45 to 217
  VARIANT 48: note = Ancestral polymorphism is A, Derived polymorphism is P
  VARIANT 54..217: note = Derived polymorphism lacks residues 54 to 217
  VARIANT 67..217: note = Derived polymorphism lacks residues 67 to 217
  VARIANT 87..217: note = Derived polymorphism lacks residues 87 to 217
  VARIANT 89: note = Ancestral polymorphism is R, Derived polymorphism is G
  VARIANT 139..217: note = Derived polymorphism lacks residues 139 to 217
  VARIANT 163..217: note = Derived polymorphism lacks residues 163 to 217
MSYYQTDTVSRDTEDFDGAKPSGAVTVDATHDTESAKQAATLAFQTYADEEPVQSIESQTTTANHLQKPDIELIHALQHQDGSSILSRRKSGAYFEMQSVERQAVQEESHLATSSEILASTDKLAECQETITILSKQLQALKMPTASGPPDTPPFAFPGRARRSPTTSHSRSRASSPRPPRLPVPLPPRPRTPQVLSKKDEGEVRATATPTTRSATR

SEQ ID NO: 1402 - protein, 394 aa, Zea mays
  VARIANT 19: note = Ancestral polymorphism is S, Derived polymorphism is P
  VARIANT 211: note = Ancestral polymorphism is S, Derived polymorphism is G
MFRLRNCILPHLLFSSRRSSSCITPLHRLLSGSAATTASNPFTVADYLVARCGLSREQVLKASKIKRILDLRSPSKPDVVLAFLAGLDISGTDLTTVIANDPRLLCTDVGKTLSLRVAELRSLGLSSHQVGQVVIAAQIRFRSPSFLRNFEFWLGLFGSFDELLRFVKMNGNLLSVNLEKVAMPNLALLQRCGMEISDIPNTFLSRILVRSTEHLQETLARVSEFGIQQGSWVFPFAFMRFAILNREKLDSNIQLFEKLGWSRDDIASAVRKAPNILSLTPERVHKKLDFLMGVVGLQMAVIVYRPVLLLHSVERRLLPRYYLMKFLKNRGLMSSSLSFLTIASMGNDNLLDKLVHPHEMSVPGLAAAYASSCAGKHQWELLDDMTKGKRKRKC

SEQ ID NO: 1403 - protein, 509 aa, Zea mays
  VARIANT 256..509: note = Derived polymorphism lacks residues 256 to 509
  VARIANT 253: note = Ancestral polymorphism is R, Derived polymorphism is H
  VARIANT 77: note = Ancestral polymorphism is M, Derived polymorphism is R
MDIKIPLIVVAFVILLLLCSRLIRGYTKPSSAAALRLPSGPWQLPLIGSLHHLLLSRFSDLPHRALREMSGTYGPLMMLRFGAVPTLVVSSAEAAREVMRTHDLAFCDRSLTVTFDTISCGGKDLIFSPYNAHWRELRKLCMLELFSQRRVLTFRGIREQEVAHLLRSVSGESADGRPVNLSEGICRMINDIAARTVVGNRCKYRDEYMRELDEVVRLAGGFNLADLYPSSRLVRRFSAAARDARRCQRNMYRIIQSIIEEREAMPTPERDEEDLLAVLLRLQKEGGLQFALTNEIVSAVIFDIFSAGSETSSTVLIWTMSELVKHPRVMRKAQSEVREAFKGQDKVTEGDLGKLEYLRLVVKEALRLHAPVPLLLPRECREPCRVLGYDVPKGTKVFVNAWAIARDGRLWRDGEEFRPERFQGSGVDFRGNDMEFIPFGAGRRICPGITLGLANLELALASLLYHFDWDLPGGARLEELDMAEAFGITLRRKSALWVKAKPYGNFMPN

SEQ ID NO: 1404 - protein, 305 aa, Zea mays
  VARIANT 16..305: note = Derived polymorphism lacks residues 16 to 305
  VARIANT 18: note = Ancestral polymorphism is D, Derived polymorphism is N
  VARIANT 22: note = Ancestral polymorphism is R, Derived polymorphism is W
  VARIANT 53..305: note = Derived polymorphism lacks residues 53 to 305
  VARIANT 99: note = Ancestral polymorphism is A, Derived polymorphism is T
  VARIANT 101..305: note = Derived polymorphism lacks residues 101 to 305
  VARIANT 167: note = Ancestral polymorphism is E, Derived polymorphism is K
  VARIANT 178..305: note = Derived polymorphism lacks residues 178 to 305
MGTQELMLNTRWKVFWGDSSHRWDLMFSVVKPSVIQLRGNQMAPSPLCSASPWPLRAPGQPPQDVRSPQTVVVAVGTRVSGAEARASLVLALASHALSTSQRRFAELTDEAAKYAFPSGRFEPRTLEEALMSVPDLETVPFCVLKREAEYEIREVESYFVAETTMPERSGFDFNGSSQSFNVLASYLFGKNTASQQMDMTTPVFTRKGELNSQSMDMTTPVITKSSLLNESFLFILCWFIGYGLVTDDDINQRESKLLESLHKDTTFRVKDDLVVEVAHYNPPFTLPFIRRNEIALEVDRNDIAL

SEQ ID NO: 1405 - protein, 278 aa, Zea mays
  VARIANT 4: note = Ancestral polymorphism is P, Derived polymorphism is L
  VARIANT 15: note = Ancestral polymorphism is T, Derived polymorphism is I
  VARIANT 16: note = Ancestral polymorphism is A, Derived polymorphism is T
  VARIANT 32: note = Ancestral polymorphism is R, Derived polymorphism is Q
  VARIANT 36: note = Ancestral polymorphism is I, Derived polymorphism is T
  VARIANT 45: note = Ancestral polymorphism is T, Derived polymorphism is I
  VARIANT 90..278: note = Derived polymorphism lacks residues 90 to 278
  VARIANT 126: note = Ancestral polymorphism is A, Derived polymorphism is E
  VARIANT 155: note = Ancestral polymorphism is S, Derived polymorphism is L
  VARIANT 163: note = Ancestral polymorphism is S, Derived polymorphism is P
  VARIANT 164: note = Ancestral polymorphism is R, Derived polymorphism is C
  VARIANT 165..278: note = Derived polymorphism lacks residues 165 to 278
  VARIANT 167: note = Ancestral polymorphism is G, Derived polymorphism is E
  VARIANT 175: note = Ancestral polymorphism is A, Derived polymorphism is V
  VARIANT 213: note = Ancestral polymorphism is S, Derived polymorphism is F
  VARIANT 215: note = Ancestral polymorphism is T, Derived polymorphism is M
  VARIANT 216..278: note = Derived polymorphism lacks residues 216 to 278
  VARIANT 239: note = Ancestral polymorphism is A, Derived polymorphism is S
  VARIANT 247: note = Ancestral polymorphism is S, Derived polymorphism is L
  VARIANT 250: note = Ancestral polymorphism is A, Derived polymorphism is T
MVNPLLIFLPFLSVTALPGTADAAGPDPCAGRRIHIRGLPPHFNTDLLRHCDANAFPLADPSAAATSVPPCESLADHGLGPRTHPHNRSWYCNDARLLEAFFHRRILERDCLADDLADVVFLPYYAALNALSYVIDPALLDESTRHGVALAEFLSPDQAHILPRWHGHDHFLVVAGSTWDYAQSPGVDPRLWGSSSLLRLPELANFTSLTLESRTWPWQEHAIPHPTSFHPSSLGHLRSWLAHARRLRCATLMLFAGGASRPCRPLLGQTVLGYRWTV

SEQ ID NO: 1406 - protein, 210 aa, Zea mays
  VARIANT 28: note = Ancestral polymorphism is S, Derived polymorphism is F
  VARIANT 34: note = Ancestral polymorphism is P, Derived polymorphism is L
  VARIANT 40: note = Ancestral polymorphism is C, Derived polymorphism is Y
  VARIANT 44: note = Ancestral polymorphism is E, Derived polymorphism is K
  VARIANT 52: note = Ancestral polymorphism is P, Derived polymorphism is S
  VARIANT 57: note = Ancestral polymorphism is D, Derived polymorphism is N
  VARIANT 67: note = Ancestral polymorphism is C, Derived polymorphism is Y
  VARIANT 83: note = Ancestral polymorphism is P, Derived polymorphism is L
  VARIANT 98: note = Ancestral polymorphism is T, Derived polymorphism is K
  VARIANT 105: note = Ancestral polymorphism is R, Derived polymorphism is L
  VARIANT 124: note = Ancestral polymorphism is P, Derived polymorphism is L
  VARIANT 131: note = Ancestral polymorphism is T, Derived polymorphism is I
  VARIANT 135: note = Ancestral polymorphism is R, Derived polymorphism is C
  VARIANT 136: note = Ancestral polymorphism is R, Derived polymorphism is L
  VARIANT 137: note = Ancestral polymorphism is V, Derived polymorphism is M
  VARIANT 141: note = Ancestral polymorphism is Y, Derived polymorphism is C
  VARIANT 155: note = Ancestral polymorphism is A, Derived polymorphism is V
  VARIANT 156: note = Ancestral polymorphism is A, Derived polymorphism is V
  VARIANT 168..210: note = Derived polymorphism lacks residues 168 to 210
  VARIANT 170: note = Ancestral polymorphism is R, Derived polymorphism is H
  VARIANT 187: note = Ancestral polymorphism is A, Derived polymorphism is V
  VARIANT 188: note = Ancestral polymorphism is S, Derived polymorphism is L
  VARIANT 197: note = Ancestral polymorphism is A, Derived polymorphism is G
MSDLHPAGALSRRHRASASKLGPLIDGSGLFYKPLQAGDCGEHEAQPGEPHPHLVLDDLLAGFEAPCVADIKIGAITWPPSSLEPYIAKCLAKDRGTTSVLLGFRVSGVRVVGPEGAVWRTERPEVKAMDTVSVRRVLRRYVSSVADEGMDCALAAAVYGGKGGVLSQLRKLKAWFEEQTLFHFYSASILLGYDAAAVPPPFWERGSGLR

SEQ ID NO: 1407 - protein, 194 aa, Zea mays
  VARIANT 22: note = Ancestral polymorphism is R, Derived polymorphism is L
  VARIANT 110: note = Ancestral polymorphism is T, Derived polymorphism is N
MVLKTELCRFSGQKIYPGKGIRFIRADSQVFLFANSKCKRYFHNRLKPAKLTWTAMYRKQHKKVCDISQSTLRICRCITLTSLPSSVNVHLMLANIDIHAEAVKKRRRATKKPYSRSIVGASLEVIQKKRAEKPEVRDAAREAALREIKERIKKTKDEKKAKKAEVTKSQKAQTKGAVQKGSKGPKLGGGGGKR

SEQ ID NO: 1408 - protein, 708 aa, Zea mays
  VARIANT 611..708: note = Derived polymorphism lacks residues 611 to 708
MGLVCIRNRKWDGTKSLVEIRFMNKSPNHSLYIDSAVILQTELIFLALDSADSPFDEWEIRSVGNAARFSMCSPIGFCPISPVPMEHSSAEDSDISDSDIAEHKEEICAQLRAGKLNVKRGEAFRCPFCPGKKRQDYNLKDLLQHATGIGAASKRSAKVKASHLGLAMFLEKDIASTLEQPLQIVPYKPKTPKDEEIFVWPWMGIVVNLQCEFKGKECSRESEERLTAQFSRFRPLQATTLRDGKNQQFCAIVKFAKDWSGFKDAMAFENHFVLEQYSKPDWKKRNCRKDDLYGWLAKTDDYNSPEPIGEYLRKNGNLRSVGDLEREGLKETGERVAHYARQIDATNKHMSELELKNNQNAMKLDRMLEENDRLVEEHNERILNMQKDARRNSWKIINDNIRLHKELETKKKEIGRRHEELEKLVMNSTNREKLEAAKEEIAKENRLLDLATLKKKEEDEKFLKLVKEQEQEKENVRKMLYDLEMQLASKQKLELEREQLRGNLEVWKHMGKEDAKSKEMLDKLHEALKEKDEEMDHIDSINQTLIIKQRRTNDELEEAKKELTTDLLNMSSARSIVGVKKMGELDKKAFIVSCKEKTADELSLSILCSKWEDEIRQPEWHPFKVIDVGGQAKEIIREDDEKLQALKAELGVQAHDVVVKALLEMNEYNPSGRYPIPELWNFKEDRRAPMGEAVAYIVKQWKANKRKH

SEQ ID NO: 1409 - protein, 136 aa, Zea mays
  VARIANT 36: note = Ancestral polymorphism is P, Derived polymorphism is L
MQTVRSAVLQHLRLRAAAPIAARGGGGGFARRMSAPAGQEGSSGSSSELERDIRTRVVNLVKKFDKIDADKVTETADFQKDLSLDSLDRVELVMAFEQEFSVEIPDDKADKLTCCADVAKYIISESEASDTNAGGS

SEQ ID NO: 1410 - protein, 125 aa, Zea mays
  VARIANT 28: note = Ancestral polymorphism is P, Derived polymorphism is T
  VARIANT 50: note = Ancestral polymorphism is T, Derived polymorphism is I
  VARIANT 104: note = Ancestral polymorphism is M, Derived polymorphism is I
MHTNPAMAKAAPPLLAAGSRTAITAQQPSSRKGAAGTGLFCSRAIVSKRTRVTAKLGDGELKPAGKRKFITKEEEPEQYWQTAGEREGENPMMTPLPYIIIFGMSTPFVILAIAFANGWIKVPVR

SEQ ID NO: 1411 - protein, 521 aa, Zea mays
  VARIANT 35: note = Ancestral polymorphism is A, Derived polymorphism is E
  VARIANT 39: note = Ancestral polymorphism is R, Derived polymorphism is W
MGIEILCLIFIFLLLIRVLTRSYAASPSPPTMSAEAALRLPPGPWQLPLIGSLHHLLLSRFSDLPHRALREMSGTYGPLMLLRLGSVPTLVASSAEAAREVMRSHDVAFCSRYLSASLDIISCGGRGVLFSPYNDRWRELRKVCMLELFNPRRVLSFRSVREEEVARLLRSISDQCGGGGRHAAAVVNLSEAICRMVNDVVVRTAIGDRCKHRDEFLRELDEAVRLTGGFSLADLYPSSRLVRWFSASARDMGRCQKNVYGIIGSIIRERDGARVPGRREDDLLGVLLRLQREGGLQFALTDEIVIAVIFDIFAAGSETSSTVLAWAMSELVMNPRVLHKAQSEVRETFKGQERLTEDDMPRLSYLHLVIKEALRLHAPVPLLLPRECREPCRVMGYDVPEGTRVFVNVWAIGRDDGFWGDGEVFRPERFDGGGGGVDFRGNDFEFTPFGAGRRICPGIALGLANMELALASLLYHFDWEQPADGPGTGSSGSLDMAEAFGITLRRKSKLLLKATPRVETK

SEQ ID NO: 1412 - protein, 157 aa, Zea mays
  VARIANT 48..157: note = Derived polymorphism lacks residues 48 to 157
  VARIANT 9: note = Ancestral polymorphism is F, Derived polymorphism is S
MMLLLLLGSAKGNQRRNQSFVEERSFAYREILLFKKLRFRAEEKARVSVDADIVIKEAMRRLESAVKGKKDLLGRMDALQSQIERPETNTIHVCEERSKLCSTALKHMEDGNVEEVCVSDTNPIPVTGNIAELDDEGVDIPTVGDSGIIPTLMKCLM

SEQ ID NO: 1413 - protein, 223 aa, Zea mays
  VARIANT 165: note = Ancestral polymorphism is L, Derived polymorphism is P
  VARIANT 159: note = Ancestral polymorphism is A, Derived polymorphism is P
  VARIANT 117: note = Ancestral polymorphism is H, Derived polymorphism is Q
  VARIANT 112..223: note = Derived polymorphism lacks residues 112 to 223
  VARIANT 102: note = Ancestral polymorphism is P, Derived polymorphism is T
  VARIANT 98: note = Ancestral polymorphism is S, Derived polymorphism is G
  VARIANT 84: note = Ancestral polymorphism is K, Derived polymorphism is N
  VARIANT 77..223: note = Derived polymorphism lacks residues 77 to 223
  VARIANT 75: note = Ancestral polymorphism is V, Derived polymorphism is M
  VARIANT 74: note = Ancestral polymorphism is T, Derived polymorphism is I
  VARIANT 70: note = Ancestral polymorphism is G, Derived polymorphism is R
  VARIANT 65: note = Ancestral polymorphism is A, Derived polymorphism is P
  VARIANT 52: note = Ancestral polymorphism is E, Derived polymorphism is G
  VARIANT 51: note = Ancestral polymorphism is A, Derived polymorphism is V
  VARIANT 44: note = Ancestral polymorphism is E, Derived polymorphism is K
  VARIANT 42: note = Ancestral polymorphism is T, Derived polymorphism is I
  VARIANT 36: note = Ancestral polymorphism is D, Derived polymorphism is N
  VARIANT 31: note = Ancestral polymorphism is D, Derived polymorphism is Y
MPSLSSSPPDARSQHHHSILGVHSPDKLVGDLHLFDNLVVFTTEELSRAPAEIIGRSCHGTSYKATLDNGYMLTVKWLKEGFAKSKKEFSREIKKLGSVRHPNLVPLRGYYWGPKEHERIMISDYADATSLSTYLSEFDEQNLLSLSAGQRLNIAIDIARCLDYLHNERVIPHGNNKSSNVLIQNSTPSALVTDYSLHRLMTLIGMAEQVLNTGALGYSPPNI

SEQ ID NO: 1414 - protein, 95 aa, Zea mays
  VARIANT 3: note = Ancestral polymorphism is G, Derived polymorphism is E
  VARIANT 24..95: note = Derived polymorphism lacks residues 24 to 95
  VARIANT 31: note = Ancestral polymorphism is A, Derived polymorphism is V
MEGSSTMDQVVKNTQENMSWLSIWWQQFVDASMMPLMASFSNGQVQRHPPVRTKLRFGSFTSGLDSEQVSAPTPQDTEQPEQLGGPFQILLIKNR

SEQ ID NO: 1415 - protein, 442 aa, Zea mays
  VARIANT 92: note = Ancestral polymorphism is T, Derived polymorphism is R
MARACSKPNPGQFWRLIGRRIVIDNESSAEATIVRVDSANEYGILLEVIQVMIDLNLVIGKAYITSDGGWFMDVFNVTDKEGKKIKDEATLTQIEDYIRKSLGADSRYIPSRRRSVDVAAAADHNIIELTGTDRPGLLSEVSAVLTSLKCNVVSAEIWTHNTRAAAVMRVTDEDTGLAVTDAERLERIREKLSYLFRGGNLSRGATVSSRTATTHTERRLHQMMLDDGDYEQLQRQAPGQSQRPNVTVRNWNDKDYSVVTIRCKDRSKLLFDTVCTLTDLQYVVFHANIDAKDNQAYQEFYVRHVNGSPMNTETERLRVIQCLEAAIERRVSEGVKLELCTNDKVGLLSEVTRIFRENSLTVTRAEVTTRGRMAVNTFYVRGSAGEAVDQKAIDSIREAIGHSLQVKGQAEPPEPQKKESPTWFLFANLFRPRSLYSFGFMR

SEQ ID NO: 1416 - protein, 253 aa, Zea mays
  VARIANT 194: note = Ancestral polymorphism is R, Derived polymorphism is P
  VARIANT 177: note = Ancestral polymorphism is E, Derived polymorphism is Q
MGRRLPAAAALCGSARAAATRVRKKRVQRRAPPSSSSKLPAAPPSGGGKAGSAGGGACYVNGNGNGELMVEVVVGSGKGGGGGRRVMVLADGRAEAAGALQWALSQAVRSDDTVVLLAVAKPPVARDAVSDSCVRMLGTKSQQHLAALRTVCESTRPEVKVETCAVEAEERAAAVVEAARRHGASLLVLGQRPRRHAVARWLQALWRCRRRAGGGVVEHCIEHAPCVALAVRRRSSGGYLVSSKHRRDFWLLA

SEQ ID NO: 1417 - protein, 229 aa, Zea mays
  VARIANT 163: note = Ancestral polymorphism is T, Derived polymorphism is I
  VARIANT 145: note = Ancestral polymorphism is H, Derived polymorphism is R
  VARIANT 100: note = Ancestral polymorphism is T, Derived polymorphism is M
  VARIANT 91: note = Ancestral polymorphism is G, Derived polymorphism is R
  VARIANT 44: note = Ancestral polymorphism is E, Derived polymorphism is K
MASDTGKKLIQIDVSSDTVCPWCFVGKKNLEKAMEQSMGKFDFEVRWHPFFLNPDAPKEGVKKSDFFKMKFGPVQYEGAMSRMTEIFRGLGLEYDMSGLTQVLLDAARKVGIEGAEELLEDPTKGVHEVQEELKKYSSDISGVPHFVAVLVSGHALVLCRVLIQVGVAPCEGWIEDHRKAKALEGDPKYPMNPLDLQEDSFHHQVPPVYHICDKQQSPGKEEIGRVQLL

SEQ ID NO: 1418 - protein, 370 aa, Zea mays
  VARIANT 277..370: note = Derived polymorphism lacks residues 277 to 370
MSTQGNCETHGAAVPGTKDAGTRKAGQSSGNRREEKLPKCEQVYYGSEVEGCADDENPGKRAALVTLIGNEYCGDEDERVQVLTIVKKDEPADDIDDCINPGTVARYSEAKGAVGASAATSAVRPAGSRSSSFHGVASFLICRRPLWSNRTPTRSGYSISALSLYTTRLPPPPDAQVFVGSFYFSGNEHPAVTALFQFLPSQGSAACHRCDTRVAPDGGRSPPANQVDSLDTLGLPPRPLPYDDPQSSPRMVQHPLVSGHDKAPTHVQKLGQPAETKNTHTGSTCTAHKVSASSPKQHSEGSRMDDGVQFCDSSDSEDDCPVCLEEYDYENPKIALQCKHNFHLSCIYEWMERSQACPVCAKTMLFNEDE

SEQ ID NO: 1419 - protein, 364 aa, Zea mays
  VARIANT 191..364: note = Derived polymorphism lacks residues 191 to 364
  VARIANT 188..364: note = Derived polymorphism lacks residues 188 to 364
  VARIANT 181: note = Ancestral polymorphism is P, Derived polymorphism is L
  VARIANT 159: note = Ancestral polymorphism is G, Derived polymorphism is R
  VARIANT 144: note = Ancestral polymorphism is N, Derived polymorphism is I
  VARIANT 139: note = Ancestral polymorphism is T, Derived polymorphism is I
  VARIANT 93: note = Ancestral polymorphism is C, Derived polymorphism is W
  VARIANT 89: note = Ancestral polymorphism is K, Derived polymorphism is E
  VARIANT 50: note = Ancestral polymorphism is V, Derived polymorphism is M
  VARIANT 37: note = Ancestral polymorphism is M, Derived polymorphism is T
MAGTVTVPGSSTPSTPLLKDELDIVIPTIRNLDFLEMWRPFFQPYHLIIVQDGDPTKTIKVPEGFDYELYNRNDINRILGPKASCISFKDSACRCFGYMVSKKKYIYTIDDDCFVAKDPSGKDINALEQHIKNLLSPSTPFFFNTLYDPYREGADFVRGYPFSLREGAHTAVSHGLWLNIPDYDAPTQLVKPKERNERYVDAVMTIPKGTLFPMCGMNLAFDRDLIGPAMYFGLMGDGQPIGRYDDMWAGWCVKVICDHLSLGVKTGLPYIWHSKASNPFVNLKKEYKGIFWQEDIIPFFQNVTIPKDCDTVQKCYIYLSGQVKEKLGTIDPYFVKLGDAMVTWIEAWDELNPSTPAAANGKAK

SEQ ID NO: 1420 - protein, 250 aa, Zea mays
  VARIANT 93..250: note = Derived polymorphism lacks residues 93 to 250
  VARIANT 24: note = Ancestral polymorphism is Y, Derived polymorphism is C
MTTAAAVADPFKPYHLERKYNKMYKGLDFCGGTQGFGRLSDAADDSGSEYEADTGDPNAGERDGGGGNAAEDALSRSELGAPAAAAAAASAAQAGGLSWRGRAASPECERRRPQHQQHKGRQLRQRHGHDHRRGYFYCRVADSSPKYHPGQSCRKIKRKELRSQTEEEEGNDNAVESTEDGHERSDCTVCTDQTANVDGEVNQDGHGSSSNGRVEGRDDLAMVYQKDGEMERVLEKQAELIGQFEAQENA

SEQ ID NO: 1421 - protein, 399 aa, Zea mays
  VARIANT 300..399: note = Derived polymorphism lacks residues 300 to 399
  VARIANT 226..399: note = Derived polymorphism lacks residues 226 to 399
  VARIANT 184..399: note = Derived polymorphism lacks residues 184 to 399
MEPRKEMGTSSGRRHSFAAVKPHAGAAVHGQQHVPELSSPSLPSPPESQQTPTMPHMPESQNRSPNLAWNFYPPGGFVNLINQPYMTMPSHPFGENFHFVGLTQNLNTSPPPPPSAKRTKKTSRPGKETTDIDADGDTASEETKTVKKRYWTHEEEVRLASAWLNCSNDPIHGNDKKGETFWKEIAEYFNKHCQADRQRDVNQLKIHWSRLKTLINNFNGCWSAVSKIHTSGYSDDQLMDEAQKMYANANNGKPFTLVHWWKTLRNEPKFCAHMSQMDKEKGQSCTIDITEDSEQIPTQRPIGRDAAKAQKNGKRKAEEVLDGIVLLGENINKIVEVQAERKQEREKVAETHLKLKKDLHWLSIFGKNMGVVKKCLRTHVLSLYVKNMGLVKNIWIFLN

SEQ ID NO: 1422 - protein, 457 aa, Zea mays
  VARIANT 288: note = Ancestral polymorphism is M, Derived polymorphism is K
MALLLLLLAVLGVVLASSLLLRWNELRYSRRRGLPPGTMGWPLFGETTEFLKQGPSFMKQRRLRYGSLFRTHILGCPTVVCMEPELNRRALASEGAGFVPGYPQSMLDILGPNNIAAVHGPLHRAMRGAMLALTRPHMIRAALLPKIDAFMRAHLHGWAGRRVDIQEMTKEMALLSALRQIAGISAGPLSDALKAELYTLVLGTFSLPINVPGTNYSKGLQARKKLVAMLRQMIADRRSSGCARDDMLDALLSGNEGTRAKLSDDQIIDLLITLIYSGYETVSTTSMMAVKYLSDNPKALGQIRKEHLDIRKAKSPEDPLDWNDYKSMTFTKAVIYETLRLATVVNGLLRKTTHDVEMNGYVIPKGWRIYVYTREINYDPFLYPEPMETNLESHPHFMLFGGGARMCPGKEVGTVEIATFLHYFVTRYRWEEEGNNTISKFPRVAAPNGLHIRVQDY

SEQ ID NO: 1423 - protein, 78 aa, Zea mays
  VARIANT 16: note = Ancestral polymorphism is S, Derived polymorphism is W
  VARIANT 48: note = Ancestral polymorphism is L, Derived polymorphism is V
MAASSAVEKLKVLWDSQVNDEEQWALNYVRTPFPSLRILYLFVSFFSLLGGSLKLLKAAGLFAGSIFLMRNFGDLMAI

SEQ ID NO: 1424 - protein, 416 aa, Zea mays
  VARIANT 214: note = Ancestral polymorphism is G, Derived polymorphism is R
  VARIANT 223: note = Ancestral polymorphism is E, Derived polymorphism is D
  VARIANT 350: note = Ancestral polymorphism is F, Derived polymorphism is S
MASFSPSGRMTRTAASSLAARVVLALLLLIGVSGSGATQAASPHTHHSRQLDVNHKKPVQTFRPINIAHRGSNGELPEETAAAYLRAIEEGADFIETDVLASKDGHLVCFHDVTLDATTDVADHAEFAGRKRTYEVQGEDVTGWFIVDFTLEELRSLRVKQRFSFRDQRYNGKYQIITFEEYILIALYADRTVGIYPEIKNPVFINQHVKWSDGKRFEDKFVETLLRYGYGGEYMSDGWLRQPLFIQSFAPTSLIYVSNMTDSPKLLLIDDTTVPTQDTNQSYHEITSDAYLAFIGSYVVGIGPWKDTLVPPDPTDNRLGRPADLVARAHALRLQVHPYTFRNENQYLHFDFRQDPYAEYAYWLDEVAVDGLFTDFTGSLHKYQEWTRPYRKEQEKTSPEALLREIAGMLKNDGYD

SEQ ID NO: 1425 - protein, 188 aa, Zea mays
  VARIANT 99: note = Ancestral polymorphism is E, Derived polymorphism is K
MGPQKVETMRRPRPERGERRIDAAIDHLAQYGFAKPQIRKVINDLLQLYGRDGWVFLEEGSYSIVLKVLEEQAQQDQAFVMQTQEAAAAEEALPQNGMEVSRVNGEAPNEPPSTLELQASPSSSPLLLVPPAKGPPCARTPCYGWISEESESESESEDGEMLSDVTGPVIFAKKDIPNPVGTLPSRRK

SEQ ID NO: 1426 - protein, 192 aa, Zea mays
  VARIANT 9: note = Ancestral polymorphism is C, Derived polymorphism is R
  VARIANT 158: note = Ancestral polymorphism is R, Derived polymorphism is M
MEKPFVSHCDMEMELVKMAMLRHEETFRQQVHELHRLYRVQKQLMGGLSRPSSELISCRRRQTRRRRQPRRRALDLQLHHHLPAVVIAPPPAEDAGLELTLAIGGGGRCRRRRQDEIETSTGTATTPLGSGSDISGGSLLTTAASSTDTGGGSPPYQRAVPAFRRLQEAAAAKQPPRSPWLVQCVSGGLEMA

SEQ ID NO: 1427 - protein, 93 aa, Zea mays
  VARIANT 79: note = Ancestral polymorphism is R, Derived polymorphism is P
  VARIANT 61: note = Ancestral polymorphism is C, Derived polymorphism is Y
  VARIANT 51..93: note = Derived polymorphism lacks residues 51 to 93
  VARIANT 35: note = Ancestral polymorphism is W, Derived polymorphism is R
MAKPPLQTVTIILLVLLTAASWLHTVDASALGFCWGKCSVRCVQATAGQARAACMSSYGLCCKACNCVPHDIHDCPCYRNMPTVDPKKRPKCP

SEQ ID NO: 1428 - protein, 93 aa, Zea mays
  VARIANT 61: note = Ancestral polymorphism is C, Derived polymorphism is Y
  VARIANT 48: note = Ancestral polymorphism is R, Derived polymorphism is W
  VARIANT 43: note = Ancestral polymorphism is A, Derived polymorphism is T
  VARIANT 41: note = Ancestral polymorphism is R, Derived polymorphism is W
  VARIANT 39: note = Ancestral polymorphism is S, Derived polymorphism is G
  VARIANT 20: note = Ancestral polymorphism is A, Derived polymorphism is V
  VARIANT 19: note = Ancestral polymorphism is A, Derived polymorphism is V
MAKPPLQTAAIILLVLLAAASCLHTVDAATLGFCWGKCSVRCAGATARQARAACMSSCGLCCEACNCVPHDIHDCPCYRNMLTAGPKKRPKCP

SEQ ID NO: 1429 - protein, 95 aa, Zea mays
  VARIANT 50: note = Ancestral polymorphism is R, Derived polymorphism is W
  VARIANT 30: note = Ancestral polymorphism is A, Derived polymorphism is T
  VARIANT 16: note = Ancestral polymorphism is L, Derived polymorphism is F
MAMAKPPLQTAAIILFVLLATVSCLHTVDTAALGFCWGKCSARCARASARRAWAACMSSCGLCCEECNCVPRDIHDCPCYSNMFTTGPKKMPKCP

SEQ ID NO: 1430 - protein, 144 aa, Zea mays
  VARIANT 92: note = Ancestral polymorphism is A, Derived polymorphism is T
  VARIANT 52: note = Ancestral polymorphism is P, Derived polymorphism is S
  VARIANT 18..144: note = Derived polymorphism lacks residues 18 to 144
MGWDGVVQRHEYKGDRTRASGTSLPLPLSSAKVDSSLQAPAELFPVAMAKPPLQTATIILLVLLVAASCLHTVDAAALGFSWGKCCVRCARTTTRRAREACMSSCGLKCEFCKCGPAMPPRDIHDCPCYRNMLTASPKKRPKYP

SEQ ID NO: 1431 - protein, 473 aa, Zea mays
  VARIANT 29..473: note = Derived polymorphism lacks residues 29 to 473
  VARIANT 41: note = Ancestral polymorphism is C, Derived polymorphism is F
MSNPPFVLAVDCGSGQTAQNQRCMWTGGQGDASAGTYCGACREEAESRTCCLIFFSPYSISPDPLFPRVFLLHVPRDFLPTWQALHPRGSFAAGAQTFFPACKATAAVSMAMPWMPNTKGGRLGRQGRDTISRRSWHLKFFLACVAPTRGGRFEVIFVSPTGEEVKSKRQLTQYLKAHPGGPASSEFDWGTSDTPRRSARLSEKVKATESPEGEKTPKRGRSSSKRGKKEEKEDTEAANEAGEDGASEEGKGTDVEMKDAENAEDEKKEVPNADAAEKTEEGEDKKEEAPAVDAAEKTEEGEDKREEEAPAVDAAEKTGEKEVAPAVDATEETEKSTEGQAQPNYVAAPESEYKGDGKPGESEAAPLAFVDETAPHVIIGEEKKEENTENENSQAAESAVPSLASLEGEKKENGGAPEQPALPVAETKADAPPAEAEKGAENSGQPNTGSQEPKAANCDEGQIQPGASAVRCT

SEQ ID NO: 1432 - protein, 346 aa, Zea mays
  VARIANT 89: note = Ancestral polymorphism is T, Derived polymorphism is K
MGGLRSRILRTLQSFPNAAAQSSNLLALPPGAGPSAQPPATPCGLLQEPAPQEALVDEAGPAPEVPGRGGDDGGGGDDDKENVSPGITTRKAKKLKLSSDHRDKSSGLGAEPADGDTRYRRPDLASATLFDPDLLAAFRRAVDAYARALEMAKRRNGGEDEDRDGGEGGPGVADDPLEAFELRCPPGGERAVVLYTTSIRGVRKTFEDCAQVRRLLEGLRVAFLERDVSMHAAYREELRALMARGQEDAFPVPPQLFVDGRYLGGAEEVVALHERSQLRSALRRAARRGAGEGPCAVCGGAWFVVCGGCGGSHWLHDAGGGGVAATGRVPCSACNENGLVPCPLCS

SEQ ID NO: 1433 - protein, 966 aa, Zea mays
  VARIANT 520..966: note = Derived polymorphism lacks residues 520 to 966
MGRHPPVDEAMDFNGNGRDEANPSGSEAGNHNEHRGDDPSRVGQSLPADIRQNGQPTLGEEITAPLWEEFEALGIHVRRSEPVFPPRPGYGAAGTPYVVRANLFLGRLVDEALHQYNVTISPEPTPKAAYREIMTKLLSENQHTDFDGRFSVYDDGDSLFTAGALPFDTKEFEVPLSAGGDEKMDRKYKVMINHAATISLLQLRMLLAGYPTDIPAQALVVLDTVLRDVFNERNDMECVVIDKKDRTLGVDAWKGLYLSIRPTQNCLSLIADVSSSVFVQPLLLIEFVQKILKIDAVDRNLTKPEYDKLLKALRGVRIQVTHRDNRRRVWSKKKDNRRQLSTYRVAGLSVNPTNDLSFESKVGVTTTVIDYFREIYGLELKYKYLPCVNAGSEQDPIYFPIEVGNYVLLNFNMISYSSVLLSLPRSSAISECKIEFQVCKIAPKQCYQKKLEGSQFSTPRKSAWIHPEAEQSCPQIVEQRQYKQTKRANEFDLEFDGNLTTVAARVLLPPNLKYDDSVSQKTWFPLDGYWNMKDKKVINGAKIRNWACLNFCEDLSKEDIKKFCFKLAEMSRITGLDFADLKLPIFTARPDRVEDGIRRCYQEAKNKLRDQKIDLLLAILPDKKDSLYGNIKRICETDIGLVSQCCRRSRVLVNNNQILANIAIKINAKVGGRISVFDDVQKSLPVVSNKPTIIFGAHVSHPSVVDGSTGPSIASVVASQDWHEVSKYNGVVRAQGHTEEIGGLEDIVKELLHAFANESKEKLQQLIFYRDGISEGQFNRILEKEIPAIEKAWNALYDNEKPQITFVVVQKRHKLRLFPVDDNYKIRSAKKKIVEPGTVVDSEICHPAEFDFFLCSQSGGIKGPRRPVRYLVLRDDNNFTADELQALTNNLCYTFLTVCPVLSLISYSGGNRSLSVAPPAYYAQKLAHRARVYLAKGSDNNAAAANGGRKQIPEIKNELKGSMFYC

SEQ ID NO: 1434 - protein, 156 aa, Zea mays
  VARIANT 120: note = Ancestral polymorphism is R, Derived polymorphism is C
MTSDAAFVLEMAAVVCLAVLIVAIVAAAAGACELPVARAAAVHDVEQALGPGTLMPYGQAKAAAGKTGSASPGGVGEEEAPCCAICLSEYAEGDEMVRVLPACGHFFHADCRIDWWLRQRGTCPVCRGGLLPLPPRPECPLMPPRPAGAAVVRGRG

SEQ ID NO: 1435 - protein, 132 aa, Zea mays
  VARIANT 2: note = Ancestral polymorphism is G, Derived polymorphism is R
  VARIANT 9: note = Ancestral polymorphism is M, Derived polymorphism is T
  VARIANT 33: note = Ancestral polymorphism is V, Derived polymorphism is I
  VARIANT 36: note = Ancestral polymorphism is G, Derived polymorphism is S
  VARIANT 77: note = Ancestral polymorphism is V, Derived polymorphism is M
  VARIANT 99: note = Ancestral polymorphism is A, Derived polymorphism is T
MGTLGAAAMATLLTAVVLLTVHVPLATVATDHVVGGSMWSIPLRDDLYMAWSNNRTFYAGDNLVFRFQIGFYDVVQVSRREYEDCTTDDPYNNFRVPPAVVPLDYKGVRYYVCSVGNYCKLGLKFHVTIQQG

SEQ ID NO: 1436 - protein, 419 aa, Zea mays
  VARIANT 288..419: note = Derived polymorphism lacks residues 288 to 419
  VARIANT 276: note = Ancestral polymorphism is H, Derived polymorphism is Y
  VARIANT 264..419: note = Derived polymorphism lacks residues 264 to 419
  VARIANT 258..419: note = Derived polymorphism lacks residues 258 to 419
  VARIANT 256: note = Ancestral polymorphism is V, Derived polymorphism is I
MFGRAPKKSDNTKYYEILGVPKSASQDDLKKAYRKAAIKNHPDKGGDPEKFKELAQAYEVLSDPEKREIYDQYGEDALKEGMGGGGSHVDPFDIFSSFFGPSFGGGGGSSRGRRQRRGEDVVHPLKVSLEDLYNGTSKKLSLSRNVICSKCKGKGSKSGASMRCPGCQGSGMKVTIRQLGPSMIQQMQQPCNECKGTGESINEKDRCPGCKGEKVIQEKKVLEVHVEKGMQHNQKITFPGEADEAPDTVTGDIVFVLQQKDHSKFKRKGEDLFYEHTLSLTEALCGFQFVLTHLDNRQLLIKSDPGEVVKPDQFKAINDEGMPIYQRPFMKGKLYIHFTVEFPDSLAPEQCKALETVLPPRPSSKLTDMEIDECEETTMHDVNNIEEEMRRKQAHAAQEAYEEDDEMPGGAQRVQCAQQ

SEQ ID NO: 1437 - protein, 429 aa, Zea mays
  VARIANT 16..429: note = Derived polymorphism lacks residues 16 to 429
  VARIANT 26..429: note = Derived polymorphism lacks residues 26 to 429
MGISSKWIKSLVGIRKQEKAQNAEKQEKGWNAESSETKSSANQSLHKRKHSLDPGAALAVEEITVQSEALTDNKSAQMVSNSFFSDSTPLDVHISQAEHHSNEDLAATVVQSAFRAFLARRALRALKGIVLLQALIRGHSVRRQTAETLQCMQALVKAKARVRARQVRVALENQVARKKIPEQDDHENHVREVEGGWCGSIGSMEEMQAKALKRREAAAKRERAMAYALTHQRQAGSKQQNSLSLQGLELGENHWESNWLDRWMAVRPWENRLLDCNAKESLPTHEDKDEEANSQITPKGKVSTSNTPGLSKKKGVNHKKSYSDVSCTSFARPANVLPSTSLGSSKQKAKAVGEVFEEVSSQPTDIGSKDVHNSKDKLVQVNGPAKKRLSLPNNVGRESGKGPTRRNSLNRSAPKARADSPNQGDELEA

SEQ ID NO: 1438 - protein, 261 aa, Zea mays
  VARIANT 55: note = Ancestral polymorphism is R, Derived polymorphism is W
  VARIANT 75: note = Ancestral polymorphism is R, Derived polymorphism is C
  VARIANT 87: note = Ancestral polymorphism is P, Derived polymorphism is L
  VARIANT 88..261: note = Derived polymorphism lacks residues 88 to 261
  VARIANT 94..261: note = Derived polymorphism lacks residues 94 to 261
  VARIANT 97..261: note = Derived polymorphism lacks residues 97 to 261
  VARIANT 172: note = Ancestral polymorphism is T, Derived polymorphism is M
  VARIANT 194: note = Ancestral polymorphism is A, Derived polymorphism is V
MTDDKETTASTRLSLRLGRVVVMQSPSCSSSSSAAAHPRHIMLTEAEKEAKRLRRVLANRESAQQTILRRQVCTRDDPTPPRDLAHPELSAGIQCPQHVSIPLPTAPSTALLLMPSWCTHPSLPYFALKADTSFPSNSSCLPSVHAAVSLFSAATGAPLASVDSSALTLLRTAAVSALAASLLASPSRPPSVLALEIWRFSFHVPWVRTAERRAERRAERGMAAGDGCQTRGDGERGDGRRRWRLVMGARRAEMADRDGGW

SEQ ID NO: 1439 - protein, 360 aa, Zea mays
  VARIANT 182: note = Ancestral polymorphism is Y, Derived polymorphism is H
  VARIANT 271: note = Ancestral polymorphism is D, Derived polymorphism is G
MTSPYASPFLLSLLLLISIPVVFLLAPRLLPPKTLPAIPDADESDDLALFRRAILSSSSATPTPTSAGSYFFWRRPAPKIAFLFLTNSDLVFSPLWEKFFRGHTHLFNLYVHADPYSVLEMPPTPSFRGRFVPAKATQRASPTLISAARRLLATALLDDPNNQFFALLSQSCIPLHQFPTLYNALLSDNAGPHSRHRSFIEIMDNMDNDTKLLHDRYYARGDDAMLPEVPYDQFRAGSQFFVLTRRHAIMVVRDMRLWKKFKLPCLIERRDSCYPEEHYFPTLLDMQDSEGCTKYTLTRVNWTDSVAGHPHLYGPGEVSASLIRELRKSNMTHSYMFARKFSPECLEPLMEIADSVILRD

SEQ ID NO: 1440 - protein, 244 aa, Zea mays
  VARIANT 6: note = Ancestral polymorphism is A, Derived polymorphism is E
  VARIANT 15: note = Ancestral polymorphism is S, Derived polymorphism is F
  VARIANT 28: note = Ancestral polymorphism is A, Derived polymorphism is V
  VARIANT 59: note = Ancestral polymorphism is N, Derived polymorphism is T
  VARIANT 109: note = Ancestral polymorphism is A, Derived polymorphism is V
MAAADETRPLLVAISLAVAACCLAQLAVGDTNGVYEPCSDARIQRGDGFTFGVVFAGYNAFFSGNTQLSPCDRRLNLAASGQLAVFRPKVDEISLLTINTTTGFNPASAGGFMVAFAGRKYAARSIPIFVSNTSVTVSSFTLVLEFNKGRLQNLHWKKDGCGACSGKSNFVCLGKQTCAIRTQSCKSQGPVDCSVGIQLAFSGTDKHESVLNSWYEVSNLRQYSLYGLYSNLKDTLSGQFNKIF

SEQ ID NO: 1441 - protein, 322 aa, Zea mays
  VARIANT 34..322: note = Derived polymorphism lacks residues 34 to 322
MMSFKGHEGFGQVAAAGAGSQAASHGGAGPLPWWAGPQLLFGEPAPPSPEETRRDAQFQVVPGVQGTPDPAPPKTGTPEVLKFSVFQGNLESGGKGEKTPKNSTTIALQSPFPEYNGRFEIGLGQSMLAPSNYPCADQCYGMLAAYGMRSMSGGRMLLPLNATADAPIYVNPKQYEGILRRRRARAKAESENRLAKGRKPYLHESRHLHAMRRVRGTGGRFVNTKKEGRGTGVASNGGSKTAAAAPSRLAMPPSFQSSVASLSGSDVSNMYSGGLEQHLRAPHFFTPLPPIMEDGDHGGPPTRISSSFKWAASDGCCELLKA

SEQ ID NO: 1442 - protein, 1227 aa, Zea mays
  VARIANT 428..1227: note = Derived polymorphism lacks residues 428 to 1227
  VARIANT 384..1227: note = Derived polymorphism lacks residues 384 to 1227
  VARIANT 365..1227: note = Derived polymorphism lacks residues 365 to 1227
  VARIANT 358..1227: note = Derived polymorphism lacks residues 358 to 1227
MEDDEYEEGMEMGYGGHHQHGGGHAGYGAEEDDEVGYGGGGGEEMDEDADGDAEQQEDITQDDAWAVISAYFEEKGLVRQQLDSFDEFIQNTMQEIVDESADIEIRPESQHNPGRQAEFAETLHRISFGQIYLSKPMMTEADGETATLFPKSARLRNLTYSAPLYVDVSYRVMKKGHDCEEVTETAEYPKVFIGKVPIMLRSSYCTLYQQSEKDLTELGECPYDQGGYFIINGSEKVLIAQEKMSTNHVYVFKKRQPNKFAYVAEVRSMAENQNRPASGMFVRMLSRAGAKGGSSGQYIRATLPYIRADIPIIIVFRALGFVADKDILEHICYDFSDTQMMELLRPSLEEAFVIQNQQVALDYIGKRGATVGVTREKRIKYAKEILQKEMLPHVGVGEFCETKKAYYFGYIIHRLLMCALSRRAEDDRDHYGNKRLDLAGPLLGGLFRMLFRKLTRDVRSYVQKCVDNGKEVNLQFAIKAKTVTSGLKYSLATGNWGQANQAGTRAGVSQVLNRLTYASTLSHLRRLNSPIGREGKLAKPRQLHNSHWGMMCPAETPEGQACGLVKNLALMVYITVGSAANPILEFLEEWGTENFEEISPAVIPQAAKIFVNGCWVGIHRNPDLLVKTLRRLRRQIDVNTEVGVVRDIRLKELRLYTDYGRCSRPLFIVEGQRLLIKKAHIRALQQRETPDEGWHELVSKGYIEYIDTEEEETTMISMTINDLQNARHNPEEAYSETYTHCEIHPSLILGVCASIIPFPDHNQSPRNTYQSAMGKQAMGIYVTNYQLRMDTLAYVLYYPQKPLVTTRAMEHLHFRQLPAGINAIVAIACYSGYNQEDSVIMNQSSIDRGFFRSLFFRSYRDEEKKMGTLVKEEFGRPNRENTMGMRHGSYDKLDDDGLAPPGTRVSGEDVIIGKTSPIPQDDAQGQASRYSKRDHSTSLRHSESGMVDQVLLTTNADGLRFVKVRMRSVRIPQIGDKFSSRHGQKGTVGMTYTQEDMPWTIEGITPDIIVNPHAIPSRMTIGQLIECIMGKVAAQMGKEGDATPFTDVTVDNISKALHKCNYQMRGFETMYNGHTGRKLTAMIFLGPTYYQRLKHMVDDKIHSRGRGPVQILTRQPAEGRSRDGGLRFGEMERDCMIAHGAAFFLKERLFDQSDAYRVHVCEKCGLIAIANLKKNSFECRGCKNKTDIVQVHIPYACKLLFQELMAMAIAPRMLTHDMKTGKDQKKR

SEQ ID NO: 1443 - protein, 252 aa, Zea mays
  VARIANT 141: note = Ancestral polymorphism is D, Derived polymorphism is Y
  VARIANT 80..252: note = Derived polymorphism lacks residues 80 to 252
  VARIANT 41: note = Ancestral polymorphism is D, Derived polymorphism is V
MPPGAGSLGERRRPPGKEVFYAIEVLLALEYLHVIRVVYRDLKTENVLVREDGHIMLSDFDLSGRLCGLVDANEIFNMLRPQVHAPNPPASSPHASCPSSSARGAQRAAAPTRNPRAASLGSGLVSDLDLAVMPYNFLAIDSSIIKSPPMIPKNDRIRFPKCKIISKQESIKNIGRGGRAGACRAQTFGSQGGGRAWMKEEFAASEARTFGSWGPIGGRGGSCKGAISGRVWSASRVAATALRDDGDIKREV

SEQ ID NO: 1444 - protein, 416 aa, Zea mays
  VARIANT 206: note = Ancestral polymorphism is A, Derived polymorphism is V
MHLPPLRRVPAALLVPARGLLEARVPWVRERALDHVVERERHLVPFLLAKDVLLAATPPPHAVPLHSLPSTIPFPFRPLRFLRLYPSAFALSPHPIEVSPTPRLSALHAAEAQVVDATVPDAADRLLRLLMLAPSRALPLRLVARLRLDLGLASDFQRSLLPNYPDYFALSPDGSLLELVCYRKDLAVSSMQSYAQRTGGYKVGDVVAFPLSFPRGFELDKKVRKWLDEWQRLPYISPYEDGSHLTPRSDITEKRTVAVLHEVLSLTVGKKMEKEVLVKLGEALRLPPGFRKVVAKHPGIFYISHKLRTQTVVLRESYRRHMLVDKHPMMGIRYQYMHLMHMGKEEVGKGKGKDRRSSRSEQIIGEEFGATVDDDENEEYDDEDDVAEDDMEVGVASEDQDSDDDVDEDIKEQISH

SEQ ID NO: 1445 - protein, 396 aa, Zea mays
  VARIANT 358: note = Ancestral polymorphism is E, Derived polymorphism is G
  VARIANT 274: note = Ancestral polymorphism is Q, Derived polymorphism is L
  VARIANT 272: note = Ancestral polymorphism is R, Derived polymorphism is C
  VARIANT 227: note = Ancestral polymorphism is S, Derived polymorphism is A
  VARIANT 207: note = Ancestral polymorphism is R, Derived polymorphism is L
  VARIANT 107: note = Ancestral polymorphism is C, Derived polymorphism is Y
  VARIANT 99: note = Ancestral polymorphism is A, Derived polymorphism is T
MPIDDPNLAAYWDDHDPAFNPYTSAFQSTLLANPPSDYGSRWVSPAAPRGYPAPTLGEVRFRLLRGPMEPELLSSLITSTHVARLLMDGDEQVRRSVLATFKCDVRCFMKRQIVLLAMVRACMWRPDEIQDIVRTVYCTNGFLSGVVKNNHGLTALKELITAVVVHGRLLRPLIQCLLREPLFYQSPELVEHCFVTMPYDHSKFLILFAIVHNVELLSTSLGSRSMAQCFMYARDRELENIETYILDCTTALATSKYGNYFLQRAIEYGGERLQVDIAKRIAADVVSLSLDQFGSYVVESCFLQIMRSTMAPLQLVLDAFLALGDDDLAELVQGSFSNYVVSKLLRVAKDPKPAHARELARRIERLPTAVHREMHARRVMVEVRKTLQRPQAIRLY

SEQ ID NO: 1446 - protein, 179 aa, Zea mays
  VARIANT 83: note = Ancestral polymorphism is H, Derived polymorphism is P
MGDLNFTSSQQLPPYAPLPVDTLAPPAIVPPLAPPASVPPAPTFVVPSARSTSKQTLHPFNTNPFDLDGQEMTSEAQSMSAIHEAREGEGSKSRKRKQSHVGAALEDYVEFKKCQTNKTLDALKELSMRKCMKEMEAIDGFTDEEKSYAVEVFESEINREAFMSTMNHNVRRMWLKRKI

SEQ ID NO: 1447 - protein, 233 aa, Zea mays
  VARIANT 12..233: note = Derived polymorphism lacks residues 12 to 233
  VARIANT 72: note = Ancestral polymorphism is G, Derived polymorphism is D
  VARIANT 214: note = Ancestral polymorphism is S, Derived polymorphism is C
MHPSVYKVGLQYLSGEVSGGNGRCIAMLLAFREAIKDYTTPPNKTLGRDLSAKISSYVSFLIECRPLSISMGNAIRFLKSRIAKLAHALSESEAKTSLQSDIDRFINEKIVLADKVIVSHAITKVRDNDVLLTYGSSSIVEMILDYAHELGRNFRVVVVDSRPKLEGQGLLQSLVGKGISCTYTHINAISYIMHEVTRVLLGASSILSNGTVYSRVGNLGLHRLPWWHMHLEF

SEQ ID NO: 1448 - protein, 125 aa, Zea mays
  VARIANT 118: note = Ancestral polymorphism is D, Derived polymorphism is Y
  VARIANT 114..125: note = Derived polymorphism lacks residues 114 to 125
  VARIANT 85: note = Ancestral polymorphism is H, Derived polymorphism is P
  VARIANT 83: note = Ancestral polymorphism is A, Derived polymorphism is V
  VARIANT 74: note = Ancestral polymorphism is P, Derived polymorphism is L
  VARIANT 62: note = Ancestral polymorphism is D, Derived polymorphism is G
  VARIANT 61: note = Ancestral polymorphism is R, Derived polymorphism is L
  VARIANT 50: note = Ancestral polymorphism is V, Derived polymorphism is I
MAATDVAARGLEQGDGPIVLIPAPTRELAVQIQEESTKFGSYSRTRSTCVYGGAPKGPQIRGLRRGVEIVIATPGRLIDMLEAGHTNLRRVTYLVLDEADQMLDMGNLKKLAAQSQTDDEDVWWE

SEQ ID NO: 1449 - protein, 154 aa, Zea mays
  VARIANT 96: note = Ancestral polymorphism is C, Derived polymorphism is F
  VARIANT 83: note = Ancestral polymorphism is L, Derived polymorphism is R
  VARIANT 27: note = Ancestral polymorphism is S, Derived polymorphism is N
MNADETQPLEPSLPPSRPSSWSSSGSNGGVEYTSLRDMLAEAGAGPGSGGGSFWDTAGPTIDFDASNINIRNQLLKHAASAYLQSAIVVPPRDRGCLSRLWTWLLHRRRCRILLRPCPECCSAGDPARLCAASVAGSARRLGAFLSGCVARVWT

SEQ ID NO: 1450 - protein, 488 aa, Zea mays
  VARIANT 99..488: note = Derived polymorphism lacks residues 99 to 488
MATALARRGAAALARWRGMCSSSASAPRSAAALSSEELMRMEQDCSAHNYHPIPMVFSKGEGSHIVDPEGNKYIDFLSAYSAVNQGHCHPKVLRALIEQAERLTLSSRAFYNDKFPIFAEYLTSMFGYDMMLPMNTGAEGVETAIKLARKWGYEKKHIPKNEALLVSCCGCFHGRTLGVISMSCDNDATRGFGPLVPGHLKVDFGDIDGLKKIFEELGDRICGFLFEPIQGEAGVVIPPDGYLKGARDLCSKHNVLMIADEIQTGIARTGKMLACDWENIRPDMVILGKALGAGVVPVSAVLADKDVMLCIRPGEHGRYDQISSLFFFYLTTYSTFGGNPLASAVAVASLKVVRDEGLVERAAKLGQEFRDQLQKVQQKFPQILREVRGRGLLNAVDLNNDALSPASAYDICIKLKERGILAKPTHDTIIRLAPPLTISPEELAEASKALSDVLEHDLPQLQLQKQIKKPESEAEKPVCDRCGRDLYG

SEQ ID NO: 1451 - protein, 714 aa, Zea mays
  VARIANT 224: note = Ancestral polymorphism is I, Derived polymorphism is N
  VARIANT 383: note = Ancestral polymorphism is F, Derived polymorphism is S
MSFKIQLLSSIAIFAFALHLHPCVSTEFRRELSSWTTGIATWYGDANGAGSEGGACGYQYAVDQPPFSSLIAAGSPFIYDSGNGCGSCYQVVCSSNQACSGYPVTVVITDQGPGGGPCLSQASDGMCMNEGAHFDMSGTAFGAMAKPGMADQLRAAGLLQIQYTRVQCEWPGVDVTFSVDSGSNPNYLAVLIEYEDCESDLSAVDIMQSSAGQWVPMQHSWGAIWRLDSGSALQGPFHLRLTFSSGRVLIASNAIPAGWNAGVAYRAGGVAVTRARPRSGGSQAGEAAAGTFRGLVYHLLMFVQTANQVISEFPQQRASINPAIPASFSPISGARIPLRLHAPRQFHDASPLTSVLTQHPGGWNPQRKTDSQSTVLPKSSSISFMKIQVRIKSIKVSIFLPPETLAKVCCMASTLQLLFSIAITALAFFLHPCASTDEFHRELYGWSNGIATWYGAADGAGTDGGACGYQNAVDQPPFSSMIAAGCSSIYDSGKGCGSCYQAVCTGNDACSGNPVTVVITDECPDCPCPDEQVHFDMSGTAFGALAKPGQESQLRGAGAIQIQYTRVQCEWPGVDVTFSVEPGSNPNYLAVLIEYEDSDSDLDSVDMMQTQGGTTGQWVPMQQSWGAVWKINSGSVLQGPFNIRLTFSSGRALVASNAIPAGWNAGVAYRSGGVAVTRARPRSGACRGYEAAGTLDGLVHRHLVVLLLLVLLTL

SEQ ID NO: 1452 - protein, 232 aa, Zea mays
  VARIANT 185: note = Ancestral polymorphism is G, Derived polymorphism is A
MGSVRVQQQQQQQRGRVVESEDRSQTKMARRTTREPAAAVVLMLLLAAATAAAAAEEEALPMEAYFSAAELARIAGYGEEPVSSVSVSGQLTCELCLRPGSPLLALEMAGAKVAVTCDCESQHPIPSDEPDSLALVAATTDESGNFTIDLPARLHATPDLEKACAVKVLRLPAGSGSCRLRHRAGDAYRLRLASAEDGARAYTAGVIRLRDGDTPSDRCVGARGGPRVSGRR

SEQ ID NO: 1453 - protein, 292 aa, Zea mays
  VARIANT 129: note = Ancestral polymorphism is G, Derived polymorphism is R
  VARIANT 130: note = Ancestral polymorphism is G, Derived polymorphism is V
  VARIANT 140: note = Ancestral polymorphism is D, Derived polymorphism is H
  VARIANT 158: note = Ancestral polymorphism is E, Derived polymorphism is Q
  VARIANT 205: note = Ancestral polymorphism is T, Derived polymorphism is I
  VARIANT 218..292: note = Derived polymorphism lacks residues 218 to 292
  VARIANT 244: note = Ancestral polymorphism is R, Derived polymorphism is T
MDSGPVPTRPTGGSAAVASSSSSLIFLGTGCSGALPDARCLIQPSEPPCTVCSTALSLPPDRNPNYRCNTSLLVDYCHDDGAHRYILIDVGKTFREQVLRWFVHHEVPSIDSVSVAARFPNLVEQKLQGGDDFARPAQLHWTIIEGDVDKPFVASELQFWPLPVMHGEDYVCLGFLFGRKARVAYLSDVSRILPRTEHAISKSGTATGQGQLDLLILETNRLHGAGDGRSCHLTLSQSLDAVKRIRPKRALLIGMNHEFEHHRENQLLARWSCRERIPVQLAHDGLRVFIDL

SEQ ID NO: 1454 - protein, 756 aa, Zea mays
  VARIANT 641..756: note = Derived polymorphism lacks residues 641 to 756
  VARIANT 523..756: note = Derived polymorphism lacks residues 523 to 756
  VARIANT 236..756: note = Derived polymorphism lacks residues 236 to 756
MASMNATRWSLMTRLAEEAAGNGNSLRLANGTLKRTWIRRAAHTWCTGWHSAPGTSPPTSAPGASPSSSTSCRSNSRPNNTYGIVKGSSCYVAYKVDGDLGITIPPEKISDWTNIVLAYEPVWAIGTGKVATPAQAQEVHGGLRKWLHSNVSPAVAELTRIIYGGSVNGANCKELAAQPDVDGFLVCGASLKVNRDRYNDGSIKHSLLKQSSLDLLTIETPGLKKNDSFSRWMSKELEESSIETVKVLDGSNVLTNEQLDAYVVTLHFLKTNYSAFSMFHQVVHILVQIQSCHSLDLPRIDRTVRYSLRSQGAHIPTFEHVPESSVSIAAYLWASGPPYLFSWLNPQISAQDMMHPELLAKLVSNNFCTMPAKVVLQLTTAFREGGLCNRNGTFSYKDHLRECQTHVLALAGDKDLICPPDAVYETVKLIPNHKVDYRVFGKPQGPHYAHYDLVGGRLEHACADRCPELRRFCLQEAGVIHDSPVRRRKAGERRELDVFDDEPLDDESFEKGTGPRRFRYGELAMATSFFSEKEKLGEGGFGSVYRGYLKDLDLHVAIKRVSKSSKQGRKEYVSEVKITSRLRHRNLVQLIGWCHVGDELLLVYELMPNGSLDSHVHSTGNVLSWQRRHEIVLGIGSALLYLHQEWEQCVLHRDIKPSNVMLDASFNAKLGDFGLARLVDHERQSHTTALAGTMGYMDPECMFSGSASTSSDVYSFGVVVLEVATGRRPIVDTEEEHPMSTSIFFFFILLPQLRSS

SEQ ID NO: 1455 - protein, 629 aa, Zea mays
  VARIANT 35: note = Ancestral polymorphism is G, Derived polymorphism is E
  VARIANT 123..629: note = Derived polymorphism lacks residues 123 to 629
  VARIANT 136..629: note = Derived polymorphism lacks residues 136 to 629
  VARIANT 137..629: note = Derived polymorphism lacks residues 137 to 629
MASVKLGSKPDAFKRQGQAWFCTTGLPSDVTVEVGDMSFHLHKFPLLSKSAFLERSIEENSDQEECIIKLNDIPGGAKSFELVARFCYGVKIELSPANVVYLRCASEHLEMTEEVAEENLIAQSEMFLNQVVLRNWKDSLAALETCDDLLPHAEDLQIVNRCIESLASKATSNPNLFGWPIREHGMMQSPGGSVLWNGISTGARPRNFNSDWWYGDASSLSFPMYKRLISTMESRGIRPEIIAGSLTYYAKKYLPGLRRHSHSMGTMPLTATLSEVEQKKLLEEIDRLLPLHRGIASTKVLLGLLRTAMILKASPTCISNLEKRIGMQLDQATLEDLLLPNFSYTMETLYNVECVHRILDHFLAMDQANGGESPCLDDVMASPSLTPITSVAKLIDGYLAEIAPDINLKPPKFQALASAIPEYARPLDDGLYRAIDIYLKAHSWLSEAEREQFCRLLDCQKLSLEACTHAAQNERLPLRVVVQVLFFEQLQLRTSIAGCLLVSDNLEGSRPLRSGIATSGEAGGWATAVRENQVLKVGMDNMRTRLAELEKECSSMRQEIEKLGGRAGKGGGGGWASRVVPRRLGLKVRSQMCSAQEGSVSEQHRSMSAKLDKLQAKVSKQKKQLAADA

SEQ ID NO: 1456 - protein, 602 aa, Zea mays
  VARIANT 183..602: note = Derived polymorphism lacks residues 183 to 602
  VARIANT 502..602: note = Derived polymorphism lacks residues 502 to 602
MAVGGDANGGGGGVRQRQRGCSCTKADFFPEESFSSWSAYGRALRSTGPRLADRLTSRSLESTELHEVRARSGADMKRDLTWWDLVWFGVGAVIGAGIFVLTGQEAREDVGPAVVVSYVVSGVSAMLSVFCYTEFAVEIPVAGGSFAYLRVELGDFMAFVAAGNILLEYCIGGAAVARAWTSYFATLLNHQPSDFRIHASSLSADYSELDPIAVVVIALVCIFAVASTKGTSRFNYVLSIVHIAVIVFIIVAGLTKADAANMRDFMPFGVRGIFSASAVLFFAYIGFDAVSTMAEETKNPARDIPIGLVGAMTLTTALYCVLAVTLCLMQPYASIDKDAPFSVAFSARGMDWAKYIVAFGALKGMTTVLLVSAVGQARYLTHIARTHMMPPWLAQVHPRTGTPVNATVVMLVATAIIAFFTDLGILSNLLSISTLFIFMLVAVALLVRRYYVAGETTVANRNKLAACIIAILATSSATATCWGVNVNGWVPYAVTVPAWFASTVCLWAFVPQARAPKLWGVPLVPWLPSASIAINVFLLGSIDYKSFMRFGFWTAGLLVYYLFVGLHASYDTAKALAADSAMAKVEDGDGKPARGAVHNGEY

SEQ ID NO: 1457 - protein, 276 aa, Zea mays
  VARIANT 28: note = Ancestral polymorphism is D, Derived polymorphism is V
  VARIANT 50: note = Ancestral polymorphism is H, Derived polymorphism is L
  VARIANT 51: note = Ancestral polymorphism is Q, Derived polymorphism is R
  VARIANT 123: note = Ancestral polymorphism is H, Derived polymorphism is Y
  VARIANT 178..276: note = Derived polymorphism lacks residues 178 to 276
  VARIANT 182..276: note = Derived polymorphism lacks residues 182 to 276
  VARIANT 239..276: note = Derived polymorphism lacks residues 239 to 276
  VARIANT 246..276: note = Derived polymorphism lacks residues 246 to 276
MSPIRFGYEALELRNGGSDYFGKGVLKDISQPNFEANPPDGVLAVPLLRHQSWPGLPRGVEFNPSDSDLLWHLAAEVGNALAERHPFINEFIKFVDDVREFICTHPQHIPGVRQDGRASYFFHRSFEPYINENDVNNCWKKIGSHISIILDGTLMGCKEVFALYADMPSDKRSQETDWRLHQYHLQNTVKAESEIVASKIFLASRNSLCELAKETHIESEWWKETVGDESREFGRYMRQREEQEKQEAELFTRAPVTKHDKQIEKRIRRQLHGISK

SEQ ID NO: 1458 - protein, 429 aa, Zea mays
  VARIANT 140: note = Ancestral polymorphism is W, Derived polymorphism is S
MASPPTKGMGVDKLSYEIFSLLERTFLLGPGTPPRALLDGGRVRVLAIDGCGAGAEDALLAAAALARLEAGLRDRTGDPDARVADFFDLAAGAGAGGVLAAMLFLRGADGRPRYTANEALAFVAGSIGGKGWGGRRRGPWAKLFRGAARGGDRSFFRSAFGDATLRDTVAPLLVPCHDLATAAPFVFSRADAVESDSFDFRLRDVCAATCAAGGALASVRSVDGATAIAAASGGVAAMGNPAAAAITHVLHNKQEFPLATGVQDLLVLSIGAGASATVCDGSSTPMPARSPSPRELARVTAEGVADMVDESVAMAFGDACGCKYVRIQARKAPAPLHAAAGAMLAQRSVESVLFRGRRLSERTNAEKVDALAAELVKEQERRRHSPLPNVAIKQVATPRLSSATTTSSGTATARTASTMPSPASWDSRR

SEQ ID NO: 1459 - protein, 443 aa, Zea mays
  VARIANT 138: note = Ancestral polymorphism is S, Derived polymorphism is R
MEAYAATASPPTTTAMCVDKLSHQLFSLLETRLLGGWCPSVPGTPARALLDGGRVRVLAIDGCGAGAEDALLAAAALARLEARLRDRTGDPDARVADFFDVAAGAGAGGVLAAMLLLRGADGRPRYSAQEALAFVAGSVGTKGWCGRRGRWAKLFRRGSRGGDRTLRRVFGDATLRDTVAPLLVPCYDLATAAPFVFSRADAVESDTFDFRLRDVCAAACAAGGAVAPVRSVDGLTAVAAASGGVAAMCNPAGTAITHALHNKQEFPLATGVDDLLVLSIGAGASAANGSSTPMPARSPSPRELARVTAEGVADMVDESLGMAFGRARGSNYVRIQAGKALVPIRTDEASVAAEAMLAQRNVESVLFRERRLSERTNAEKVDALAAELVKEQERRRRSPLPNVAIKQVGTPARLSSATTASSGTGTARTASTMPSPASWESRR

SEQ ID NO: 1460 - protein, 359 aa, Zea mays
  VARIANT 14: note = Ancestral polymorphism is G, Derived polymorphism is R
  VARIANT 191: note = Ancestral polymorphism is G, Derived polymorphism is S
  VARIANT 249: note = Ancestral polymorphism is T, Derived polymorphism is N
MPGSSPCPAAGYSGSGNGSHSAIVAGAVTGSHVLKIVFYSRTKEVPNCQVIKSRHFCLGGHTWFVQYYPNGNSADNVNFISLFLTMHGAVAGKAVKAQVTISLLDQDGEPVPSYTQVTTFVDFAEKGSWGYPEFIERKALEESEHLRDDSFTVRFDVTIMSDIQTVAMPSVVVPPSDMHRHYADLLLSKEGADVKFRIGGQTFSAHRLVLSTRSPVFKAELFGPMRESTTTNAIRIDDMEPEVFDALLTFIYTDTLPETKDGEGCAMAQHLLVAADRYDLERLKLICEDKLCRYIDTGSAATILALAEKHNCHGLKDACFALLSSAATLGAFMETDGFDHLTVSCPSLLKELFSKFVPT

SEQ ID NO: 1461 - protein, 520 aa, Zea mays
  VARIANT 97..520: note = Derived polymorphism lacks residues 97 to 520
MFIESFRVESPHVRYGPTEIESEYRYDTTELVHEGKDGASRWVVRPKSVKYNFRTRTAVPKLGVMLVGWGGNNGSTLTAGVIANREGISWATKDKVQQANYYGSLTQASTIRVGSYNGEEIYAPFKSLLPMVNPDDIVFGGWDISNMNLADSMTRAKVLDIDLQKQLRPYMESMVPLPGIYDPDFIAANQGSRANSVIKGTKKEQVEQIIKDIRYMDMDANVPWEFKEKNKVDKIVVLWTANTERYSNVCAGLNDTMENLLASVDKNEAEVSPSTLYAIACVMEGVPFINGSPQNTFVPGLIDLAIKNNCLIGGDDFKSGQTKMKSVLVDFLVGAGIKPTSIVSYNHLGNNDGMNLSAPQTFRSKEISKSNVVDDMVSSNAILYEPGEHPDHVVVIKYVPYVGDSKRAMDEYTSEIFMGGKNTIVLHNTCEDSLLAAPIILDLVLLAELSTRIQLKAEGEDKFHSFHPVATILSYLTKAPLVPPGTPVVNALAKQRAMLENIMRACVGLAPENNMILEYK

SEQ ID NO: 1462 - protein, 154 aa, Zea mays
  VARIANT 7: note = Ancestral polymorphism is V, Derived polymorphism is E
  VARIANT 17: note = Ancestral polymorphism is S, Derived polymorphism is N
  VARIANT 23: note = Ancestral polymorphism is K, Derived polymorphism is R
  VARIANT 26: note = Ancestral polymorphism is D, Derived polymorphism is Y
  VARIANT 33: note = Ancestral polymorphism is A, Derived polymorphism is T
  VARIANT 39: note = Ancestral polymorphism is I, Derived polymorphism is T
  VARIANT 43: note = Ancestral polymorphism is H, Derived polymorphism is N
  VARIANT 57: note = Ancestral polymorphism is V, Derived polymorphism is I
  VARIANT 61: note = Ancestral polymorphism is V, Derived polymorphism is F
  VARIANT 77: note = Ancestral polymorphism is T, Derived polymorphism is A
  VARIANT 80: note = Ancestral polymorphism is C, Derived polymorphism is Y
  VARIANT 96: note = Ancestral polymorphism is F, Derived polymorphism is I
  VARIANT 115: note = Ancestral polymorphism is I, Derived polymorphism is T
  VARIANT 135..154: note = Derived polymorphism lacks residues 135 to 154
MELYPIVVPYCQSSINSLTFSLKEFDLSVPLDTDEITRIMDKNLKTLALVYVGIKFVKLDVELQNAPFFVAKLAIKALPCVILFKKGIDVDRLVGFQDLRSKEDFPTRALEHILILKTKGIIDEKKKDDDDDDEESEAKNRRVRSSTAQDSDSD

SEQ ID NO: 1463 - protein, 79 aa, Zea mays
  VARIANT 14: note = Ancestral polymorphism is A, Derived polymorphism is T
  VARIANT 16: note = Ancestral polymorphism is R, Derived polymorphism is C
  VARIANT 18: note = Ancestral polymorphism is R, Derived polymorphism is C
  VARIANT 24: note = Ancestral polymorphism is R, Derived polymorphism is C
  VARIANT 27: note = Ancestral polymorphism is A, Derived polymorphism is V
  VARIANT 32: note = Ancestral polymorphism is R, Derived polymorphism is H
  VARIANT 58: note = Ancestral polymorphism is S, Derived polymorphism is L
  VARIANT 61: note = Ancestral polymorphism is A, Derived polymorphism is V
MAIASRVSRLEADAARLRRDLADRDRAEADLRACLADSDARLAAALDENAKLAKERDSLAATVKKLTRNLAKVHPLLAF

SEQ ID NO: 1464 - protein, 201 aa, Zea mays
  VARIANT 13: note = Ancestral polymorphism is A, Derived polymorphism is G
MARVLAAIAVATAFHLLAMLHGASAARPMGRQQAAAFRTGTLALAPAGDQNQQRRTAAAAAAEAGKWLPFAGVHHHLPAPAYWAHRPAPWVGAGGLGGAGAVEGEGAEGEVLVRERERRQRPMYEGEGTITRQEQLAMWASLLNPEGKGRTATGWLPAPGAGEVAYEEPVKAADAVEGAEADDPAADGARAGQTYWGNNGN

SEQ ID NO: 1465 - protein, 294 aa, Zea mays
  VARIANT 21: note = Ancestral polymorphism is E, Derived polymorphism is D
  VARIANT 74: note = Ancestral polymorphism is W, Derived polymorphism is S
  VARIANT 83: note = Ancestral polymorphism is R, Derived polymorphism is S
  VARIANT 161: note = Ancestral polymorphism is H, Derived polymorphism is Y
  VARIANT 168: note = Ancestral polymorphism is P, Derived polymorphism is L
METASAASVQGPSAAPWADMDTDCLVHVFGRLDLEDLAAAAPLVCRGWRRAAAEPSLWRALDLRRDHVARFMPWGALAAAFARRYAVRGFSLAGFLRICVWRARGSAEDVALPPLLAEPAHEIDHISLRCPRLRRLALPHLTVGDEARLPDLVPRWPLLEHLELETKPSSSSFPALAAQVALHCPAFASLKTSGAFKREDAAALARSLPRLRSLCVDRSYLPKEQLLAILAACRDLREFSARSCVGFDDEDEEVLRHGARILRFDVGGSKLVDELDDEFPGGGGFCDSSYVDVM

SEQ ID NO: 1466 - protein, 734 aa, Zea mays
  VARIANT 460..734: note = Derived polymorphism lacks residues 460 to 734
MDASDSPPSGRPSSSAVALYGDSPIFDFVDSLSPIAPPKPLGSTQSVQLFKSSNLAPVSSIFTSPQVNPRKESKSTISCIELSGSAALAPETCTPFEDATNSPSKWLQSTLFGSETLGDANKQDIDGKPNHTADVEHVKPSSTCSDQNGFDQMDSSTSGRNVQENELAKQDSNDLAPCSLNHLITHCGTGNSVISISDLALEAQQQSWKVKGDSIISSTSLAVDQENLEDSRREDFVEQFGSYIQSAADGTHVYYADAAAGVTINHDQEMLPAIIRNQLDSNDYILDTSKVSIDGTALSQHQYGTHRCSLFNDKSGTSNKSMQNISDINPASICGNNYLNPVDPALCALPGIGLHLNTVALNLSDMPLTINHPLLSEQTSPATVIPGSETVLYGSEVFTHVDNYSSQKTMPNADKSGQQIHKKKRRKLQKDDGESCRHCNCRRSKCLKLYCPCFAAKVYCSSLCSCQGCSNNHAHEELVSCTRKRTESHNPLAFAPTVTHTYGTVLEFGDDSNKTPASARHKRGCNCRKSSCLKKYCECFQSGVGCCISCRCMSCKNSFGKREGVLLLTTEKLEKGGKAKGTHGEEDKLAFGKHHVVSQSGDIPAYENPLVTPLLETYRSPFLLPSTCSKLPPPTAGCSYGLHNPRPPMKSDVLFSPLEDVLHNPAEMVLGNGFSDTQEVGSSCTTSVKVVSPNKKRVASLQIGTALSPIGSSSRKLVLKSFPSLTGDADSEPH

SEQ ID NO: 1467 - protein, 143 aa, Zea mays
  VARIANT 81: note = Ancestral polymorphism is A, Derived polymorphism is D
  VARIANT 91: note = Ancestral polymorphism is A, Derived polymorphism is V
  VARIANT 99: note = Ancestral polymorphism is K, Derived polymorphism is I
MTESLVRNKPGMASIKEMPVLQDGPPPGGFAPVRYARRIPTSGPSATAIFLTAFGAFAYGMYQVGQGNKVRRALKEEKIAARSAILPMLQAEEDERFVKEWKKYLEEEARIMKDVPGWKVGESVYNSGKWMPPATGELRPEVW

SEQ ID NO: 1468 - protein, 95 aa, Zea mays
  VARIANT 8..95: note = Derived polymorphism lacks residues 8 to 95
  VARIANT 27: note = Ancestral polymorphism is R, Derived polymorphism is H
  VARIANT 49: note = Ancestral polymorphism is K, Derived polymorphism is N
MAATGVSRGWREYTGRVWHAAEELCLRILTSSAISLLFALLLHPPLNRKVRTRPYYQIKADVAFIGLSSSKAKVDIAPNNSVYTSFLWLGEAYAT

SEQ ID NO: 1469 - protein, 581 aa, Zea mays
  VARIANT 263: note = Ancestral polymorphism is M, Derived polymorphism is T
  VARIANT 300: note = Ancestral polymorphism is S, Derived polymorphism is I
  VARIANT 412..581: note = Derived polymorphism lacks residues 412 to 581
  VARIANT 414..581: note = Derived polymorphism lacks residues 414 to 581
  VARIANT 457..581: note = Derived polymorphism lacks residues 457 to 581
MATVWSGCSTSCGSFGQELPPRGKRGGGEGTRFLPRRRGRIRGDARQTQALSAAMVTVGACVCRAAPCLLDSVVDGTEDVSVGFGGIDGEPLADGYDGGKRRGPRRRPTRPTVFQKEVGARTAPPAMASEPDSKSEHGVSRLHFLEERDEETLSRRLIKLSQNNKVRSATELFDSMRASGLQPSAHACNSLLACYVRRSPLADAMRMFEFMKAKGMATGHTYTMILKAVASNQGYVSALEMFDKIEEEEGSKKIIDVIVYNTMISVCGRAKEWMLVERLWRRLEQHSLNGTLLTYDLLVSIFVQCGQSELAIAAYQEMLQKGLDPSEDIMKAIIASCTKEGKWEFAMSTFSRMLRAGMKPSLILFNSIINSLGKAGQDELAFRMYHLLEKSGLKPDQYTWSALLLALYRSGRCWDCLKLFHGIKGKHPTLLNDHLYNTALMSCEKLGQWEHGLQLLWLMEKRGLKLSVVSYNHVIGACEVASKPKVALKVYQRMINQRCSPDTFTHLSVIRACIWGSLWTEVEDILEEVAPDSSIYNAVIHGLCLRGKTGLANKVYAKMRSMGLVPDGKTRAFMLQHIATD

SEQ ID NO: 1470 - protein, 541 aa, Zea mays
  VARIANT 6: note = Ancestral polymorphism is L, Derived polymorphism is R
  VARIANT 71: note = Ancestral polymorphism is L, Derived polymorphism is P
MELRRLLLLALICLRAPRLASAQQPDEATVIVKGSTRIAETDDNYVCATIDWWPPEKCNYNQCPWGQASILNLDLDHPFLAQAIQAFDHLRIRLGGSLQDRVVYDVGTESPCSPFTNVSNALFGFSVGCLGMDRWDKLNDLFERTGAIVTFGVNALYGRYNVRRSIWAGKWNSTNAYDFVKYTISKGYPVGSWEFGNELSGHGIGAKVDAKLYGKDVIEFKSILRQLYKAPLSQPLLLAPGGFFDQQWYSQLLETSGHGVVNALSHHVYNLGGGNDVHLIRKILDPKYLDRAEDTYRDMQLTIQRHGTWASAWVSESGGVFNNGGQLVSNTFINSIWYLDQLGMASKYNTKVFCRQTLIGGNYGLLDTQTFLPNPDYYSALLWHRLMGNGVLSVDINAPRQIRAYAHCRKQQQGITILLINLSNTTGYNVTLQNDINVSLGKRPDLEKRSSFTHRLRKAVSWLGRKPASNTRRREEYHLTAKDGDLQSKTMLLNGAPLELGDAGSIPAMDPVLVAVDLPVQLAPTSIAFVVLPKFEAKACS

SEQ ID NO: 1471 - protein, 487 aa, Zea mays
  VARIANT 329: note = Ancestral polymorphism is G, Derived polymorphism is R
  VARIANT 237..487: note = Derived polymorphism lacks residues 237 to 487
  VARIANT 198: note = Ancestral polymorphism is P, Derived polymorphism is S
  VARIANT 178..487: note = Derived polymorphism lacks residues 178 to 487
MLIRQRVICSPTSFRFKLSDCLGRRIGPSFLGRQGGDSTRLVQDLYRTFDQVNNEESPSDEKLPESFRDFLLEMKDNHYDARTFAVRLKATMENMDKEVKRSRLAEQLYKHYAATAIPKGIHCLSLRLTDEYSSNAHARKQLPPPELLPLLSDNSFQHYILASDNILAASVVVSSTVRSSSVPEKVVFHVITDKKTYPGMHSWFALNSVSPAIVEVKGVHQFDWLTRENVPVLEAIESHRGVRNHYHGDHGTVSSASDNPRMLASKLQARSPKYISLLNHLRIYLPELFPNLNKVVFLDDDIVVQRDLSPLWAINLEGKVNGAVETCRGEDSWVMSKRFRTYFNFSHPVIARSLDPDECAWAYGMNIFDLAVWRKTNIRDTYHFWLKENLKSGLTLWKFGTLPPALIAFRGHVHGIDPSWHLLGLGYQDKTDIESVRRAAVIHYNGQCKPWLDIAFKNLQPFWTNHVNYSNDFVRNCHILEPERVKE

SEQ ID NO: 1472 - protein, 143 aa, Zea mays
  VARIANT 9: note = Ancestral polymorphism is D, Derived polymorphism is A
  VARIANT 25: note = Ancestral polymorphism is K, Derived polymorphism is M
  VARIANT 57: note = Ancestral polymorphism is D, Derived polymorphism is G
  VARIANT 78: note = Ancestral polymorphism is H, Derived polymorphism is R
  VARIANT 86: note = Ancestral polymorphism is Y, Derived polymorphism is D
  VARIANT 106: note = Ancestral polymorphism is M, Derived polymorphism is V
MQVGDGGGDSADLRGRHRIQAELKKLEQEARFLESKTLLILLHQMIGDSVLKTETSDEACAIECRRNLKSSIKRIRYHLRCKSNFYMACCWRLTGLFYVARFLIAMERKADPLLPVSAGPVNQSWDRWFEGPQDLRGCKCWFL

SEQ ID NO: 1473 - protein, 103 aa, Zea mays
  VARIANT 78: note = Ancestral polymorphism is N, Derived polymorphism is I
  VARIANT 50: note = Ancestral polymorphism is H, Derived polymorphism is P
  VARIANT 45..103: note = Derived polymorphism lacks residues 45 to 103
  VARIANT 29: note = Ancestral polymorphism is P, Derived polymorphism is H
  VARIANT 25..103: note = Derived polymorphism lacks residues 25 to 103
  VARIANT 20: note = Ancestral polymorphism is M, Derived polymorphism is I
  VARIANT 15: note = Ancestral polymorphism is E, Derived polymorphism is D
  VARIANT 10..103: note = Derived polymorphism lacks residues 10 to 103
  VARIANT 1: note = Ancestral polymorphism is M, Derived polymorphism is V
METNECQPLYIDIQEFYEGMNMKVEQQAPLLLVERQALNEAMEAEKSVHHLPETRGLCLSEEQIVRTNHVFLESSPYNKDTFLVWQMRVEDLMRCLPLHRGHE

SEQ ID NO: 1474 - protein, 64 aa, Zea mays
  VARIANT 23: note = Ancestral polymorphism is R, Derived polymorphism is G
  VARIANT 49: note = Ancestral polymorphism is I, Derived polymorphism is V
  VARIANT 53..64: note = Derived polymorphism lacks residues 53 to 64
MLQKDRLNLIETTLSSEVDYDSRNEVRVGAGAEDTNITGGIIQLYWSSILERCLDTNDQSLKEA

SEQ ID NO: 1475 - protein, 326 aa, Zea mays
  VARIANT 15: note = Ancestral polymorphism is S, Derived polymorphism is L
MWHSFFSMHRIASRSGLLGRRCYSYAMKGGTSIAGVGDIIAVASGKGGVGKSTTAVNIAVALAKEFKLQVGLLDADIYGPSIPTMMNLHAKPEVNEDMKMIPVENHGVRCMSIGFLVDNDAPIVWRGPMIQCCCFIFTIDVHLSSSMLVILLFYWYQVMSALEKMTRGVAWGDLDILVVDMPPGTGDAQLSMSQRLRLSGALIVSTPQDIALIDARRGANMFRKVQVPILGLVENMSCFKCPKCGEKSYIFGEGGAQRTAEEMDMKLLGDVPLEISIRTGSDEGSPIVISSPNSASAQAYVNVAEKVTQRLNELAEERRMGPEILL

SEQ ID NO: 1476 - protein, 225 aa, Zea mays
  VARIANT 108: note = Ancestral polymorphism is R, Derived polymorphism is W
MLQCLDGVKQLLAVLLKCCHIDLKQPNGLDDPEVLARETVFSVSEVEALYELFKKISSAVIDDGLINKEEFQLALFKTNKKESLFADRVFDLFDTKHNGILGFEEFARALSVFHPNAPLDEKIEFSFQLYDLKQQGFIERQEVKQMVVATLAESGMNLLDEVIESIIDKTFEEADTKHDGKIDKEEWRNLVVRHPSLLKNMTLQYLKDITTTFPSFVFHSQVDDT

SEQ ID NO: 1477 - protein, 503 aa, Zea mays
  VARIANT 315..503: note = Derived polymorphism lacks residues 315 to 503
  VARIANT 295..503: note = Derived polymorphism lacks residues 295 to 503
MGWLSKIFKGPVNRVSRGHYNGNSHEGYSAQHTKSYGVHGNEDEDMDHAIALSLSEEDQRKGKTIDTGHHLDEDEQIAQALQENIGHNLAEDEQLARALQESMNDGPPRQHIPVEDVNSESTPASILPSNIFRTSGLRVCAGCRSPIGRGRFLSCMDSVWHPECFRCYACDRPISEYEFAVHENHAYHRPCYKERFHPKCDVCSSFIPTDKNGLIEYRAHPFWMQKYCPSHENDGTPRCCSCERMEPKDSQYITLDDGRRLCLECLHTAIMETNECQPLYIDIQEFYEGMNMKVEQQVPLLLVERQALNEAMEAEKSVHHLPETRGLCLSEEQIVRTILKGPIGPGNRIIDMVTGPYKLIRRCEVTAILILYGLPRLLTGSILAHEMMHAYLRLKGYRTLSPEVEEGICQVLAHLWLESEITSGSGSMSTTSDASSSSSTSSSSKKGAKTEFEKRLGEFFKYQIETDSSVAYGDGFRAGMRAIERYGLRSTLDHIKMTGSFPC

SEQ ID NO: 1478 - protein, 268 aa, Zea mays
  VARIANT 74: note = Ancestral polymorphism is V, Derived polymorphism is D
  VARIANT 55: note = Ancestral polymorphism is P, Derived polymorphism is S
  VARIANT 5: note = Ancestral polymorphism is R, Derived polymorphism is C
MGGSRWLFHFLFVSVLLHVVRSLESQACHPADLRALLDFSGGWDSKAAGLVGWGPGAAAACCSWTGVACDLGRVVALDLSNRSLHGVISPAVASLDGLAALNLSRNALCGAAPEALARLPMLRALDLSANALSGSFPAAGFPAIEDLNISFNSFDGPHPAFPAAANLTALDVSGNNFSGGINSSALCLSPLQVLRFSGNALFGEIPSGLNRCRALTDLSLDGNYFTGNVPGDLYTLPNLRRLSLQENQLTGNLGNDLGNLSQNVQVSF

SEQ ID NO: 1479 - protein, 95 aa, Zea mays
  VARIANT 63: note = Ancestral polymorphism is S, Derived polymorphism is I
MFLGSLPRRPSKEAAYKQLRSHIIIMASCAAVIRATPYILHFLARDGDIQELKLDLFTVACHSRLMSMCCACATKATVSSRPLQGTMELVATVPA

SEQ ID NO: 1480 - protein, 249 aa, Zea mays
  VARIANT 110: note = Ancestral polymorphism is I, Derived polymorphism is M
MANRPNARPPARTRQSRKSRRGHCSPHDRSDSNGHSAQSVAQRWHRTNSLNPPHRTFDAVATAGGAAASVEEGIEALQSYSKEVSRRLLDSDLASLAVPPSSSVSICFHILISLYEVRSRSIDYKCQKHDFDELRLKVDKVGRINGHGYSCGCPKCHSHSFFDNCCSHLKILHTIELDKSYPQDIFQAGRARVQLKNDDGSPINPAIKTSEQTAYLLSPKLNLEWDYIHIILYIFRSMILVKNLKHHFS

SEQ ID NO: 1481 - protein, 271 aa, Zea mays
  VARIANT 245..271: note = Derived polymorphism lacks residues 245 to 271
  VARIANT 215: note = Ancestral polymorphism is R, Derived polymorphism is L
  VARIANT 176: note = Ancestral polymorphism is S, Derived polymorphism is N
  VARIANT 162: note = Ancestral polymorphism is G, Derived polymorphism is R
  VARIANT 15..271: note = Derived polymorphism lacks residues 15 to 271
MNPTSAMPSAPFRSQISASPGLPGVLPSSRADALRRRRTGSGRSRLLRRTGLARGCGGQRDAQPAANMPLTKHLRVAIIDSNPALKSRSYLGKNSIPDSRLYFNFQRYLDLSLSLYVQVSYRLQGVGTSTLLYRLQQPPTDFFLCSASGRYTVYGLIVTQYGDLEDPISLLRNRESKQTISYSKHIYQLTTSDQSLDTVLRFSALPPVPIVNYFRVFIVNSKLLTDTSCFTVYHICRRIADLLMCLALRLLLQPSWVRQIPINKKNKKDSY

SEQ ID NO: 1482 - protein, 206 aa, Zea mays
  VARIANT 61..206: note = Derived polymorphism lacks residues 61 to 206
  VARIANT 62: note = Ancestral polymorphism is S, Derived polymorphism is A
  VARIANT 64: note = Ancestral polymorphism is C, Derived polymorphism is F
  VARIANT 65: note = Ancestral polymorphism is T, Derived polymorphism is I
  VARIANT 72: note = Ancestral polymorphism is A, Derived polymorphism is D
  VARIANT 74: note = Ancestral polymorphism is P, Derived polymorphism is S
  VARIANT 144: note = Ancestral polymorphism is R, Derived polymorphism is P
MAWTATSLTLHSGESDMPQAACCWSFYVSPYQICFSLIRELNCCTAHLFREDHTVAFLMFGSFCIVRVIAGALPKGLHMLILSKNNISIIERLRELTRLRLLDINYNRISRIGHDHLLGLASCSSLKELYLVGNKISEVDGLHRLLKLKVLDLCHIQSSVATILGVGAEDARKILNNYGTCPILSMVYCALIFLGIIVSVKYFAHG

SEQ ID NO: 1483 - protein, 326 aa, Zea mays
  VARIANT 57: note = Ancestral polymorphism is G, Derived polymorphism is D
MEEGLPPGFRFHPTDEELITYYLTRKVSDFTFSTRAIADVDLNKCEPWDLPGKASMGEKEWYFFSMRDRKYPTGIRTNRATDSGYWKTTGKDKEIFHGGALVGMKKTLVFYRGRAPKGQKTSWVMHEYRLQTKFPYKPSKDEWVVCRVFKKCQVVKVRPPMQDDDASLSPCHDHDASLSLSELDVSSILGGLASAAAAHASSASPHHQGSAAESFAAAHRMDMSAYMSWMAAANPGAAAAMLPWATAPPPGLSSFGNVFAPPSQMLQRPLPFAGCSQPRDLGGVVASGEHAMFGTSVMKAGTMEYDQQQAPPEQQLGVDESTWRAF

SEQ ID NO: 1484 - protein, 139 aa, Zea mays
  VARIANT 93: note = Ancestral polymorphism is T, Derived polymorphism is I
MAWRGAASRSIFAAVRARAASSSSSSAATRLRSAAPIAATPRRTVPAFAFAAARPLAAMAGYPAAVAVRLTGHSATSVRACCELSQGTLFCRTCQALECTLLSSNARVGSLVGLAAFFLHFAECLVCRQTDSTLAATKI

SEQ ID NO: 1485 - protein, 324 aa, Zea mays
  VARIANT 277: note = Ancestral polymorphism is G, Derived polymorphism is C
MMKPGERSRERDADFHYSGHDDEKDRYFFKVLVGDFRERLAVPDKFMQHFTRGLVTSSVTLESRCGRSFHVQVAENLGKVVLQAGWKEFVAAHGLSMGDVLVFKHDGTPRLKVFMFDHSCCEKVPPPCPVKIKREHHVCGGERRETHPEVPSSSCGDASMTFVTASSSSASPSDDASGEWILSPEDQKPRYVPGYILPNGTYLTCVQMQKLKERVRARTSTIPIYGCTVRKSNIRRGSQNMAIPRAYADVYLPFEDRTLTLQRCGESWEVQCRIQKGRRGCKRLAQGWRQFAHDNKLQLGDLCLFELLENTSKYTMDVHVVRAE

SEQ ID NO: 1486 - protein, 573 aa, Zea mays
  VARIANT 10: note = Ancestral polymorphism is E, Derived polymorphism is V
MRKPSKGRKERDVIYHRNDHSDDRGKHFFKILIGEFHERLVSNFLACGILECGHYLLKSEETFVTNVRRMKMVLVFDPSGCEKVPPFFVTKNAMSGGRKREGPLDISSSDANLPMKTPETKKKAWKQRDRRGMTASEDDEAHSVPSYVLPRHTSLDTMQKRKVFSRKYPDVCLPSKSGALILQCHGKSWQVMYCIEVWKDRGESKRLRNGWAQFARDNYLQLGDICLFEPLKTKKCTMNVHIIRKKEYCTKMRKPSNGCKERDVIYHRNDHTDDNGKHFFKILIGDFHKRLVIPVKFAKKFRGKVERNIKLESLGGYTFDVQVAQNLGRIMFQSGWKSFVSAHDLKMFDLLVFKYDGMSRMKVLIFDPSGCEKVPPFFVTKNAMSGGRKREEPQEPLDISSSYADLPMKTPETKKKARKQRDRRGMRSSEDDEAHSVPSCILPRGTILDSMQRRKVKERLRAICSEIPIYVFVVKKSNIFGRSQDMVFSRKYPDVCLPFKSGAVILQCHGKSWEVILEVRKDQGESKRLRIGWAEFARDNNLQLGDICLFEPLKTMKYTMNVHIVRRRVRSGK

SEQ ID NO: 1487 - protein, 429 aa, Zea mays
  VARIANT 160: note = Ancestral polymorphism is S, Derived polymorphism is F
MAKSKSSAKAGPPLLGKYELGHLLGRGNFAKVYHARCLGGGDPVAVKVLDKAGLAATGMASRLLREVSAMRRLSHPNVLRLHEVLATRSKVYLVMELAPGGDLLTRLASLPSRRLPEHAARRVFLQLASALIYSHARGVFHRDVKPQNVLLDAEGNLKVSDFGLAALPDSVRDDGRLHTACGTPAFAAPEVLRRRAYDGAKADAWSCGVILFVLLAGHLPFDDANIADMCRRAHRREYTVPRWVSQPARRLVARLLDPNPATRLAVAELAGHPWFKRSLSVDSQLGGLLDGQAERELAFQAPPALNAFDIISMSPGLDLSGLFGEGRRRREKRFMTTASPERAVERLAQAGARLGYFIVGKKGAERLPLGVLPGLVAMSMEMSEVSPELMLVELRLEGGHGDEDEAFGWEELRVELGDVVTAWHVSEEG

SEQ ID NO: 1488 - protein, 302 aa, Zea mays
  VARIANT 40: note = Ancestral polymorphism is R, Derived polymorphism is Q
  VARIANT 121..302: note = Derived polymorphism lacks residues 121 to 302
MAILAVASPFKTLNPSPPDHSRTRRRLPSSILHLPLPVPRCRRLRCSAKYSEAAAPSASTTTPRPSEIPWSKDICNSVRLIGTVGTDVELRQLPSGSAVARGRLAVWKSATETTWVTLQFWDDMAIVSSEHVKKGDRIFVAGRLVSDTVDEGPEKRHVYYKLAVQQLNFIESQPVRLYESDASQDAPGGRRADYFNFTSNSTDEKNRDNMSSSRSTEELWQAFFANPLDWWDNRTNKKNPRYPDFKHKHTGEALWVDGRNNPNWVTSQLAVLDSRMSSLQDNERKPVSYMYADEFMTLEGNR

SEQ ID NO: 1489 - protein, 461 aa, Zea mays
  VARIANT 130: note = Ancestral polymorphism is H, Derived polymorphism is N
MDAASSSAAPLRLVIFPWLGFGHLLPYLELAERLALRGHRVSFVSTPGNVARLPPLRPAAAPRVDIVALPLPRVDGLPDGAESTNSVPHDKFELLFKAFDGLAAPFAEFLGGCCADEGRRPDWVVLDSFHYWAATAAVEHKVPCAMLLPSAACLAVGRERQSSSGKPAAAPRYESEQNKQYSAKDGASGVSIAERYFLTRERCTIMAIRSSHEWEPEFLPLVAPLVGKPVLPLGLLPPSPDGGRGASANANGEHATVRWLDAQPPSSVLYVALGSEVPLRAEQVHELALGLELAGTGFLWALRNPSGVPDADVLPAGFQERTRGRGLVTTGWVPQPSVLAHAAVGGFLTHCGRNSLIEGLLYGRPLVMLPIFGDQGPNARLMEGKKVGLQVPRDEHDGSFDRHGVAGAARAVMLEEETRGVFVANALKVQAIVADKELQDRYVDEFIQQLLIRGRPCPASS

SEQ ID NO: 1490 - protein, 653 aa, Zea mays
  VARIANT 290..653: note = Derived polymorphism lacks residues 290 to 653
  VARIANT 23..653: note = Derived polymorphism lacks residues 23 to 653
MTPYPHATANDPHDGKRKCEALWPIFRISHQRSHFIYGLYYKRKEISQELYEFLDPGYADYYDRDPKRIKTKIIDSELSVGSVSDKDSEQDCDDVFLKDLRTQCKAKNWKTSKITSKGCGIKNQAKTEDDIDLDKPLIALKQKSPKTSLAKDNVKMNTLRFSPCATKEEDTTSQRDKILSSSLIKATMQDPVLEKLGRKFAELEQSKVVIDCTKIVGEQICCVEVNNTAGALASCAKPDVLCEIKAEDTNYSEFGTSICSIKNPEHSSFKLQQKLVAGDDCVPQSRFMTRTTQLADVSNHPCEQTCSINNFDDITAAKATEVSLLGLTDETSNHQKTSENLTDSDVCKSSTANGFMACSFNQSCHDLVDSDEHWNLFVHRNEHVKLLEELSSVDESCADTQSDLCGSTKMNCTSLEGVVQMQAEGQLDSIVCCGVRPKHMLLDMEIRHTETGIFTFDKTIDLTHPANFVAQDGRLESIVYDVLNNHAQRTASKNESFVGLPETAVTQSSLIDFTVNCFEDKRASVDKILPPNNLDWPLKDKLNSTTDYDICRPINDDEGSEEELVPQHQLYQSCSDKFNLSSAMPEISNAEESQKISAGAQNSSATFLETDGRIKKPIFFLWMKNQLKKTLKKYYCPRERLCHRRLRRSFAVL

SEQ ID NO: 1491 - protein, 798 aa, Zea mays
  VARIANT 692..798: note = Derived polymorphism lacks residues 692 to 798
MNTVCEVCGDIGYRQLLLCCRDCKRCAVHQYCLDKVVYEASLIKWFCYECLQRRGEVTRISSLEKLSSERPLSQVHSRSPVQQLITKSVESVRDAGPWRDRKNESIATKYPSLNRTYPSIKKHTKKKPIVKPMGNCTNRKVRMAKVTTHTSAEASRSCETIGTESSKSNHGKNQQVDHANPVALNTEQSFPLIVNSLGTLGDNHQYHLLETTEGLACKFKKVPQSLAAPLKRLEKRDNVVLGSNNLGSSCFTADLGSSVLGKSGDKSNRMKDIGANLSSKHNDHGNQANQHTLVGSKNMEGKSVKAKHTVVDAHKNTSWTVDSLINVKDKSEVYGDSNRDILNDVTVQLDHRASNELLPRSTATNIPQLATLENDVVDTVMPYSPNGGCEESFSCPGIKNTPSVRERSVDPINISSDSHDTIEASESSERFMECQKASLCRRRKTVKMAMVSSSSEESGEDTISENVSLGYVLACRSSLSKAQKKRVTKLIQEIQPEFTVFISIMRMSNVKLPGPLLGITKEYAIAHFPDKTTNVTLETPGKSKKWHPKFYKRDESRKNLLMGQWLDFVRDNHVQEGDICLFLPTKDEIRHTFMVYILHETTHSRCGAGFQRVGPCLGGASSAKMASEVHIEDEPTAGEHVSSDSDMPENSHEPLESGDSDDPFEPPYFVPCRSPLSKSQKRMVEQRVRAIRSEVPICVAVMKNNNVGIAQRWMLELCSRYASVYLPTKGQNILLQCKGKTWEAKMMFHNGRRWFLNGGWPDFARGNGLRVGDMCLFELKKKKSTLTMAVHIIRKEQF

SEQ ID NO: 1492 - protein, 308 aa, Zea mays
  VARIANT 22: note = Ancestral polymorphism is G, Derived polymorphism is S
  VARIANT 52: note = Ancestral polymorphism is R, Derived polymorphism is W
  VARIANT 62..308: note = Derived polymorphism lacks residues 62 to 308
  VARIANT 109: note = Ancestral polymorphism is G, Derived polymorphism is W
MNALAAGVGAACRDWGFFLAVGHGVPDATVARAVEAGRAFFALPPERKAAVRRTEQAPLGYYDAEHTKNVRDWKEVFDVFPHEPRSLAGAADDELVFVNKWPDDSELPGFRAALEEYAAAMEELALKLLELIARSLHLRPDRLHGFFGDDQTTYMRVNRYPPCPRPDLALGLGRHKDSGALTILLQDDDVGGLEVRRRTDGEWVRVEPVRGSFVVNVGDIVQVWSNDRYESVEHRASVNSEKERFSIPYFFNPAMATLVEPLEEMVSEENPARYASYSWGDFFRTRRRSNFRKLDVDNIQIAQLRKDK

SEQ ID NO: 1493 - protein, 354 aa, Zea mays
  VARIANT 66: note = Ancestral polymorphism is S, Derived polymorphism is R
  VARIANT 217: note = Ancestral polymorphism is C, Derived polymorphism is W
MGERGAEEDGSGGSSLSLMCLEDGADLDAGGSAESADDGEPAVVAHSDAGEDQEEEYMDYLVSKESSFCCSPSSSPVSSDAGAETRPSSTASSSDEWFRCARHATVAWVLEPPDLQTRAYFGFSHRAAYLAVSYMDRFCLRRCMDVSVMPWAARLLAVACLSLAAKMEEYRAPALSEFRAHDDYDFSSVCIRRVELLVLSTLGWRMGGVTPLDYLPWLSSRLRRGGGGGLVAAKAAALIFSAAEAASVLDYRPSTVAVAAVLAAAHGAMTKEALECNMSSLTPSCLLDKDDVHACYSTMLSESSSPTPSKLADKRPPPSSSGSMTYESADAASSFAATAGRSKRARLEMPSIGP

SEQ ID NO: 1494 - protein, 530 aa, Zea mays
  VARIANT 380..530: note = Derived polymorphism lacks residues 380 to 530
MAFRRILSTAVRRRSAVAAAAAGNAREASTAVAAAPGVLAPDATAVRAPVMPYDRIADAVNARLRRLEHPDPRFLRYASPVPSHADHMAILAAPETRVTTLPNGLRIATESSLAARTATVGVWIDAGSRYENEEAVGVAHFVEHMLFKGTGKRSAAQLELEIEDMGGHLNAYTSREQTTYYAKVLDKDVPRAMEVLSDILQNSNLDQARIEREREVILREMGEVEGQSEEVIFDHLHATAFQYTSLGRPILGSAENVKSITKEDLENYIATHYTAPRMVITAAGNVKHEDIVEQAKKLFNKLSTDPTTTNMLVAKQPASFTGSEVRIIDDDMPLAQFAVAFNGASWVDPDSVALMVMQSMLGSWNKSAGGGKHMGSELVQKAAINDIAESVMSFNMNYKDTGLFGVYAVAKADCLDDLAFAIMHEMSKLSYRVTEEDVIRARNQLKSSIQLHLDGSTAVVEDIGRQLLTYGRRIPTPELFARIDAVDASTVKRVANRFIFDQDVAIAAMGPIQGLPDYNWFRRRTYMLRY

SEQ ID NO: 1495 - protein, 118 aa, Zea mays
  VARIANT 108: note = Ancestral polymorphism is A, Derived polymorphism is V
  VARIANT 96: note = Ancestral polymorphism is L, Derived polymorphism is R
  VARIANT 67: note = Ancestral polymorphism is V, Derived polymorphism is I
  VARIANT 46: note = Ancestral polymorphism is V, Derived polymorphism is I
  VARIANT 23: note = Ancestral polymorphism is T, Derived polymorphism is K
MSPDDVRPAASAHPHCVVGRTTTTTKPIGTHGRGEQPSAERGGLAVVMAGAGQRGTLYDSFELNTMVVRLNRMLIGDGAGGRGEPRRPRKAAAGWLNAPKTLFRKMCVFLGGGRRGDG

SEQ ID NO: 1496 - protein, 1198 aa, Zea mays
  VARIANT 133: note = Ancestral polymorphism is A, Derived polymorphism is V
  VARIANT 206..1198: note = Derived polymorphism lacks residues 206 to 1198
  VARIANT 806: note = Ancestral polymorphism is Q, Derived polymorphism is H
MPPARRRPRRGGTPAGAGDDSVPSSSADLLALAATLIPAAATAALKAPPQLKQLVHSLPVSHPLLISLPQALTLALATPSDPDAGSTSDAPPPPPPPPRPAAVLLHLLVTHPTHPPRWEDLVCPLALLHGRLALLATADPPLAALAAACFELAWRADAPGREALVAQTLPYLVALALTSGTSARPILRRLFALRDALPLLDYDDDQSISDFKMLLLRCFVSPLFLKAEEGRKFLALVLGVSEGIARDGLELIRAQVGMTGAKRAAVVAYGEVVFRAWKDGGWVKGEVGEAFLQGMVEGAVHAGSKEVAKAARKILSPFVEQRAVAGVEKLVFQLAEPVLFRSLQVANSNVRHNALHLLLDLFPLEDPDVTKDVNDPLLEKQFFLIDRLLMDEYPEIRTVAVEGISRILNQYWEIVPAPTISKFLSKIVDDMSKDSCNEVRLSTLNGLIYLLGNPQSHEILKVLLPRLSDMISDTALSIRAAAVDLLLAIRDLRSFQYNKVVGLGTLLSSLANDHPRIAQKITKLLIPSYFPSKLSPKEACARCIALIKRSPTAGARFCEFALSEGSSPRSIVELVKYSITLALSQTGLNSDQIDGLIIASVNLIKSLSNERSSLAALREFLANGKLRLVLQVAVSERARAALLGIVPVVLPDELSVLHEECMDIVVNAARISKQEEYQETVLEAHKLIVLGGWSDELFEALTNTLQSKASDFAEIYGVEPPPCPVASSRRKKGKSLKKIPVRDNVVGKGSSKSKISNEELAVAAGAAWQVNEIVKTKDLRDAFLQSSYSEIVFSSLKIISQVYIEQCLYLDSLDLAPVLAYLSLATCNDLPDVNQTGSCFESSTANQSLDHLLNCFDKLLNGTVSNPPSKLNKNGKALRSKDQQKGASEAKGTFNVIMLGASILKFIIDTNMKPLNDDKIRCLKFASSYIKYAVSSIKKHQEQSSCFKGGDLKDALLLVRSSFTYASKLLQLVLSSSPEESCPPEEAFFLANDLLDIVPAVESFAGSRFAPSIVSALKQWLPVLLLGLVCRWLIGSHNEMAPNVFHFADSVLPLWVTAVAKNELVDSKEPGQDEQSNLTAEGEDSLLSRKLAEMMAILLKKGSPRILDCASGVLLSTFQLTLRRSDYDIVLGMTRFICDKLLGNNSLALEKLQLTRDFLRENFLEIDRYVRDELVHDDDSRQQLEKAKALIRSVLTDV

SEQ ID NO: 1497 - protein, 243 aa, Zea mays
  VARIANT 89..243: note = Derived polymorphism lacks residues 89 to 243
  VARIANT 47..243: note = Derived polymorphism lacks residues 47 to 243
MSVPMYNKQNSLGTPPPHKTNPFSDSEGPSRAQSVPVRRTNQSVQELEDYAITKARETTHKVNDCVRAAEAIREDATQTMLTLHRQGEQIMRSHQVAADIEQDLTVSEKLLGSLGGLFSKSWRPKRNHQIKGPVSGNNYSATTANDTEQRGKLGIAPARQEYPSHVQTTPVSAMEKVQAERTKQDDALSDLCSTLGQLKEMAVDMGTEIDRQNKALVPLSDDVDELNFRLKGANQRGRRLLGK

SEQ ID NO: 1498 - protein, 293 aa, Zea mays
  VARIANT 19: note = Ancestral polymorphism is P, Derived polymorphism is L
  VARIANT 187: note = Ancestral polymorphism is P, Derived polymorphism is L
MLRRLVGGAAAVRSPLPPPFCRLLHNGGGGGGCSSGEPESVAYRMSMLRRPSTVSKKGLTWNWCSLIGRLAAPVRPIDTSFLEVPRAYTFLSVTLSSPAPSSSSSNINVTLQLNGELANVGLKHLKHDDLVYVSGHLGSYHKVSPSGERHIVYKIYVRELNYVVDQNKKPQNDADSTSPPSMTSVTLQMLKENECIGRLRLWQVFFANPYEWWDNRRSKPWANYPDFKHKDTREKIWLRPDDPPWVRKQLELYDLEVAENGHRCKSRLSKKQNWKTQDFDYFDDEEVQHLAEA

SEQ ID NO: 1499 - protein, 471 aa, Zea mays
  VARIANT 97: note = Ancestral polymorphism is T, Derived polymorphism is I
  VARIANT 50..471: note = Derived polymorphism lacks residues 50 to 471
  VARIANT 40..471: note = Derived polymorphism lacks residues 40 to 471
MQQMAMPSFAVTSPPSHGTTLWAPHARRPQRLHKRHVRSQVRAVAQAQLQYQKLGDSDLLISEVTLGTMTFGEQNTEKEAHDIIAYSFDQGVNILDTAEIYPVPMNKETQGRTDLYIGRWMQSKPRDKIILATKVAGYSERSTFLRDNAKVVRVDAANIKESIEKSLKRLSTDYIDLLQIHWSVSDCSTCIVICLTKTIFRFTFLLSEDSGLEAEGVFFYSMLHIRYLFAIQLNQISILGSKVILYVCRPDRYVALFGEFSYNPTKWRPSIPFEEQLKALQELVDEGKVRYIGVSNETSYGVMEFVHAAKAQGLPKIVSIQNSYSLLVRCRFEVDLVEVCHPNNCNVGLLAYSPLAGGVLTGKYLDANADISKSRLNLFPGYMARYNDSLAKEATLEYVKLAKKHGLTPVQLALGFVRDRPFTASSIIGATTMEQVKENIDAFTSTPRPLPQEVLDGIEDLFKRYKDPAIL

SEQ ID NO: 1500 - protein, 314 aa, Zea mays
  VARIANT 182: note = Ancestral polymorphism is E, Derived polymorphism is K
MRPSTRVRTSFTIYSASHETSAAAIDSRPAASCPRHVPFPELRTSPPWTRTTEGPGRPPNPFCFQALASALPDRQAKTPPPAAVKPAPVPVPARKKVLAKKGAAAAMGGSKDAGKQEDVHRLRILDNCYMQYRFLNAHAEAAAIAKKDVAEKTIYGLSERIANMQKYVAQKKAELECLKRMEKVHFVVDSQVPSLQQWCELEREHISCLSSGTVALCDAASRVPILGNIKANTGEVKLALNSAMEIMKQLSPCVDKLSRKVGETEDVASELSNVVSDEQVLLQECADLLHQAHDIQAMEDSLKSQVMQLTKNKT

SEQ ID NO: 1501 - protein, 635 aa, Zea mays
  VARIANT 93: note = Ancestral polymorphism is V, Derived polymorphism is A
MKYMKLGSKPDVLQTEGSNIRFVATDLATDVVILIGDVKFYLHKFPLLSKSSRLQRLVASINEEKNDEVDISDIPGGPSAFEICAKFCYGMIVTLNAYNVLAARCAAEYLEMFETIDKGNLIYKIDVFLTSSVFRTWKDSIIVLQSTRSLVPWCEDLKVISHCIDSIASKASIDPSEVEWSYTYNRKKLPSENGIDSHWNGVRMQPMVPTDWWVEDLCELEVDSYKRVIMSIKAKGSTPAVVVGEALRAYAYRRLLGSLEDAVSNGVDCAKPRAVLDAIVSLLPAEEGSVSCGFLLKLLGAACLLESGESSHRSNLIKRIGAQLDGASVSDLLIIPPNTDENDTYSIDLVMAIVEEFMSLQNSDSGKEKFQDDEEIVETENVASVSSTSKLAVAKLIDGYLAEVAKDPNLPLPKLTALAEMVSSLPRPTHDGLYRAIDMYLKEHPSLSKSEKKKLCGLMDCKQLSHDACMHAVQNERLPLRVVVQVLFFEQVRASVASARSDPSSAELPSAVRSLLPRENGNSVGSSRSAATTTTEEDGCGVPTSSDVNSLRSTRLANNSGGSERSSGSSDINRSAAGRGARGILMPKKMLSKLWSGKTNAGENSSSDTSQSPGSVNNPEEVKSTQSRITRRSVS

SEQ ID NO: 1502 - protein, 436 aa, Zea mays
  VARIANT 7: note = Ancestral polymorphism is P, Derived polymorphism is L
MVRMRFPKRYLIVLLTFICTNVCYIERVGFSIAYTVAADAIGVNQANKGMILSMFYYGYVLSQIPGGWAAQRIGGRRVLLLSFVLWSMICGLIPLDPNRVTILVLSRLFVGVAQGFIFPAIHTVLAQWVPPQERSRSVSLTTSGMYLGAAGGMLFFPSLVKHTGPQSVFFVEAVLGVAWSVIWLKFSSDPPRTDLPKVSMPKVASRDMIKAQAGGVVAPRTVKIPWRRIIFSLPVWAIVVNNFTFHYALYVLMNWLPTYFELGLKLSLQDMGSSKMLPYFNMFIFSNIGGVIADHLITRRILSVTKTRKLLNTIGFIVSAFALMALPLFSTPSGTVTCSAISLGFLALGRAGFAVNHMDVAPKFAGIVMGVSNTAGTLAGIIGVGLTGNILEAAKASNKDLTDSETWKTVFFVPAYLCIFSSVIFLIFSTGEKIFE

SEQ ID NO: 1503 - protein, 251 aa, Zea mays
  VARIANT 84: note = Ancestral polymorphism is G, Derived polymorphism is E
MSCNGCRVLRKGCSDACVLRPSIDWIHGAQPQANATVFVAKFFGRAGLVASLAAVPLHHRPALFRSLLYEACGRTINPVSGAIGLMWTGNWDLCQAAADAVLRGESLRALSAVPAAFTDRDMDGLYGSVGGLVAAAAAAASPENSSSSAPSTTKRRNANGGSSNNAVPAAAASHHRPPPPAAAAAGLLLQSSCHQLDLCLTPALSPPGAGPRGCAAGASDEYSATTTCEDQTGDHGHGEPRPPPPLLNLFN

SEQ ID NO: 1504 - protein, 268 aa, Zea mays
  VARIANT 58: note = Ancestral polymorphism is R, Derived polymorphism is M
MTASKISIYTGTLIPDCVPEKVAYLTERAGTLGSGPLRVASEWGRVRFHYGHPDVFDRIFHITRGGISKASCGINLSEDILAAQARTTALESREVIAVEALKQAKDEHVQKLMEAYLVTHNQRRALRIQEPAPSNPVQPMRAEDPQILEGHPVSTRGEKKAWELLEGAIVLEGIPVSLQDMDKQEHPESSQDPPPELFEPFTMKKIPAPSREIKEEAASTPPAPPPSEELQEPVQLEEEFNLVLPSQSPPEEVINISSLLTHPGNVSD

SEQ ID NO: 1505 - protein, 39 aa, Zea mays
  VARIANT 8: note = Ancestral polymorphism is R, Derived polymorphism is Q
  VARIANT 11: note = Ancestral polymorphism is M, Derived polymorphism is I
  VARIANT 27: note = Ancestral polymorphism is S, Derived polymorphism is L
  VARIANT 31: note = Ancestral polymorphism is A, Derived polymorphism is V
MATRQLLRLVMAQLIWRLGNLAEQTCSSVTAINVLTTEK

SEQ ID NO: 1506 - protein, 154 aa, Zea mays
  VARIANT 4: note = Ancestral polymorphism is R, Derived polymorphism is C
  VARIANT 33: note = Ancestral polymorphism is P, Derived polymorphism is L
  VARIANT 46..154: note = Derived polymorphism lacks residues 46 to 154
  VARIANT 62..154: note = Derived polymorphism lacks residues 62 to 154
  VARIANT 71..154: note = Derived polymorphism lacks residues 71 to 154
MDGRILRTSACNNSGSTKVASEAADIGRPALFPASGLSNTFGFKVQDKQGRMQRFNCEMSSLTDLITSILQRVGDDIDRKHLPQISYEDEDHDKVILSSDSDLIAAIDHTRQIGWKSLRLHLDYARQKRGDGSSDFEYAGKDAWASAYCKHKMN

SEQ ID NO: 1507 - protein, 523 aa, Zea mays
  VARIANT 104: note = Ancestral polymorphism is R, Derived polymorphism is C
MGRRIMKSGRRTTMQPRPALLLLVLVLGVSLRGCIAQGGGGGGGLTRGSFPKGFVFGTAAAAYQYEGAVKTDGRGQTIWDTFAHTFGKISDFSNADVAVDQYHRFEEDVQLMADMGMDAYRFSIAWSRILPNGTGQVNQAGIDHYNKVINALLSKGIQPYVTLYHWDLPQALEDRYNGWLDRQIVNDFAAYAETCFKAFGDRVKHWITLNEPHTVAVQGYDAGLHAPGRCSVLLHLYCRTGNSGTEPYIVAHNFILAHATVSDMYRRKYKAAQNGELGIAFDVIWYEPMTNSTIDIEATKRAQEFQLGWFADPFFFGDYPATMRARVGERLPKFTADEAALVKGALDFMGINHYTTFYTRHNDTNIIGRLLNDTLADTGTISLPFDKNGKPIGDRANSIWLYIVPSGIRKLMNYVKERYNSPTVYITENGMDDGNSPFTSLQNALKDSKRIKYHNGYLNNVAASIKEDGCDVRGYFAWSLLDNWEWAAGYTSRFGLYFVDYKDNLKRHPKNSVQWFKTLLSSS

SEQ ID NO: 1508 - protein, 204 aa, Zea mays
  VARIANT 2: note = Ancestral polymorphism is E, Derived polymorphism is D
  VARIANT 34: note = Ancestral polymorphism is P, Derived polymorphism is T
MEKKGPQALTATELNAAVYRYLQESVKQLTELWPGFVHTAFNFFYEAGIGKGNIQEMLPQGALVRIMQKGLQSIELEANSEIGSDEEHHFFESLDLMTNDLDELTKKITSSVKHSSEQKIDLVETDKAQNIGAAETTTTYKAAQNSKPDGTATMVRTQPVKHTKAKNISSAETMQKTGSVETTTRPGLPVSWKVKKFRLRRRKD

SEQ ID NO: 1509 - protein, 700 aa, Zea mays
  VARIANT 507..700: note = Derived polymorphism lacks residues 507 to 700
  VARIANT 349..700: note = Derived polymorphism lacks residues 349 to 700
  VARIANT 301: note = Ancestral polymorphism is L, Derived polymorphism is S
  VARIANT 252..700: note = Derived polymorphism lacks residues 252 to 700
  VARIANT 62: note = Ancestral polymorphism is C, Derived polymorphism is Y
  VARIANT 59: note = Ancestral polymorphism is C, Derived polymorphism is Y
  VARIANT 31..700: note = Derived polymorphism lacks residues 31 to 700
  VARIANT 30..700: note = Derived polymorphism lacks residues 30 to 700
MTLGWAAKRSAPRAHQRDNPSSVASASITQSTAATIKSDDPAWKHCYCPDLKKKHSLKCNYCDKLINAGITRVKYHLANIAGFNVSKCKKVPTPVKEDMVALLTKNCDAKEKKRKEKQRERDEIDLDNSGGDNSSEEESEHGNDVIVFKSTKGGSSSRLATTGGTIDKFYKPESIEESVQKNKRGLSTSQKIQTQLTTQKREERRDRACEYICQFFYEAGIAHNTVTLPSFAHMVEAIGAFGRGLRGPSSYEMSGPFLKKCKEKLSTVLEDLAKIGAVEETISSAKHVTAFLYAHTRVLDLMRKFLGKDLVHSGVTRFATAYLNLKSLQDNKKDISRLFRSDELNELGYLKKAKGKKANKVVRSEGFWKNVDMVVNFFEPLANVLRRMDSDVPAMGFLHGCMLEAKKEIAMRFDNNENSFKVAWDITDKRWDNKLKTPLHLAGYYLNPYFYYPNKSEIELDGSFRAVVIACITKTVEDEETQDNIIEELNVYQEQQGTFGHDIAVRQRRNKNFNPAKWWLNHGTSTPNLRLLATRILNLTCSSSGCERNWSDFEQVHTKKRNKLLHDRMRDLVFIKFNSRLRQKRENKSKDPLEREMNDVLEDDANEFITGLVPNANSDKDEEHGGAQVGATIHEPQLSQPQPKRKRLVRPRKKKIRSLHSLLYGGLENEAVASSSESEDNGDGDISMHQYSDSDDLGDE

SEQ ID NO: 1510 - protein, 195 aa, Zea mays
  VARIANT 2: note = Ancestral polymorphism is E, Derived polymorphism is G
  VARIANT 123: note = Ancestral polymorphism is G, Derived polymorphism is D
MEKKGPQALTATELNAAVYRYLQESGFVHTAFNFFYEAGIGKGNIQEMLPQGALIRIMQKGLEYIELEANSEIGSDEEHHFFESLDLMTNDLDDLTKKITSSGKHSSEKKIDLVETDKAQNIGSAETTTTYKAAQNSKPDETATMVRTQPVKHTKAQNISSAETMQKTGSVETTTGPGLPVSWIGKKSRPRRRKD

SEQ ID NO: 1511 - protein, 372 aa, Zea mays
  VARIANT 171: note = Ancestral polymorphism is A, Derived polymorphism is T
MENSAAAAAERPRLTRAAAKRSAVVTAVAVAAKRKRVALSQLPTLPNAVLGAHDDDDDKPVRKQRLLPAAKPKPKPKAAPAPAAPAAADDTDDDIQLCKPYASDIYSYLRSMESQAKRRLAVDYIAAVQIDVTPNMRGILIDWLVEVAEEYKLVSDTLYLTVSYIDRFLSAKVLNRQKLQLLGVSAMLIASKYEEISPPNVEDFCYITDNTYTKQEVVKMESDILNVLKFEVGSPTAKTFLRMFIRSAQEDNKKYPSLQLEFLGSYLSELSLLDYGLIRSLPSLVAASAVFVARLTLDPHTHPWSKKVQTLTGYKPSELKDCVAAIHNLQLNRTCQSMVAIREKYRQHRFKGVSALLPPVEIPASYFNTLKE

SEQ ID NO: 1512 - protein, 437 aa, Zea mays
  VARIANT 396: note = Ancestral polymorphism is R, Derived polymorphism is C
  VARIANT 139..437: note = Derived polymorphism lacks residues 139 to 437
  VARIANT 74..437: note = Derived polymorphism lacks residues 74 to 437
MPTAYSLRAPPSASQQRLRLPLPPPPPPLPFCPGGGAARRRRGVGVASASASPFDELHARGRPVHGPSKKSMLWNLIQDIEPLDLSVIQKDVAPETVDAMKRTISGMLGLLPSDQFRVIVEALWNPFFKLLVSSIMTGYIFYSPIFSMMVVVKKAMPCFMETQFTCINCTVVRNSNLYVFVSRYTLRNAEYRLSFERNLELPEEGVECLKSDVTEDNHHNINLGRPVTIFRLSEEDMPQDPGKTDEASSYENMGEELGDLTPQAEEYIIQMQSHLNAMKKELHDLRRKNSALQMQQFVGEEKNDLLDYLRSLTPEKVAELSESTSPGVQETIHSVVHGLLATLSPKVHSKAPPPLDNISGGVLNLGGEDDDRAELVENASLPFQPLISVPRDYLARLLFWCMLLGHYIRGLEYRLELARLLRISSVGSFSGGDDHVV

SEQ ID NO: 1513 - protein, 553 aa, Zea mays
  VARIANT 314..553: note = Derived polymorphism lacks residues 314 to 553
  VARIANT 430: note = Ancestral polymorphism is N, Derived polymorphism is I
MFNKIIKRGNRKGARGDNAEAAARPAAPSSSSGSGGGGAGAAAPVTVNHASRATAPSPSSPTSPHVAPSALATNPAGAASPPLLEPLPLLRDVAAADRPGLFLRKLRIVAALFDLSDSLKHPREKEAKRQALLELVDYVQAPAQAAGANAPTRLPDHVQEALVAAISANIFRPLPPALHESAAAIDPGAAPDEEEEPYLDPSWPHLQLVYELLLRYVVSPDTDTKVAKRYVDHAFVLRLLDLFDSEDPREREYLKTVLHRIYGKFMVHRPFIRKAINNVFYRFIFETQRHNGIGELLEILGSIINGFALPMKEEHKLFLARALIPLHKPKSVAIYHQQLSYCIVQFVEKDYKLADTVIRGLLKYWPVTNCQKEVLFLGELEEVLEATQPAEFQRCMVPLFKQIGRCLNSSHFQRPLEPPVHIGIVRRDGNGNREMGRLKLTWEEVAERALFLWNNDHIVSLIAQNRVVIFPIIFEALERNIQSHWNQAVHGLTANVRKMFLDMDSELFEECQQQYMEKQAKAKEIQEQRESAWRQLEAVVAAKAAGDDMVLVN

SEQ ID NO: 1514 - protein, 211 aa, Zea mays
  VARIANT 194: note = Ancestral polymorphism is I, Derived polymorphism is T
MSMSKTGQAAEKDEQQQSRGIALMQGICAVVYRKADNTPCPIKQGLYLGSVGAAFNKDALKSLNITHILIVAKSLDPVFPAEFNYKKIEVLDIPDTDLLKHSDECFGFIDEAISSGGNVLVHCFAGRSRSLTSLRLGGHNPNRRGRPTATSYVAVVRQVGDSRSLTRSFRNPCKWSRNGECNLCSTDNYTSVIIGAEGLICSEGVCVVRAS

SEQ ID NO: 1515 - protein, 284 aa, Zea mays
  VARIANT 54: note = Ancestral polymorphism is P, Derived polymorphism is L
MPMAASVLLAAPAPLLAASHPRPTGEPAASRTVPASARFSSPGLLCSPRFLRRPGNNPLDPAETPHAIHANSATADVGSRPAHLYLHTPAPVGRVQARASNSVRFSLHAAECLQASFHADLPAPSKKPTTIAVPRHAAAPRKSGGGGKKQLNLFQRAAATAIDAFEEGFVANVIERPHGQPSTADPAVQIAGNFAPIGERPPVRGLPVSGRIPPSISGIYARNGANPCFDPVAGHHLFDGSASKLQPATLELCSVAPLGPQPRQRSRPHRSPPPSPPAVQQAAA

SEQ ID NO: 1516 - protein, 354 aa, Zea mays
  VARIANT 133: note = Ancestral polymorphism is R, Derived polymorphism is W
MVMAKQHHDKGLPKQARNEPAPFRLEQCCRCDDAHRQADDESMDAAGSAGPLHLTLGPLGSAAGPRCSCGVAPAPAPAAPATVAVLRGSRYMRPAQELLGEAVRVADLAAADDEDEDQAAERLEGGGHRAARRAAGNDGDGVQAKLLYLLSELESRRERYFGELERVVSSFEPALGGGAAAAYTTLMARAMGRHFGNLRRAILRRLRLQAAAAARRSLRRGGEDQDDDDDDDGDGDGEVTEELVDRLARRTKLAAAARAEQAWRPLRGLPDGSVAVLRAWLFDHFLHPYPNDGEKLRLAVTTGLSRRQISNWFINARVRLWKPMIEEMYKDEFSDGSAVSSYDDASASGASSSS

SEQ ID NO: 1517 - protein, 119 aa, Zea mays
  VARIANT 91: note = Ancestral polymorphism is Y, Derived polymorphism is H
  VARIANT 63: note = Ancestral polymorphism is A, Derived polymorphism is G
  VARIANT 3: note = Ancestral polymorphism is D, Derived polymorphism is N
MLDPADATLYSNRSFCHLKIGAARDALVDANACIGLQPDWPKAYYRKGAALMSLKEYKEARDAFMEGLKLDPSNLDIQNAYRYNSSYRFSYVIFTTLEREAEEAMIKNHSTGQSVEPLE

SEQ ID NO: 1518 - protein, 238 aa, Zea mays
  VARIANT 3: note = Ancestral polymorphism is G, Derived polymorphism is R
  VARIANT 9: note = Ancestral polymorphism is C, Derived polymorphism is Y
MAGDLPAFCTEEMDRELFQRGVPIGAGITTAGHGRGAAATGHAAAPADPGRAAAGLARSVSAAAPADPGRAAAGLARSVSAAAPADPGRGIAAAELGRGASVADPTRSRGRSNGHTHARQAPSAVARVRGRGRGRGMNICHTANATMVNGLTSQRSAKNPVDSQEIPGCAKFKKGPLQNEADLSKMFDKITNEENDHWNPMTENPIIPKNHEPIINLESDFADVESPAPAPVSESMHL

SEQ ID NO: 1519 - protein, 351 aa, Zea mays
  VARIANT 56: note = Ancestral polymorphism is A, Derived polymorphism is G
  VARIANT 42: note = Ancestral polymorphism is P, Derived polymorphism is L
MTRSPLALALLLLCAAGAAAAVPRYREAPHFTNSAAAQCPPLLQPSDADAACSPHAAVHVAMTLDASYLRGTMAAVLSVLRHASCPESIHFHFIASASSGSSATAEALRATVRASFPSLAFRVYPFADEARVAGLISTSIRGALDRPLNYARSYLASTLPACVRRVVYLDSDVVLTDDIAALAATPLPGEGTAVAAPQYCGANFTAYFTPGFWASPALSSAFAGRRACYFNTGVMVLDLARWRRAGYTAQIEEWMELQKRVRIYELGSLPPFLLVFAGRIASVDHRWNQHGLGGDNYRGLCRGLHAGAVSLLHWSGKGKPWDRLDAGRPCPLDAVWAKYDLLRPAAGIETS

SEQ ID NO: 1520 - protein, 99 aa, Zea mays
  VARIANT 7: note = Ancestral polymorphism is R, Derived polymorphism is H
  VARIANT 33: note = Ancestral polymorphism is K, Derived polymorphism is R
  VARIANT 72: note = Ancestral polymorphism is G, Derived polymorphism is C
MSAQGKRRYDRKQSGHGGQTKPVFHKKAKTTKKIVLKLQCQSCKHYSQHAIKVLPVSIGYRSLFAYSLCHRGASILRLVETRMARARLFSKLLVHLSGC

SEQ ID NO: 1521 - protein, 1586 aa, Zea mays
  VARIANT 408..1586: note = Derived polymorphism lacks residues 408 to 1586
MSHFHPTQHAGDNDFQMWQQQMMFKQLQEFQRQQQLQQSDHGARMQPSFGQFHAPAKPLPADQLSTMSNEMANNEAMNSAWPHNFTGGDPSLTSNSQMLNNGSTNWDQIVGAPGVGNFMNSSMFANAQNQSMRPMGIATHQVDQSFYPMHPTSSRGHGNQYSQFLGIHADSQSAVARVGPDQSEKTSRPFNSSMNEHGLHMQGPASSMHNFRGKGGFLNNSLMQSQGDSIRAGSPVTVNQLQHGIQTQDFHGRSNQVDLQVGMQDKSAMQVGQASRGASLDPTEEKILFGGDEDGNWGALLRGDNDNGNSLDNDNYGGGYSSLQSGSWSALMQEALQSTTSENSPKEEWSGLSFHKTEQVMANNATLSGHDDNKLTRLSGANLENARPSPTSSYADGTMNNPNLASFQHAIRPPFERRDHMTHESPNAPVNNHQSTSEVNNGYIQHGLKQIQSDGRQEQVHLANGIWPHQKTELLRNNSQSTGMHATPPGAHGFWISQQNTADHNMNRESSNNQNDWKANNVLGQDMHNSQNVFNSNENSWKSTGGNVNSVQRLQQRKSDVSTTNESSDGKSISMMSSSMSMMAQDHYQMVTSRSGEQIGMNRNMAHRAPEISESPRKSTEQRPGDFNQEYLNATPNERQTHTLNHGQHISDSAPRRHSIFAGKESENLGQSSQQAMGSYMLQNRAMGSSGMNIGPSPGNPVSNNLFPPQMRNNLQHHFGTNSLVSNNMPSVSEKMMMAQEQLQSRHGLPNSSSALPFGGADTGLSQNRAVQNRYSLLRLMLPTSQHMLQLLHKVDNSRNSDVAADIPNNPLGVVSAQQQPNHSLQGFGLRLAPPSQRQSNSGNLWSSQTNVDGKQSDHSAQDDDRTPQPSTPSQSLTPQHQNSQPSPFHSSETENTGQPIARFPQLSPGQHYPVTDDRSGPAPMLQQQSQQSNFATVFKNVWTNISAQRLGGMQANKITPNILQSMMFPNNSSASNLWSSQKADDQGQRASTPSDIATTSANSQNQDPKRAADNDAGLASSQKANLESKGTTVTGGNESLQKPFSDGNSMNAVSSFAQLHQQGILGAKHGENPGANFQAMNSSHNSVNNSGGIVLHGSPAPSNIQQQNYSLLHQMHALRHTDIDPGSLAGKTTRPDVGSDASQIDWKSGQRFAHVDNNQTKSAADNVGSPGVPGSFTSDMKILSFASRSEERNVNIPSHLPSGERPFPGMVTAQNDNQNQVQPMGTSATSNSVESSERPRINPQMAPSWFGHYGNYRNGQSVAVLNAQKPTALPYNFPKVPCNNENNNSAENRVESGQSVTPGHHLPSTRMEALVPSNVKVSPMMRRPKKRKAMDSALVSWHKIIESPQNLRSISTSEMDWAWAANRLIEKDEAETSDDTSLHYLPRKRLILTTQLIQQLLPSIPATILRAQAVSAFESATYTLSMLTLRDACSMASSSLYNSCSPVEDENKTCLFGHPCCSNPHFTDFTLSWTSPSEQTRSAKKMEDKVSKVVEVFVGRIRKMENDFISLNKRASMLDVQLECQDLERISIVNRLGRFHGRNHAAAVESSSASEMTPRRIFPERHVMSFAVPGNLPEGVHCLSL

SEQ ID NO: 1522 - protein, 179 aa, Zea mays
  VARIANT 92: note = Ancestral polymorphism is D, Derived polymorphism is V
  VARIANT 117: note = Ancestral polymorphism is G, Derived polymorphism is D
  VARIANT 134: note = Ancestral polymorphism is A, Derived polymorphism is D
  VARIANT 144: note = Ancestral polymorphism is R, Derived polymorphism is L
MAFSAGYMPCIDDIDMQVFSATATPPPPPQVGFVSDPTAIPFPAQPPAATASPEAEADADAGESADERRLRRRISNRESARRSRARKQRRLDELGDAAALLERRRRDLAAGAQAARGRLALALLANAGLRAEAAALSRRLAAALRALDLGRLYAAAAAAAAGSVARQLDIEQTIASLIA

SEQ ID NO: 1523 - protein, 223 aa, Zea mays
  VARIANT 13..223: note = Derived polymorphism lacks residues 13 to 223
MEEEVIKLQKCLQDKDEQLRSSTSSTKQVKSFHSKIHHFLQFIGEATGEAGVASAMSLLKELNEKDISLKDHRLRVNNLGEHLDLLQKDVQAREDSQMQLKDIVIRIETNIMDEVAKAFEIAMLRGEIRILSTHWTNKTKNLESQLKKHQQTDQELKKRVLKLEFCLWSCHPLVHSPPHLPLLLAPLLFSCCDWDKASWILNLGQNLGGSRTTMMPGTYSYFI

SEQ ID NO: 1524 - protein, 924 aa, Zea mays
  VARIANT 418..924: note = Derived polymorphism lacks residues 418 to 924
MARVERQPRNPSRLAPTSHPAPALPTTPAARRPGTPRNAAQLFVCFCSTTQGTVCATCVCGSGNNARCHCKQDARSRHNQTHHGNDGTATAGGIAKPDSQDKLKMARFSGGTYSKPDARVKLIPAEDITYLQRRKPCGRTVGSVGSQKRHCRRSVTPPPSSRRVSLLGSRSLAENPIPSVSSHDSCLPHKRLETAENRDPCAGGHISSSVTPCTSLKNLASPSCKSSQPLSTNLNTDATPRNLDRMVGIQTQALARSSSSSILHSQGQNSEKVSASLPKEAVTNPASPSPKQIGAQHPSDNPLVTKAGPSKSVCTHESEKLCSRDINLTATSTTVPVLQAPVVEPALLSSTSVFTERPFEVYPDTRTAAPGMQELSVKHVLLTPIPVRHEPSTECLKVPPKHSLHSIASAQHGALSQERNSGASISHGRSSASEFHRNMDIVDTGALSILHMKLAKKHYQSQACWKGNFHVTGGLIHTCDGLEAHFPLEISVRVYEASNQMPEILNLEAVPISQLWPKKFKMVPPDIEDIGLWFLSSRQRPHWSFDHLLEKVCSHTGLFTKIGDIELAVFSSKLLTPQDQRKDGKLYFWGVFGKHMRKKSCQPNSHIKNVEISNPSQPNGKSEEVGMKLDMRKGKEKESAKSDEVLDSTGGNDTDRVNGCVAVLEAPDSDPASSCSVPAASSLGGYCHHDSAKNSSSILDSSCQPADGSSVSPDLMLDIPPGISAHIPPGFTKAHCQLQMGTAALSFADRHRSLISDIPPGFTEVHRGLPPAIPPAGPACVSTPGTEKKPFVRFSLNVPRPVGMGAPPGFTPLHAVKKEPGLPDVHETADKHTLHSLAAAAAAVVKPGKGGEMKIADNEVKTEQDENSEERDFPKIRRLSDLYCRPSEDSTEFSQRMPARLPDKFQEQRPEKRLVHPREEVGRR

SEQ ID NO: 1525 - protein, 167 aa, Zea mays
  VARIANT 11..167: note = Derived polymorphism lacks residues 11 to 167
  VARIANT 15: note = Ancestral polymorphism is L, Derived polymorphism is P
  VARIANT 20: note = Ancestral polymorphism is C, Derived polymorphism is F
  VARIANT 21: note = Ancestral polymorphism is P, Derived polymorphism is S
  VARIANT 24..167: note = Derived polymorphism lacks residues 24 to 167
  VARIANT 33: note = Ancestral polymorphism is L, Derived polymorphism is F
  VARIANT 38: note = Ancestral polymorphism is C, Derived polymorphism is Y
  VARIANT 58: note = Ancestral polymorphism is H, Derived polymorphism is N
  VARIANT 101..167: note = Derived polymorphism lacks residues 101 to 167
  VARIANT 119: note = Ancestral polymorphism is S, Derived polymorphism is L
MGRERLPLLARLRRLPLRNCPSFELTSLADSTLRKIHCLCFRHYIFELAYRSALINCHIEHWKLHLFELEEELKTNPLTKYVLYQLHNESHKQDERSKNWRVQAVAVGPDRFESRKALSEKWRGMRDDGLSAETNIPGCVFVHMSGFIGSNKINEGALEITRATLKC

SEQ ID NO: 1526 - protein, 366 aa, Zea mays
  VARIANT 119: note = Ancestral polymorphism is T, Derived polymorphism is A
MAASPSSPHAAPGVSGQSLSPSAPSPHLPNYFMWREFVWGGMAGAFGEGMMHPVDTLKTRLQSQAIMTGAKAQKNIFQMVRTVWASDGLRGFYRGISPGVTGSLATGATYFGIIESTKAWLEIANPNLSGHWSHFIAGAIGDTLGSFVYVPCEVMKQRMQIQGTQKSWASAVAKGNISQTHGIEMYGYYNGMFHAGCSIWRDHGLKGLYAGYWSTLARDVPFAGLMVTFYEAMKKMSEYGKTKYLPHSDLHVSNSFEGLVLGGLAGGCSAYLTTPLDVIKTRLQVQGSTSRYNGWLDAITKTWTSEGVRGLFKGSVPRIIWYVPASAFTFMAVEFLRDHFNDKVDADAHEVTSLSMDTKSEVEKSA

SEQ ID NO: 1527 - protein, 153 aa, Zea mays
  VARIANT 114: note = Ancestral polymorphism is R, Derived polymorphism is C
  VARIANT 113..153: note = Derived polymorphism lacks residues 113 to 153
  VARIANT 89: note = Ancestral polymorphism is R, Derived polymorphism is H
  VARIANT 66..153: note = Derived polymorphism lacks residues 66 to 153
  VARIANT 49: note = Ancestral polymorphism is R, Derived polymorphism is W
MAYLSASNAEIADGVRPILGGRWAAVAASATSVAVLLLLPLFMLIALVRRMGPYLSLLHRALLMAQAYLAIYFATLALTAAATGLEPLRLVHAASSAASPGRRPHRAAPHANWRVYAVYAACFAIVCACARAKRRKKAYLAGTDRAAEEWKKS

SEQ ID NO: 1528 - protein, 80 aa, Zea mays
  VARIANT 56: note = Ancestral polymorphism is A, Derived polymorphism is G
MCYQVRCGTCGKTTWAGCGRHVASVHAQISEGQHCACRDWPGVDPATAPAGVKKAASAADDAGKDSGTAASTPAQGGAAQ

SEQ ID NO: 1529 - protein, 356 aa, Zea mays
  VARIANT 231: note = Ancestral polymorphism is L, Derived polymorphism is H
MEDSSQFMQWALSTLQHDELPPATPPAAIAYDDNDCNTFSSVPALGYSAASVNSMVPAEPPAQEGHRATAATNSWSSADTASVTAAQRDAWSPSSQQNSVNCATPRSSGSSQPVSWDFHSASASASAQLIIKEAQVNSATAARAESAAGGMPVPQPQMVQNGSPPTRRASAKMSSASSSAPPCSQDHIVAERKRREKINQRFIELSAVIPCLKKMDKATILSDATRYVKELQEKLKALQQGGSCNARGGTESAPVLVKKPRIAAPGDDDKDRGGAPSPSCAPPGAAATTGNALPEIEARISDGNVVMLRIHCEDGKGVLVRLLAEVEGLRLSITHTNVMPFSACILIINIMAKASC

SEQ ID NO: 1530 - protein, 84 aa, Zea mays
  VARIANT 15: note = Ancestral polymorphism is K, Derived polymorphism is E
  VARIANT 34: note = Ancestral polymorphism is T, Derived polymorphism is M
  VARIANT 37: note = Ancestral polymorphism is V, Derived polymorphism is L
  VARIANT 45: note = Ancestral polymorphism is W, Derived polymorphism is C
  VARIANT 49: note = Ancestral polymorphism is L, Derived polymorphism is I
MVQAVGASASLRVIERVDQTLQELEVNLKPKIPTKVVCIEHIESWNELLTLLNLQKQLQNKEAEVSADQESSSQRHQAHLRYII

SEQ ID NO: 1531 - protein, 132 aa, Zea mays
  VARIANT 114: note = Ancestral polymorphism is R, Derived polymorphism is C
  VARIANT 76..132: note = Derived polymorphism lacks residues 76 to 132
  VARIANT 66: note = Ancestral polymorphism is L, Derived polymorphism is M
  VARIANT 44: note = Ancestral polymorphism is A, Derived polymorphism is T
  VARIANT 21: note = Ancestral polymorphism is P, Derived polymorphism is L
MRASRGFSLLARATTWPAGEPARWAPCCGGGNPGPAGPVGARAARRGVGVLPAGVSRHCLQRAWGLEAVRPLRGVQVHRFHRPAGLHLHDAAAPPARRPPHWRPGPGAQDRPPRRLHRRPGTSTCTFTAPLL

SEQ ID NO: 1532 - protein, 318 aa, Zea mays
  VARIANT 297: note = Ancestral polymorphism is P, Derived polymorphism is L
  VARIANT 285: note = Ancestral polymorphism is D, Derived polymorphism is G
  VARIANT 17: note = Ancestral polymorphism is H, Derived polymorphism is P
MEDSSLFMQWAMDTLQHENNPAPASAAAVHGGFSEATFPSLKALREASHAAEMVQELIADADVVRHAPNSWNSGDNTTANYNVPAGWGFGGATAASALPGSHGMMEAPPAMATRGRPPPGLVYRLPPTRRAGLKSLGSMAAAYAKDHIIAERKRREKINQRFIELSTVIPGLKKMDKATILLDATRYLKELQEKLKDLEQRKEAGGGSIETLVLVKKPCLHAAAARDDDGGSSLPASPPAGTPTEGKRLPEIEVQFSELEKTVAVRVHCENRKGVVVHVLAELEDLHLSNIHANVMPFTACTRIITITAKASFPCPAF

SEQ ID NO: 1533 - protein, 254 aa, Zea mays
  VARIANT 72: note = Ancestral polymorphism is R, Derived polymorphism is H
MWSSDEAVRVRSRFLCLIHVVQRIVLRRIELCGEVELLSILQYVKRFGESPLPSHAPPLIMGLLSIIRKIKRKEKEMRILMVGLDNSGKTTIVLKINGEDTSIISPTLGFNIKTIKYHKYSLNIWDVGGQKTIRSYWRNYFEQTDGLVWVVDSSDIRRLDDCRAELHNLLKEERLVGASLLVFANKQDIQGALKPDEIAKADSPSIFFQVLNLEVMDRSRHWKIVGCSAYTGEGLLEGFDWLVQDVASRIYVLD

SEQ ID NO: 1534 - protein, 365 aa, Zea mays
  VARIANT 46: note = Ancestral polymorphism is D, Derived polymorphism is G
  VARIANT 51..365: note = Derived polymorphism lacks residues 51 to 365
  VARIANT 54..365: note = Derived polymorphism lacks residues 54 to 365
  VARIANT 71..365: note = Derived polymorphism lacks residues 71 to 365
  VARIANT 93..365: note = Derived polymorphism lacks residues 93 to 365
  VARIANT 97: note = Ancestral polymorphism is S, Derived polymorphism is F
  VARIANT 147..365: note = Derived polymorphism lacks residues 147 to 365
  VARIANT 176: note = Ancestral polymorphism is L, Derived polymorphism is Q
  VARIANT 177: note = Ancestral polymorphism is D, Derived polymorphism is Y
  VARIANT 258: note = Ancestral polymorphism is E, Derived polymorphism is K
  VARIANT 279: note = Ancestral polymorphism is T, Derived polymorphism is I
  VARIANT 300: note = Ancestral polymorphism is C, Derived polymorphism is F
MQLNAMSSFSAGHGRRPKKKVYHREPGLDRAMDLQKKPALLLRLRDLILAQKTGSLLVRDLEKEVGFVQKWNFLSLIERHPNIFHVSGGSASREPISVTLTEKARKISSEEAEARELMEPILVRNLRKLLMMSMDCQIPLDKIELIQSELGLPNNFKSNMIPRYPDFFSIRDVKGLDHLCLENWDSSLAVTIREEKMNFEGFQIGCRGIPKDGNVLGPFAFKLKYPTGFRPNRKYLEEVVRWQKMAFPSPYLNARRVESATPQSRKRAIAVLHEILSLTMERRLTSDKLDIFHNEYRLPCKLLLCLVKNHGIFYITNKGARSTVFLKEAYENCNLIDKCPLLKFYDQFASLIGRPCSNSDNMLAV

SEQ ID NO: 1535 - protein, 384 aa, Zea mays
  VARIANT 65: note = Ancestral polymorphism is D, Derived polymorphism is G
  VARIANT 70..384: note = Derived polymorphism lacks residues 70 to 384
  VARIANT 73..384: note = Derived polymorphism lacks residues 73 to 384
  VARIANT 90..384: note = Derived polymorphism lacks residues 90 to 384
  VARIANT 112..384: note = Derived polymorphism lacks residues 112 to 384
  VARIANT 116: note = Ancestral polymorphism is S, Derived polymorphism is F
  VARIANT 166..384: note = Derived polymorphism lacks residues 166 to 384
  VARIANT 195: note = Ancestral polymorphism is L, Derived polymorphism is Q
  VARIANT 196: note = Ancestral polymorphism is D, Derived polymorphism is Y
  VARIANT 277: note = Ancestral polymorphism is E, Derived polymorphism is K
  VARIANT 298: note = Ancestral polymorphism is T, Derived polymorphism is I
  VARIANT 319: note = Ancestral polymorphism is C, Derived polymorphism is F
MMERRLGRRVYLIPRTLPFMQLNAMSSFSAGHGRRPKKKVYHREPGLDRAMDLQKKPALLLRLRDLILAQKTGSLLVRDLEKEVGFVQKWNFLSLIERHPNIFHVSGGSASREPISVTLTEKARKISSEEAEARELMEPILVRNLRKLLMMSMDCQIPLDKIELIQSELGLPNNFKSNMIPRYPDFFSIRDVKGLDHLCLENWDSSLAVTIREEKMNFEGFQIGCRGIPKDGNVLGPFAFKLKYPTGFRPNRKYLEEVVRWQKMAFPSPYLNARRVESATPQSRKRAIAVLHEILSLTMERRLTSDKLDIFHNEYRLPCKLLLCLVKNHGIFYITNKGARSTVFLKEAYENCNLIDKCPLLKFYDQFASLIGRPCSNSDNMLAV

SEQ ID NO: 1536 - protein, 266 aa, Zea mays
  VARIANT 1: note = Ancestral polymorphism is M, Derived polymorphism is K
  VARIANT 14: note = Ancestral polymorphism is E, Derived polymorphism is A
  VARIANT 99..266: note = Derived polymorphism lacks residues 99 to 266
  VARIANT 119..266: note = Derived polymorphism lacks residues 119 to 266
MAAAAAGEDDAAWERAISAATKSTSAPKTLTLDGAVKSSTGGLPSAALLERFAASLEELSVAGARLSSLAGLPRLPALRRLSLPDNRLSGAAALAAVAEACGATLRHLDLGNNRFAEVQELAPLAGVRVESLDLFQCPVTKVKGYRDEVFALIPSLKYLDGADAEGNERLETDDDDDEEEDDEEGEEGPEGEEEGDEDDGEEEDDEDGEGDDEEEGDEEAEDEDGEAEDDELDADAEDKENIESKAGSSLPNKRKRNNEDDANGYK

SEQ ID NO: 1537 - protein, 380 aa, Zea mays
  VARIANT 110..380: note = Derived polymorphism lacks residues 110 to 380
  VARIANT 99..380: note = Derived polymorphism lacks residues 99 to 380
MASVAELKEKHAAATASVNSLRERLRQRRETLLDTDVARYSKSQGRVPVSFNPTDLVCCRTLQGHSGKVYSLDWTPEKNWIVSASQDGRLIVWNALTSQKTHAIKLHCPWVMACAFAPNGQSVACGGLDSACSIFNLNSQADRDGNMPVSRILTGHKGYVSSCQYVPDQETRLITSSGDQTCVLWDVTTGQRISIFGGEFPSGHTADVQSVSINSSNTNMFVSGSCDTTVRLWDIRIASRAVRTYHGHEDDVNSVKFFPDGHRFGTGSDDGTCRLFDMRTGHQLQVYSREPDRNSNELPTVTSIAFSISGRLLFAGYSNGDCYVWDTLLAEVVLNLGNLQNSHDGRISCLGMSSDGSALCTGSWDKNLKIWAFSGHRKIV

SEQ ID NO: 1538 - protein, 53 aa, Zea mays
  VARIANT 21: note = Ancestral polymorphism is G, Derived polymorphism is A
MMPSEGSWAHRLQQGGLDYHGCQCDPRRRSILLFGASFPDALPARLGCVCNFV

SEQ ID NO: 1539 - protein, 338 aa, Zea mays
  VARIANT 267..338: note = Derived polymorphism lacks residues 267 to 338
  VARIANT 88..338: note = Derived polymorphism lacks residues 88 to 338
  VARIANT 84: note = Ancestral polymorphism is G, Derived polymorphism is W
  VARIANT 55: note = Ancestral polymorphism is G, Derived polymorphism is S
MQKDHFLRCRMERQLANLESAYCKFSNIICKEMFFREMVQILQVYIEKNVLLFQGFEHSNKDSTGIGCDPFTLSGSEAMFADLGHFNQLSIQCTISEKIRWPIMTIAILAAVVGSQAVITGTFSMIKQCASLGCFPRVKIIHTSAKVHGQIYIPEINWIMMILCLAVTIGFRNTEHLGNASGLAIITVMLFTTCLMSLVIVLCWHKSIFLAIGFILFFGTIEALYFLAALIKFREGAWVPIVLALIFILIMCIWHYGTIKKYEFDVQSKVSINWLLGLSLNLGIVRVRGIGLIHTELETGIPGIFSHFVTNLPAHLPRFLFHFILYFFTLYCMWFEVL

SEQ ID NO: 1540 - protein, 281 aa, Zea mays
  VARIANT 35: note = Ancestral polymorphism is G, Derived polymorphism is D
MHHPPPPPPRISPPPADPALALCGSAAGLLRHGRGHAAPGIRRRLAASRFRGYSAVRVPMETSPETFLWTSEIAIPVHPTIKVVYSAHPTADVFINFASFRSVAMSSMSALMWPTIRVVAIIVIIGPATIGGIQAGAFKIEMLSRREKATNFKPDYDIDIHMKVLAMSVQESSILTGYKMKVRTIKVEKRINEIVNRLNKTKVERKPDLKAEREAISAAEKAERKAQLRDKKRREEMERLDKEKQADIRSYKGLMVQEKMTSNKQIASGSKTLQELEEDFM

SEQ ID NO: 1541 - protein, 109 aa, Zea mays
  VARIANT 39: note = Ancestral polymorphism is A, Derived polymorphism is V
MQVVPDNQNRALYSTHTFKILFKEGGCGTFVPLFLNLTVSVRRYNEFEAQSAANMAPRVDPLQAAQTPIDDMMRHAYVDPNDPTKIYLQQPAPESQLRRRNYHGPADAN

SEQ ID NO: 1542 - protein, 354 aa, Zea mays
  VARIANT 54: note = Ancestral polymorphism is G, Derived polymorphism is V
MMPAYVEPAAAVKTGLKRKRIAVGSSEQYEFEETCRLGVGAFGAVFKARHRATGQIVAVKCHSAADGDLTMVFREARFHEEACCGGANPFAVSFHGVVRDPGTWKRYLVMECMETSLHDLLHQRPRGSPPLPEVTVRAAMWQLLTGTKKMHEACIIHRDIKLQNILVGEGQSVVKICDFGLAMSTDERLPYEPAGTLWYQAPEMLLGKPDYDTKVDVWSLGCVMAELVNNGRPLFQGSDDDGQLCAIFDVLGVPDDSTWPWFSSTPFATEVMPELDMQRNNHLRDLFPETKLSTEGFQVLSGLLTCNPNRRLTAAAALNHPWFAKVDDLELPKKKEKLESMLPKRHIQRRLRAV

SEQ ID NO: 1543 - protein, 648 aa, Zea mays
  VARIANT 372: note = Ancestral polymorphism is G, Derived polymorphism is V
  VARIANT 377: note = Ancestral polymorphism is G, Derived polymorphism is D
  VARIANT 570..648: note = Derived polymorphism lacks residues 570 to 648
MPASVEPAAAVKTGLKRKRIAVGSSEQYEFEETCRLGAGAFGAVFKARHRATGQIVAVKCHSAADGDLTMVFREARFHEEACCGGANPFAVSFHGVVRDPGTWKRYLVMECMETSLHDLLHQRPRGSPPLPEATVRAAMWQLLTGTKKMHEACIIHRDIKLQNILVGEGQSVVKICDFGLAMSTDERLPYEPAGTLWYQAPEMLLGKPDYDTKVDVWSLGCVMAELVNNGRPLFQGSHDDGQLCAIFDVLGVPDDSTWPWFSSTPFATEVMPELDMQRNNHLRDLFPETKLSTEGFQVLSGLLTCNPNRRLTAAAALNHPCLGNAIRRRPANSLMMPAYVEPAAAVKTGLKRKRIAVGSSEQYEFEETCRLGAGAFGAVFKARHRATGQIVAVKCHSAADGDLTMVFREARFHEEACCGGANPFVVSFHGVVRDPGTWKRYLVMECMETSLHDLLHQRPRGSPPLPEATVRAAMWQLLTGTKKMHEACIIHRDIKLQNILVGEGQSVVKICDFGLAMSTDERLPYEPAGTLWYQAPELLLGKPDYDTKVDVWSLGCVMAELVNNGRPLFQGSDDDGQLCAIFDVLGVPDDSTWPWFSSMPFATEVMPELDMQAYNRLRDLFPETKLSTEGFQLSKCSVACLHATPTGG

SEQ ID NO: 1544 - protein, 126 aa, Zea mays
  VARIANT 25: note = Ancestral polymorphism is P, Derived polymorphism is S
  VARIANT 9: note = Ancestral polymorphism is A, Derived polymorphism is S
MSSARSSKALVVAGRHHRSNIKRRPMPICGGFTTEVDGRGEICGEEKVSATAHRWGREWSSGECQQQHEVGDDVPRKEVNLPQVERRKHHEEDELSPGWMGGGDREYARREEETDQDNRPTFGHQT

SEQ ID NO: 1545 - protein, 381 aa, Zea mays
  VARIANT 244: note = Ancestral polymorphism is G, Derived polymorphism is E
  VARIANT 267..381: note = Derived polymorphism lacks residues 267 to 381
MSWRRNQLRAFLVLAVILLITAATYRANAQPAPPADPTPAADTCADPSVEGACRNVPKALRLKLIAIPTILVSSVIGVCLPLLSRSVPALRPDRNLFVIVKAFASGVILATGYMHVLPDSFSNLTSPCLPRKPWADFSFTTFVAMLAALFTLMVDSLMLSFYNRRKGGNTSGRRTSGAVADHESPAHEHHWHSHGHGHGHGHAGGIVVADKPEDDEASQVQLRRNRVVVQVLEMGIVVHSVVIGLGMGASQNVCTIRPLVTAMCFHQLFEGMGLGGCILQAEYGAKMKAGLVFFFSTTTPFGIALGLALTKVYRENSPTALIVVGLLNAASAGLLHYMALVELLAADFMGPKLQSSVRLQLLCFLAVLLGAGGMSIMAKWA

SEQ ID NO: 1546 - protein, 136 aa, Zea mays
  VARIANT 6: note = Ancestral polymorphism is K, Derived polymorphism is N
  VARIANT 7: note = Ancestral polymorphism is A, Derived polymorphism is E
  VARIANT 10..136: note = Derived polymorphism lacks residues 10 to 136
  VARIANT 21: note = Ancestral polymorphism is G, Derived polymorphism is R
  VARIANT 22: note = Ancestral polymorphism is S, Derived polymorphism is F
  VARIANT 35: note = Ancestral polymorphism is Q, Derived polymorphism is K
  VARIANT 116..136: note = Derived polymorphism lacks residues 116 to 136
MQALIKADFWILFFSLLLGSGSGLTVIDNLGQMSQSLGYEETHISVSMISIWNFLGRIGGGYFSEIIFKDYVYPRTIALGIAQVLMAIGHFNFAMAWPGTMYIGTLLVGVGYSAHWAIVPAAAFELFRVARNLLYF

SEQ ID NO: 1547 - protein, 336 aa, Zea mays
  VARIANT 60..336: note = Derived polymorphism lacks residues 60 to 336
MLPLSFQGATIVDQIVNITPAEDYIYIPVTEQQLMVHEVTSRSSASTAELEYSSEVTHHWANASARINSFDKRVGLSEKINNGIYVVNERVKSVDQRLHVSDKTMAALQAAERKLNDTGSAVKTNRYVSAGTSWLNGAFSKVAKAGHVAGSRTREKFQLAVSNLTAKLNNIFAHIYSRTGPDSRSVKKALPGPCCCCLRGMLVKKALFLRKIHWKLSFMEGDNPFAAWRSLRRQGNNSADVVAQQADTCDGAVYSSNLSNKTESLTARPEQASPASPYALVAPTLTEAAHSWCRSRPSPSLPSASPSPSASSSSAWHGQRAILHSYLPHNVSSERA

SEQ ID NO: 1548 - protein, 179 aa, Zea mays
  VARIANT 28: note = Ancestral polymorphism is T, Derived polymorphism is M
  VARIANT 165: note = Ancestral polymorphism is V, Derived polymorphism is A
  VARIANT 166: note = Ancestral polymorphism is D, Derived polymorphism is V
MQFFGGSSLTSIAPEATPAPAAPPGTGTGASAQVLYVFNRNGVCLLYREWHRPLRTLDPTQDHKLMFGLLFSLRSFTAKIDPTTAEKGNLGVPLLPGQGCSFYSFKTNTYKLNFMESPSGIKLILITHPRTGDQRDSLKHIYNLYVEYVVKNPLYAPGTPINRVADMSPGLSLVLTFES

SEQ ID NO: 1549 - protein, 433 aa, Zea mays
  VARIANT 43..433: note = Derived polymorphism lacks residues 43 to 433
  VARIANT 27: note = Ancestral polymorphism is R, Derived polymorphism is G
MLAVAGDGKGRRRSVLPKERPSGRLIRLLAALRPSRAGPLPVQTGFPTSLADLVVKNHGRLKKHPSPSSKRGAAASPSPSPLPSPSTPTSPSLFPPAESPPPPTTADAVSPSDRPRPDLPPAQPPRRGKGSGFGPGLGLGLGFLAVSGVVASLALLVIWSKVVAAVTVASFSLYLLESVRSSSLPRRRPRAVVTERRLALDGRGRVSPIREVDAATEPSRPSCCSDSDRESDGRMLLVEESGGVLDESSNLRPKAKKKSWKKLLASSKKLHRGRRSKEAGSSGCDGDGDGSREGDDTARGGGNAKAADSSGSRRGAPSEIGAAADEAAAKEADSSRGSRGSQCVEVDAGHVEIDASVDDLIEEEEEEQAGIRSPALVLVAIVLVGLVAGKVVALAVTVLCSAFLSSVQRSPCACGCGGGGGCSHGGRLELSMP

SEQ ID NO: 1550 - protein, 108 aa, Zea mays
  VARIANT 88: note = Ancestral polymorphism is G, Derived polymorphism is D
  VARIANT 87: note = Ancestral polymorphism is A, Derived polymorphism is G
  VARIANT 76: note = Ancestral polymorphism is G, Derived polymorphism is S
  VARIANT 52: note = Ancestral polymorphism is V, Derived polymorphism is G
  VARIANT 3: note = Ancestral polymorphism is S, Derived polymorphism is P
MVSWKKKRGGGGESQSPIRGAAEQEKVPRGHVPMLAAGEDDDAVDVGERVLGPVTLLSDPSVAELLDMAAQRYGYGQPGVLRVPCDAGRFRQVLHGAMHRRGIISSSA

SEQ ID NO: 1551 - protein, 110 aa, Zea mays
  VARIANT 98: note = Ancestral polymorphism is D, Derived polymorphism is Y
  VARIANT 95: note = Ancestral polymorphism is Q, Derived polymorphism is H
MVSWKRKRGGGGGGEEPPVRGAAEEEKVPRGHVPMLAAGGDDDDGVDDVGERVLVPVTLLTDPSVAELLDMAAQRYGYGQPGVLRVPCDAGRFRQVLDIAMHRRGVSSSA

SEQ ID NO: 1552 - protein, 382 aa, Zea mays
  VARIANT 189: note = Ancestral polymorphism is A, Derived polymorphism is S
  VARIANT 240: note = Ancestral polymorphism is A, Derived polymorphism is V
MFAGFATHFSPRLPQHGPYGKEREGGSGIDRGKPSLCFRDNSGDAMAMAALRREGRRLLLAPTVPNPSSAAASAAVTRSSAMSQPAGVCICLTCTVRNRMKSIKNIQKITKAMKMVAASKLRAVQTRTENSRGLWQPFTALLGDTPSMYIFFCFDLTGVDVKKNVIVAITSDKGLCGGINSTSVKVSRALHKLTSGPEKESKYVILGEKGKVQLLRDSKNSIEMTASELQKNPINYTQIAVLADDILKNVEYDALRVIFNKFHSVISFKPTMVTILSPEVAEKEAEAGGKTGDLDSYEIEGGETKAEILQNLAEFQFSCVMYNGALENACSELGARMSAMDSSSRNAGDMLDRLTLTYNRTRQASITTELTEIISGASALEG

SEQ ID NO: 1553 - protein, 103 aa, Zea mays
  VARIANT 58: note = Ancestral polymorphism is S, Derived polymorphism is C
  VARIANT 24: note = Ancestral polymorphism is E, Derived polymorphism is V
MAWTKRKTGGSGSPARGAGAYEEEEKVPRGHVPMLVADGDGGHGERVLVPVTLLSDPCVAELLDMAAQRYGYGQPGVLRVPCDAGHFRQVLDGAMHRCGISVA

SEQ ID NO: 1554 - protein, 103 aa, Zea mays
  VARIANT 18: note = Ancestral polymorphism is P, Derived polymorphism is S
  VARIANT 26: note = Ancestral polymorphism is D, Derived polymorphism is E
  VARIANT 58: note = Ancestral polymorphism is A, Derived polymorphism is T
MRQLARRLTRVADSSASPAEERRGVEKAPQAAAVPEGHVPVHVGERSDGEAERFLVRAELLGRPALAHLLGRAAQEYGYGHQGPLRIPCSPAAFRRALAALEP

SEQ ID NO: 1555 - protein, 211 aa, Zea mays
  VARIANT 98: note = Ancestral polymorphism is R, Derived polymorphism is H
MRDAAVVVAVPGPGAATRGGGAKPGAAGAAPCAACKLLRRRCAAGCVFAPYFPPGEPHKFASVHKVFGASNVSKLLQEIPAQHRGDAVSSMVYEANARVRDPVYGCAGAVSSLQQRVEALQAQLALAQAEVVRLRMSNDYVLRRLKAAGAGAGAGGGSSSSYAGSPSSMSSLKTAAAAEPDARCRATTPELLVLDMVVDQPGMDDAHFWSY

SEQ ID NO: 1556 - protein, 391 aa, Zea mays
  VARIANT 91: note = Ancestral polymorphism is F, Derived polymorphism is S
MNCLQNLLKEPPIVGSRSMRRPSPLNLAMVRGGSRRSNTVKTLQAPGASTSGAESSAVEMGTEKSEVYSTNMTQAMGAVWSINLSDMCFFSPHVIIALTYRHELGMNYNFIRPDLIVGSCLQSPLDVDKLRKIGVKTVFCLQQDSDLEYFGVDIRAIQDYSLQFKDIVHCRAEIRDFDAFDLRLRLPAVVSKLHKLINCNGGVTYIHCTAGLGRAPAVALAYMFWILGYSLNEGHRLLQSKRACFPKLEAIKLATADILTGLSKNTITLKWEADGSSSVEISGLDIGWGQRIPLTYDEEKGAWFLEKELPEGRYEYKYVVDGKWLCNEHELITKPNADGHVNNYVQVSRDGTSDEEKELRERLTGPDPDLTDQERLMIREYLEQYADAAER

SEQ ID NO: 1557 - protein, 678 aa, Zea mays
  VARIANT 13..678: note = Derived polymorphism lacks residues 13 to 678
  VARIANT 159..678: note = Derived polymorphism lacks residues 159 to 678
  VARIANT 280..678: note = Derived polymorphism lacks residues 280 to 678
MGVVYYQYKSEKEICSMPVLHAFISVSELKQLILTSGKHGHGRTHGRAREDIIIFNAHSGEEYADERASIPQNTTVLVRRISIAGQLSEKIVLSPTRKVTEEFSVPCKSVVTDSSSKSCSSTVVQDEDAAIAAVIDAAELKSEQLPSKKGQGSGRFTSGRNYGSLEGEAPPPGYVCRSCGVPGHFIQHCSQENKIPPPGYICYRCRIPGHFIHRCPSIGDPKCDNNKMLCSLVPVVTPVNGILDSLVPASPVSAVDDLPAELHCRLCKKVMRDAVLTSKCCFDSFCDRCIRDYIITESKCICGVKTLADDLIPNQTLRSTISNMLGTQTISGGSGTTRHRSSSGSNPDPKIQSHTASTREVKQSRDHQLPAASALDDVLQVATEGALVNQPREKLVPSAKILGKDGGNFAQVSAEKTVANAEALKVKDGTESTSKATTVSGAREHNVTRTDQPKKWKKAVLTKNFQPNNVGYGYNVPFDPAYCNPFINGYPWATEPYMYSSMGVPYPGYPMDPYCVNSFTCIPSQALAMQGYATSYQRHVLPETEPMHRGGTAAAPSKRPERSDRPKDTRHQPQSREHERQLGSSHVSESRTRNRTRSSSEGRDRGHSDRASVDHHEDHSTRKRTRDSSPKYGDRQSDRRSSHGSRSMMTPEEDASDDECNFKRRWGRRSSGGVDTRH

SEQ ID NO: 1558 - protein, 142 aa, Zea mays
  VARIANT 51: note = Ancestral polymorphism is P, Derived polymorphism is L
  VARIANT 88: note = Ancestral polymorphism is A, Derived polymorphism is V
  VARIANT 118: note = Ancestral polymorphism is T, Derived polymorphism is M
MATLQLNHIARETSDVARLAAFYEAVLGFERIPSPTYSGFQVAWLRLPSSPDVALHLIERDPAAAPVAVGPGAEGAPPSQLPRRHHLAFSVADYDGFVTGLKARGTDVFEKSQPDGRTRQVFFFDPDGNGLEVTSAGAGNEK

SEQ ID NO: 1559 - protein, 150 aa, Zea mays
  VARIANT 21: note = Ancestral polymorphism is H, Derived polymorphism is R
MAAASASLLHLATPTLTRSTRLAVRLPSAQLSRWPSGARIAAAQPPRAYKVTIEHGGESRVVEVEEDETILSRALDEGLDVPHDCKLGVCMTCPARLVSGTVDQSDGMLSDDVVARGYALLCAAYPRSDCTIRVIPEDELLKVQLATADD

SEQ ID NO: 1560 - protein, 324 aa, Zea mays
  VARIANT 94: note = Ancestral polymorphism is W, Derived polymorphism is G
  VARIANT 213..324: note = Derived polymorphism lacks residues 213 to 324
MAMDYVLVAVLFVTLLLATLLIRLVLAWGLGERFDQRLPPGSRGLPLVGETLEFFTAYGPIFRTSVVGEDLIVSLDPELSRRALQEEERAFQIWYPPSFLRVLGADSTVSALGPLHRHIRALVLRLFGPESLRLVLLRDVPRSARAELRSWLRRPGPGVEVRAATSRGRKRVMGTLRQQLGARRSRNEPEHEEEHENIQKRRADPDSDDEVTWEEYKSMKFTSHVIHEALRLANIAPVVFRKTTQDVQMKEYTVPQGSKVMICSAAAHLNPKVYKNPTVFNPWRWKDRTVESAGGSRISWPGLRLCVGADFAKLQMAIFLHYIV

SEQ ID NO: 1561 - protein, 99 aa, Zea mays
  VARIANT 9: note = Ancestral polymorphism is K, Derived polymorphism is Q
MPEDGYEWKKYGQKFIKNIQKMRSYFRCRHRLCGAKKKVEWHPRDPGGDLRIVYDGAHQHGPPPLAAPPGGHGQMQGGGASDSNRYELCTQYFGGARSR

SEQ ID NO: 1562 - protein, 215 aa, Zea mays
  VARIANT 10..215: note = Derived polymorphism lacks residues 10 to 215
  VARIANT 3..215: note = Derived polymorphism lacks residues 3 to 215
MAEPGLEDSQPVDLSKHPSGIVPTLQNIVSTVNLDCKLDLKAIALQARNAEYNPKRFAAVIMRIREPKTTALIFASGKMVCTGAKSEQQSKLAARKYARIIQKLGFPAKFKDFKIQNIVGSCDVKFPIRLEGLAYSHGAFSSYEPELFPGLIYRMKQPKIVLLIFVSGKIVLTGAKVREETYTAFENIYPVLAEFRKVQQWYVVLFYHVSIIVRA

SEQ ID NO: 1563 - protein, 277 aa, Zea mays
  VARIANT 181: note = Ancestral polymorphism is A, Derived polymorphism is V
MEAAPSLRTFSPSSFFSAGPRHCLLLAGPASRRARALPAPPLPRAVASTRAPLVVSSPPPPAASGTTAPAHAKVDRSGRFCSPRAARELALMISYAACLEGTDVVRLFDRRISARREPGFVFDKACLLSYNHMSFGGGPLEKQMYFQLLQNWFTTTLSYGILFFSPHSTKGIRLSRELLVAVASGWDKHVEIIDKIIPQAWKDEPVARILELCILHIAMAEMTSKGTPHKVVINEAVDLAKRFCDGGAPRVINGCLRTFVKDHVDVAGTSQGAESKL

SEQ ID NO: 1564 - protein, 184 aa, Zea mays
  VARIANT 104: note = Ancestral polymorphism is L, Derived polymorphism is S
  VARIANT 97: note = Ancestral polymorphism is K, Derived polymorphism is N
MSSSGPLLATGTHHTGRQPEVLWAQRSEKIFLTISLPDAKDVVLKTDPKGLFTFSAVVHGEPFSFTLELFDSILSEGSKTKTKMGLRNIICSIQKEKKGWWKRLLKSEEKHPYIKVDWNKWCDEDEESVTNVAFFVCPFVRNKQFLAEFSGDSDGGFDEANEGDESDDDDGMLYLPDLEKLRGK

SEQ ID NO: 1565 - protein, 87 aa, Zea mays
  VARIANT 13: note = Ancestral polymorphism is K, Derived polymorphism is N
  VARIANT 20: note = Ancestral polymorphism is D, Derived polymorphism is N
  VARIANT 31: note = Ancestral polymorphism is E, Derived polymorphism is K
  VARIANT 35: note = Ancestral polymorphism is G, Derived polymorphism is R
  VARIANT 38: note = Ancestral polymorphism is T, Derived polymorphism is I
  VARIANT 54: note = Ancestral polymorphism is S, Derived polymorphism is F
MAIKMKGIFKGLKIISQMFDTYSFAVHKEHEMEIGYPTDVKHVAHIGLGTSDTSPRWTAEFKGTDDSSAGSVRSTAAQSRQTSWTSA

SEQ ID NO: 1566 - protein, 253 aa, Zea mays
  VARIANT 66: note = Ancestral polymorphism is G, Derived polymorphism is R
MGFLPCRAFSATGFTSMDEDVGYVSPLLAFNLGLHVSCLKLLIQREGQPFKFCSRAEEIDGTASSRSDLSLHLDLLPCPQVPKYALHLRVSVMRIPDCGVLASLKINSSFGGSEYQDMVDQALNEYFKFDRFLARGDVFGIQNSWKCVSRCCLTCNKQDNRLNPRNMIYFKVTGMEPSDEPILHVNCNETTLVLGGAPSAAIPPYSFFASSGNSVPLHSEVVEHLASVIAPALCPSHILPKIKFSTFLYSPPG

SEQ ID NO: 1567 - protein, 553 aa, Zea mays
  VARIANT 393..553: note = Derived polymorphism lacks residues 393 to 553
MPPTATEATSSSATSATSSTDADAPGPTSPSPSRRAAPTLLLVAFLAALLIFSTGDDATAQPLNGVSLQNPEVSFVPSPLAGQFCERVLLSGVPRLHLDSYASQIRVKMNVSQSIPEKFHWKIEVCFHRNASMGLCQCEAGEWQGFQGGMWTAVSSPYGNKYVDLKLADKKPARFTLSIQEEFQKWRLACLGIGFVLLFLSPIISKWVPFYYSSSMALGILAVVLIVIFQVYFLKNIYIFHDQTISLGMKLLPMGRKSLFYLAIYGSVLGVGSYAVHYFSTLVSSILENFGLSEELYNPVSKFFLHVSIFLLVAIVLTGAGFGYWMVRRFILSKDGSVDAGIAQFVKWAMRVVATFFIMQSTLDPLLALVALAFSWWLCSLLTTKKVQKTMTQKQKQSKVLSQQMLTQGLPTGPKIQFLSPSKTGFGGTTSRTSATQYGRSNLANRGMVCSALAKRAVPNEDEDHYSTFHNIQPRKYTKQEWEDFTQESTRKALAECTATPEFAQWVGDNARRLQVEKEEDNLSEEEIMESSSSSEETGDEADGAPGLIRLWG

SEQ ID NO: 1568 - protein, 664 aa, Zea mays
  VARIANT 27..664: note = Derived polymorphism lacks residues 27 to 664
  VARIANT 357..664: note = Derived polymorphism lacks residues 357 to 664
MALEAGSSGCGGRGWGGGFRSLMRRKQVDSDRIRAEGQPQLAKELNVPELVAIGVGSTVGAGVYVLVGIIAREHAGPALTISFLIAGIAATLSAFCYAELASRCPSAGSAYHYSYICVGEGVAWLIGWALVLEYTIGGSAVARGISPNLALFFGGQDSLPWILARHQLPWFGIIIDPCAAALVCVVTVLLCMGIKESSFAQGVVTVLNAFVMIFVIVAGSYIGFQIGWVGYKDSDGYFPYGVNGMLAGSATVFFAYIGFDTVASTAEEVRNPQRDLPLGIGVALAICCALYMAVSVVIVGLVPYFAMDPDTPISSAFAKHGMQWAMYVVTTGAVLALCSNLMGSLLPQPRILMAMARDGLLPSFFSDVNKQTQVPVKSTIVTGICAAALAFTMDVSQLAGMREFLQDCTYTQAIQIIRWSEIKNMFFWLQVSVGTLLAFTVVAVSILILRYVPPDEVPLPPSLQESFRLNQECDEERDRALLGVGNCTLSQTKDVIVVVESVKDPLIDIPLHKGKMDETKRRKIASLSIGSVCIGVLILTSSASATWLPFLPICIGCIIGVVLLLAGLSLLSWIDQDAGRHSFGHSGGFTCPFVPVLPVLCILINTYLLINLGGDTWMRVGIWLLMGVLLYIFYGRTHSSLTDVVYVPVAQADEMYRSSSGYVS

SEQ ID NO: 1569 - protein, 677 aa, Zea mays
  VARIANT 35..677: note = Derived polymorphism lacks residues 35 to 677
  VARIANT 138..677: note = Derived polymorphism lacks residues 138 to 677
MTEDRAHKVADEPAASGRQRPERKKRKWDQPAEDLVSAAVTAAAVSGMPVMNFGALPGVVLPGVTAYGAATLPSVVPVPYSLPPHIAPSVLQNAAAAAQKLSQAKIPDEVIAREIVINDADPSVRYKLTKRQTQEEIQKCTNTVIITRGKYHPPNLLPDGEKPLYLHISAGSQLKDTAERIKAVDRAASMIEEILKQGTTSESISVPFSSSTGQAVRPFSASVFLGFDADPSLNITARIRGPNDQYINHIMKETGVTVVLRGKDSENLGSCHSEASQQPLHLYLTSMHLKNLEAAKVLAENLLDTVAAEFGASRISSSKVYGAVPPPQQLLAGVDTSGTKSDVHYIVGPNVLSGATHSFASTGVIAPVVAPAVTVQSGAPTYSGVPLPSNMAYPIPPANGGAFYSGYGDIYPQATPLQQLAFTLKHASSSATQAVPVTSTPTSMATKGNSILDAEMDKRSRRKFQELPVSKGPATESQVQFFFLNLMDESSCFLSSFQNSQQGSKFVKTGLDSSGNIGSSSIAPPKKVHPGSNGMLPQEEADMPSHLSISTKMLPPPLKSMLPLPPRSMPPPPPKSMPPPPPKFPSDEFLSRNENKFFPLKEPTAPPRSFDAISVLPSERRPREPKEEKTKGTPVSDTLLKLIDYGDDDDDGDIDVTDNTPKGNPTPGSEQKPFWAV

SEQ ID NO: 1570 - protein, 897 aa, Zea mays
  VARIANT 687..897: note = Derived polymorphism lacks residues 687 to 897
MGASRKLQGEIDRVLKKVQEGVDVFDSIWNKASPPPPPPPPLPSVYLNPPDFFLSRILLTFFLFRGQVYDTENANQKEKFEADLKKEIKKLQRYRDQIKTWIQSSEIKDKKVSASYEQALMDARKQIEREMERFKVCEKETKTKAFSKEGLGQQPKTDPKEKAKAETRDWLNNVVSDLESQIDNFEAEIEGLSIKKGKQRPPRLVHLEKSITRHKAHIKKLESILRLLDNDELSPEQVNDVKDFLDDYVERNQEDFDEFSDVEDLYSTLPMEKVEALEDMVSLAPSSLVKGVASVPTTAVSSTKSSIATSLTQPTVSTAPSQSTSQDQTEDTASQESNSESVPQTPPPKGGNSGPSIPAVPIAVSTGSAAISVLAETISSPVRPIVPTTVATILSSAIPRSAPENTSTVTSIPANLSITLKDDESMSFPPRRPSPAITEIGIGRGIARGTTSQALGTAPITIGPVPGNGSVSALPGINDLSKRNILNTDEKINSGGLSQQLVMPLGSKVQPQQVPRTNDAISSESANTNESPILGGRVFSPPVVSGVQWRPLGAAAFQNQSEISHFRGRPEISADHREKYIQRLQQVQQQGGSLLNVSHITGINQKQFPTQQPNPLLQQFNSQSSSISSQVNLGVQGTDAGHIKSEEEEQLLAEDGVESSATTGANKQTSEDDTKIPYSNPSAPAAESNQLPRDTDPSPGQPLQPGMSSSGVGVIGRRSVSDLGAIGDNLTGTSASSGHDQLYNLQMLEAAFHKLPQPKDSERAKTYIPRHPAVTPASYPQVQPSIVSHPSFWERIGSDTLATDMLFFAFYYQQNTYQQYMAARELKKQSWRFHRRYNTWFQRHVEPQVTTDEYERGSYVYFDFHVTEDGSGWCQRIKNDFTFEYNFLEDELSVQTN

SEQ ID NO: 1571 - protein, 359 aa, Zea mays
  VARIANT 285: note = Ancestral polymorphism is R, Derived polymorphism is H
  VARIANT 280: note = Ancestral polymorphism is P, Derived polymorphism is L
  VARIANT 276: note = Ancestral polymorphism is P, Derived polymorphism is L
  VARIANT 229: note = Ancestral polymorphism is Y, Derived polymorphism is N
  VARIANT 189: note = Ancestral polymorphism is D, Derived polymorphism is G
  VARIANT 177: note = Ancestral polymorphism is S, Derived polymorphism is L
  VARIANT 159: note = Ancestral polymorphism is R, Derived polymorphism is S
  VARIANT 152: note = Ancestral polymorphism is V, Derived polymorphism is D
  VARIANT 151: note = Ancestral polymorphism is H, Derived polymorphism is Y
  VARIANT 150: note = Ancestral polymorphism is R, Derived polymorphism is C
  VARIANT 146: note = Ancestral polymorphism is G, Derived polymorphism is D
  VARIANT 143: note = Ancestral polymorphism is L, Derived polymorphism is M
  VARIANT 37: note = Ancestral polymorphism is E, Derived polymorphism is D
MAVMGKEEEEQQQQHKEEEVVQGDVRVVVQQETAADEEAESALVRKISGLAAAIARLPSLSPSPEVNALFTDLVTACIPRSTVDVERLGPELQRMRAGLIRLCADAEALLEAHYSDLLAAFDNPLDHLPLFPYFTNYLLLSQLEHGLLARHVPGPPPSRVAFVGSGPLPLSSLVLASRHLPAAAFDNYDICGDANDRARRLVRADAALAARMAFRTSDVAHVTRELAAYDVVFLAALVGMAAEEKARVVEHLGRHMAPGAALVVRSAHGARGFLYPVVDPEEIRRGGFDVLAVHHPEGEVINSVIIARKPLPVVDEHAVAGVGHAHAHGAVLSRPCLCCEMEARAHQKMEEVAMEQLPS

SEQ ID NO: 1572 - protein, 173 aa, Zea mays
  VARIANT 97..173: note = Derived polymorphism lacks residues 97 to 173
MEHVSVPGHSMLNMVTVRCGHCTSLLSVNLRGLIQSLPVVQNHYSQEHFKVQNFSFTENYPEYAAPPSSSRYRMPTMLSAKGDLDHMLHVRAPEKRQRVPSAYNRFIKEEIRRIKANNPDISHREAFSTAAKNKYMWAHFPNIHFGLGPYESSNKLDETIGATGHPRKIQDPY

SEQ ID NO: 1573 - protein, 462 aa, Zea mays
  VARIANT 391: note = Ancestral polymorphism is I, Derived polymorphism is N
  VARIANT 374..462: note = Derived polymorphism lacks residues 374 to 462
  VARIANT 361: note = Ancestral polymorphism is G, Derived polymorphism is V
  VARIANT 78..462: note = Derived polymorphism lacks residues 78 to 462
MLKCSHSAPPKRPRARFARLSAETEAAGKAPAEPKPRVERICAMRASPIHTKTARVKCPSERKKALTTPRSKAVRSRQELFHSVKHQKEPLAAAARKGTVVKSLFMSTTPKKEPVQTPAADKSKGAVSEVCSKLRKLNLACREVPSRYMSQPQPKNTKTAKKSEETTVAKSEKRGLESKTNAKKKILGRSVKRANAGPDGENRNGCSTAADENSLVETAGSHQERKVVLQELRIEVDVSRCGNSDDNKENVSSAPSEEALDNSSYYGSENRLLENNDNVPLKENVALKVAKLQKKVHQEQAGKLKKTTNPRLMSRFAEAAAVLRAMGSAVAFAKLDGERYPKAAAAVGVKGFPTVLLFVNGTEHAYHGLHTKLQSKDSVEEFLKKDMTFVIGLFKNFEIFTFAEAYDFEDLESMVEEIGRAFKTKIMFIYVDTAEENLAKPFLTLYGLESEKKPTVSLMLDS

SEQ ID NO: 1574 - protein, 764 aa, Zea mays
  VARIANT 242..764: note = Derived polymorphism lacks residues 242 to 764
  VARIANT 322..764: note = Derived polymorphism lacks residues 322 to 764
  VARIANT 497..764: note = Derived polymorphism lacks residues 497 to 764
MVARMMRWPRPPAARKFRVRLLVRRAEGLPPPSPSPSPSPSPATAASPEREPPGAAQPRAAVAAEVRWKGPRASALGSLRRAAVRRNRTREDAGAAWEEEFESVVTLAAASQREGAAFHPWELAFCVFSDINKGPKNKPSILGTASLNLADYALTAGETIEIILPLSIPGGAPERASSLHLTLSMVELRAFQETSDASQRSAATLPLSPSSGDSFPGGKDEVSVIKAGLRKVKILTDLVSTRRPKKTCQAGGEDKFCVNSDGAEYPCDTESLDDDLDDRVEEDEFGDSTIRKSFSYGSLQSVNYVGGLVYAHAKIDGEHEDWIYYSNRKTDVGFQVEKVLPSTTENGLLTAKRSILPWRKRKLSLRSLKAKGEPLLKKAYGEEGGDDIDNDRRLLTSSDESVSEGSRGDGSANTMVSEFGDDNFVIGNWELKEIISRDGRMKLSSQMFFASIDQRSERAAGESACTALVAVIADWFQANQNIMPIQSQFDSLIREGSLEWRNLCENETYRERFPDKHFDLETVLHAKIRPLTVSPSKSFIGFFQPEGDDDMSGFDFLNGAMSFDNIWDEIAQAAEFSSSDSPNLYIVSWNDHFFLLKVEHDAYYIIDTLGERLHEGCSQAYILKFDKNTTIHKVPGEKKSCSPDSSGPMKDSSGSESSTTDQDSGNDTEEEVLVSKGKESCKEYIKSFLAAIPIRELQADIKKGLMASTPLHHRLQIEFQYTQSSPKETASATQLLTMEAPFEFSWPEAPPTMEVTLTSAVSVV

SEQ ID NO: 1575 - protein, 118 aa, Zea mays
  VARIANT 5..118: note = Derived polymorphism lacks residues 5 to 118
  VARIANT 48: note = Ancestral polymorphism is E, Derived polymorphism is D
  VARIANT 75..118: note = Derived polymorphism lacks residues 75 to 118
MVKPQLVEEYEETGNDKDGLNDDGEHDLGEWGMTQLVEDPDEGISDDELSGGTVVLIDNEILTEDERGAKSGMDKRDTKLGLEESIEGLNGWIKQHDDNNNLVDYGASTDEDGDTSSG

SEQ ID NO: 1576 - protein, 314 aa, Zea mays
  VARIANT 169: note = Ancestral polymorphism is P, Derived polymorphism is R
  VARIANT 82: note = Ancestral polymorphism is A, Derived polymorphism is V
  VARIANT 38: note = Ancestral polymorphism is T, Derived polymorphism is I
  VARIANT 37: note = Ancestral polymorphism is S, Derived polymorphism is F
MAQVPSESSKSDAETSPPADKAPPEISSPECYSDLVSTRPARGGWVQPLVLYQNYWLTPGRLQHIIPVKELYKPRADDIVLVTYPKCGTTWLKALAFAITTRSRHAFAAHPLLARHPQELVPHLELPALAGDLADVEKLAALPEASRDSPTPFPAPAGRVRLPRRVPVPASQGRLRLVVGFSPLGPFWEHYLEYWKASLERPQHILFLRYEEIVADPVKVVKTLAGFFSDPFTEAEERGGVPEQVARLCSFEVLSGLEKNQTGGVAFGNDLVIGKSTFFREGKVGDWENHMTKEQGQRLDDVLEDKLKGSGLVF

SEQ ID NO: 1577 - protein, 312 aa, Zea mays
  VARIANT 121: note = Ancestral polymorphism is R, Derived polymorphism is W
MAGSADAPPPTPPSTSPPGTPPHTKPRPLPSPSALMAEMAGSADALPPTPSPSSPPGIPPHTKPRPLPSSSPSTAPSWKARYADAPHSLPGSDDNHDAPSLPQSTAIKRMDRVRSFGTEGRKKDGVQIPASDKVYEYILFWGTDIKSSPPQPSPPQAASLHNDPAIIQSHYSQPASTSSSLPSTGGAVLPDFSSQAVQYGLQRPNFQSNLPLYQPGNTPWGSLVAPPAGNAPWGSSVAPPAGNASTLLVPSMYWQGYYAPSSGLPHHLQPPPLLHPTPGLSVPQNLQYPGLNPSLQSGPQKLSELQPSLMQH

SEQ ID NO: 1578 - protein, 475 aa, Zea mays
  VARIANT 277: note = Ancestral polymorphism is S, Derived polymorphism is F
  VARIANT 223: note = Ancestral polymorphism is G, Derived polymorphism is E
  VARIANT 199: note = Ancestral polymorphism is I, Derived polymorphism is T
  VARIANT 87: note = Ancestral polymorphism is S, Derived polymorphism is I
MSMKRHFAIFTTASLPWMTGTSINPLFRAAYLAKDGDKDVTLVIPWLCLRDQELVYPNNIVFDSPSEQESYVRHWIEERIDFRPSFSIKFYPGKFSKEMRSILPVGDITECIPDEVADVAVLEEPEHLNWYHHGRRWKNKFRRVIGIVHTNYLAYVRREKNGQVIACFLKYANTWVTRIYCHKIIRLSGATQNLPRSVICNVHGVNPKFLEVGKLKLRQLQNGEKAFTKGAYYIGKMVWSKGYRELLDLLSKYQSKLVGLEVDLYGSGEDSDEVCESAKRLSLSVNVHPGRDHADPLFHEYKVFINPSTTDVVCTTTAEALAMGKIVICANHPSNEFFKQFPNCRVYDNEDEFVQLTLNALSEQPAPLTDTQRYELSWDAATERFIEASDINPHVPESRAHQNSRALLPAFLRTRKLKQNLEDASVYLHQALSGLEVTRCAFGAVPKTLQPDEHLCKDLGLAPPAKKRRLKIKKT

SEQ ID NO: 1579 - protein, 1187 aa, Zea mays
  VARIANT 133..1187: note = Derived polymorphism lacks residues 133 to 1187
MSTRGGGGGRRGGRGQQGGGRGGGSGRGGGRGRGQGAVDLGGFREDTRGGPGRGHRGGSASSGAAQRGGGHAAQSQSPHPAAGPGPGPGRGGYSSAPRQVSSGPTPAEVEAMRRQVERKVVMDETQAQRCQGSSSSQAPAPRPAMQDKAPGPLAPAGSPLSIPAQSPAFFQAPAVRPAMQAKPPGQVAQAASSSSSFPMLATAQAPRPGRPATALQGKPPGQVTQAASSSSSFPMLATVQAPTPGRPATALHGKPPGQVVPAAIPSSFPAPAPVQGSTPGRPAMQAKPPGHVAPAASSSERPLQMQGKVPDQMALSAPAGTLPPASSKAMVFPPRPGYGTVGRRCQVRANHVEVKLGDKDIYHYDVTIKPESTSRARNRWIIKELVNLYKQHLDGRRPVYDGRKSLFTAGPLPFQSKEFVLMLTNHERGKQGEKEYKVAIKDAARIDMYSLKMFLAGRNRDLPQNTIQALDIALREFPTSEYTPISKSFFSRKEFGDGQSLGNGVECWRGYYQSLRPTQMGLSLNIDVSATSFYKAQPVIDFVVEYLNLRDTSKRISDQDRIKLKKALKMVWVATNHMQDKCIHYRITGLTSTPLKDLTFDQEGTRVSVVHYFKQRYNYYLQYTHWPCLQAGRVDKQIYLPIEVCSIVQGQRYSSKLNENQVRNILQFTCERPADRQTRTFEVFKNYKSDGSTYAEEFGLTLMDQLTLVDARVLPAPRLKYHDSGREKVCNPSIGQWNMINKRMVDGGSIKYWACITFASRLNLNDVVMFCEALVGMCNNIGMQMCTRPCVEIRKAHQDKLEAEIRGIHSRSAQVLAQQGLTAKQLELLIIILPDMSGFYGRIKRVCETELGLITQCCAPKNVRKGGNQYLENLSLKINVKVGGRNTMLEDAFNRRIPLLTDCPTIVFGADVTHPSAGESSSPSIAAVVASMDWPQVTKYKCLVSSQGQRVEIINDLYTEVEDPQKGIVKGGMIRDLLMSFFKSTGQKPSRIIFYRDGVSEGQFSQVLLYEIDAIRKACASLQDNYLPRVTFVVVQKRHHTRLFPENHRSRDQTDRSGNILPGTVVDTKICHPSEFDFYLCSHSGIKGTSRPAHYHVLLDENGFSADALQTLTYNLCYTYARCTRSVSIVPPAYYAHLGAFRARYYIEDDSSDQGSLTVATQTDDQSVIVKQLPKIKEYVQQFMFYC

SEQ ID NO: 1580 - protein, 171 aa, Zea mays
  VARIANT 25: note = Ancestral polymorphism is E, Derived polymorphism is K
  VARIANT 68: note = Ancestral polymorphism is N, Derived polymorphism is I
  VARIANT 121: note = Ancestral polymorphism is V, Derived polymorphism is A
  VARIANT 125: note = Ancestral polymorphism is P, Derived polymorphism is H
  VARIANT 128: note = Ancestral polymorphism is S, Derived polymorphism is Y
  VARIANT 152: note = Ancestral polymorphism is M, Derived polymorphism is T
MSRFVLHCFVDLIGNGVKTDKGFKEIRLNSVLKMSLSSMAKNDLRFVDGSNLTGKGKTVDKGTPGDSNDRKPMSSLGKRKSYITDEDVVVFNGMKEVFSDVVAAICESIHGEAAPRIYNFVINCPRFYREVLMYALNHMMEHKVISLLFLNMTPDDRDLWLKTFLAKLYHI

SEQ ID NO: 1581 - protein, 454 aa, Zea mays
  VARIANT 340: note = Ancestral polymorphism is D, Derived polymorphism is V
  VARIANT 391..454: note = Derived polymorphism lacks residues 391 to 454
MKVKITSSKTVKPARGGGVAPPNTAESVSLNLFDKVTYDVHIAVIYAFRPPNPPNAALEQGLARALAVYREWAGRLGDGPDGRPAVLLNDAGARLVEATVDAPLARSMPFKPSPELLRLHPGVDGGPVEELVQVQLTRFACGSLVVGFTAHHRVADGQATGNFLVAWGLATRRLPVEPLPVRDRATRFQPRGTPLVEFPHRDTEYSLPARKRGAEEDEDDDIGGVAHDKIKVHKVLFTKEFVARLRARASSGLPPPPTHHHHRRGHYSTFESVVGHLWRAVTAARGLGAGETTRLRISVNGRTRMRPPVPHNYFGNMVLWAFPRSDAGELVSRPVQHAADLIHRAVARVDDAYFRSFIDFASSGAVEAEGLAPTADESQVVMCPDLEVDSWLGINFYDLDFGGGCPFYFMPSYLPMEGTMFLLPSFLGDGGIEAYVSLFDGHLEEFKRICYNIA

SEQ ID NO: 1582 - protein, 537 aa, Zea mays
  VARIANT 159..537: note = Derived polymorphism lacks residues 159 to 537
MAPGAPREYALEGGEAAQDEAPESPQEREEASQREEDGGVEEADDDEEAPTHLPFAPSSELLDDTTTVDPSYTISLIRQLLPQGSNVEKEFSVKQCAPDEKDANSGNGESAQPDYKDPWEECGCILWDLAASKPQAELMMNNLVLEVLLANLHVTQSSRVKEICLGILGNLACHESLVNVISLHNGLTATVMDQLFLDDSACLSEVFSMPSECEMEQVFSLKVAVAIVNVVFFYDRFLAAVLRTSVSVSWAEALLPDEILSRVLWIVGNTLNSTLLEKVIDFLSTIIDNQDVTAILLQPLIKVGLINHTISLLASEIEKLSNEGKLDRSDSLDLILNFVEELSAIDSCSGVMSESDQLIQVLESIVKLPDKFEVTTYCASVVIVLANILADGKHIVPRLSHDLPFMEGLFDILALVSDDNQARNALWCILPCLLAQAQQMDMNSSSLEQFVSLLLGRFTHIKDDLESHRVDKKEELTAEDAYLKHGVSASLRAICCVMERWIVEKSSLGEDEDDAPPTESTVEDARHLLNYCQNYDL

SEQ ID NO: 1583 - protein, 152 aa, Zea mays
  VARIANT 127..152: note = Derived polymorphism lacks residues 127 to 152
MDYTLAALKIFGSQLASCTEAPCSEGCSAAQMLSGIRFQRAWVQRQGMILSTDYNESGGGRLLLDDGSCVANLFVLPREAEGRFWRPGMYVMVIGAYIAAESRDNYPSIKVHKMVDLSSQPDREAMWYMEVAEAYSLFYLPFSVAASPPPSS

SEQ ID NO: 1584 - protein, 93 aa, Zea mays
  VARIANT 20: note = Ancestral polymorphism is D, Derived polymorphism is A
MGFIMDFAENLILRLMEDPDKRDQVRREHVYKMKERCERTKAAWSLPLRPYGFWTFDRFNSQLSWDPQISQAAGRRDPYDDLIARHSGSPPSS

SEQ ID NO: 1585 - protein, 606 aa, Zea mays
  VARIANT 48..606: note = Derived polymorphism lacks residues 48 to 606
MGWISAGEAAPGEGVAYAAEGENIVVADYTYNQSTKENVLSMLGSMTKVLQSSSDKTSLDTKEENKFFESDILDKVWHILYDDCLYALGTCVEGELKHFHKARYKLAQGYYRRGEAGDLERAKEELSFCFKSSRSSFTVNMWEIDGTVRKGRRKNPNVGGSRKNLEVSLSESSRKFITCIRKYMILYLNLLEKNTDLWTLEKAYTYLRTDKRFALCLGDIVPVGLGKYILVLTAAIHNPEIRRASGDASVEQLLEKMFTVFMDHANMWADISNIPEVNSPELSESNLYSYIHQYIHLLESDVRLDVLEGLNEKIRKRFKTPKLSNSNFAKICKHASLAWCRCILIKLASITPLPESADATNQPAPLSNGLLLYVDLQPDELLISSPDGPAQFKGLDMNWFETLNRIKNIPVKQTSEDNLETAVTLMKSTYNFYRESPCGTFPSGINLYTVTPSQAPIEGLPPTAAVVETLDLSIPRKLLLWVYTLVHGRYSNISSVVKYCDEMKLRSKRGTPAASASSQVVQPVSHSTVSSQVVSKEKSSQVEPAEAAQNPSDLAATCVPAYQEVGGASASQSAIEAQKATAAASQLTRSGSSRAMENAQDGGERK

SEQ ID NO: 1586 - protein, 985 aa, Zea mays
  VARIANT 550..985: note = Derived polymorphism lacks residues 550 to 985
MYGQGGSFNPHYRHGPPPPQQQAGVTGSFPQQPVPPPRPPYPQHPGVRPPAGPYQHGVLPHQNQPYPFAQHGRMHQMPMLPPQQRGYGSMPMPGSLPPQQAMHQAPPQYPPLPPPPPRPPGFVHDNVLPPSLPPPPPPSPPPPPPPPPPEAAAAASYSPPHTLVVAQSCGAEAEAKEGASEGGRFAKTLEAATQLIVSDDSDMDMDGDEDSPSKQPLTPETSLPVTVECTGNVNVSKFSDVSTEDNAKTADATEDNAKTAHATEDGGSTFQLIQGYGSDDSANEADAGPGSANTLVTLPEDNLHGHLSDSNTEFDYQKHVNAKGNVNTPHGTEQNGKAENYHLKVESNPVKHGTDVLGHLAKEDTSGSEIEGGQSSKRHGRIQKKRTRSISPQGRSGSPVGANKSSPSQSSSPGKQSRPPFAKRLHSADDGNDSEGRVVQQEGLSLTSKLDSSSNDLIGKVGDAAAVGVALGQHCHSDNLISEHSQLMAAGATHKMQMPCPPSESLSDLNVSSSAGGPILTNQPAAGVPYVSVETTKSSMTSKHLQSHPQSLSPPEHMPSSNMIQLPGQPSFATSEFPQMQFHHKVVAPANEFLQNQMRSYPPQDVSHPRPFDFHHHTLPPAVPSNQQPSTIPVENAPVPHHNRWPEYSGGVGLSYSSHRPPYGQHQPPGNLDSGSNLVYPSFQRYPSNLPVSNNIGPLSDADLTKSSIKPHYNPFASTFDKTDPSLDIGPPVSPNAVGSVSTTAEHMNTLSPFGRSRAHAHGNSAEPVPNRQKLLHQEFASGAPYDPLVDSIEPSSSSINKVDLRKEKNWSAADRRDASKFMNLEVDSENMHGLGVVAESEVEGLGEVAADTETGVVENASPEFLGGKDWNSDIPVDFDNDQTLDKNKKGKDSRSMKLFKSAIADFVKEVLKPSWRQGNMSKEAFKTIVRKTVDKVSGSVPSSHIPKTPAKIKHYVQSSQRKVTKLVMHLNIMEKYKLCHLPCP

SEQ ID NO: 1587 - protein, 164 aa, Zea mays
  VARIANT 53: note = Ancestral polymorphism is Q, Derived polymorphism is K
  VARIANT 121: note = Ancestral polymorphism is D, Derived polymorphism is Y
MPRRSSGRSAPRPAPRAAPVRNPPQPARQAPPPAPVRDGGGSMFGGIGSTIAQGMAFGTGSAMAHRAVDAVLGPRTIQHETVASEAAAAAPAPPVMNADACSIHSKAFQDATVPLCMCGVDAVSQQLWQRDQQVPVLPRHAERVPPWWCVCLSCLWGYSWIFFR

SEQ ID NO: 1588 - protein, 161 aa, Zea mays
  VARIANT 17..161: note = Ancestral polymorphism lacks residues 17 to 161
MPRRSSGGSDRGIKKIWIPTGIVFLTGKGRSAPRPAPRAASLRNPPQPARQAPPPAPVRDGGGSMFGGIGSTIAQGMAFGTGSAMAHRAVDSVLGPRTIQHETLATEAPAAAPAAPAMNADACSFHSKAFQDCLNNYGSEISKCQFYLDMLNECRRGGVSV

SEQ ID NO: 1589 - protein, 292 aa, Zea mays
  VARIANT 134: note = Ancestral polymorphism is W, Derived polymorphism is G
  VARIANT 86: note = Ancestral polymorphism is F, Derived polymorphism is I
  VARIANT 69: note = Ancestral polymorphism is A, Derived polymorphism is T
  VARIANT 68: note = Ancestral polymorphism is G, Derived polymorphism is D
  VARIANT 66: note = Ancestral polymorphism is V, Derived polymorphism is M
MGMGPLENAASAAESAALPEAGAAAAAGSYAVLQCGEDSEYVRQKYGGYFAVFRALLEEDGESWRVYGAVRGELPTDAEAAGFDGFVISGSCSDAHGDEPWILDLVGLIRRLHAAGKRILGVCFGHQDLAEEGWVLAVPPNGTPILCRALGGRTGRSTKGWDIGVSCIHPTAAAARLFAPLKLPVHMPVIEFHHDEVWELPAGAEVLARSDQTRVEMFRLGDRAMGVQGHPEYSKDILMSIADRLLRHNHILDCQVDVAKASFDVRQPDKELWKKVCRGFLKGRLQSQQQFH

SEQ ID NO: 1590 - protein, 254 aa, Zea mays
  VARIANT 72: note = Ancestral polymorphism is D, Derived polymorphism is Y
MALLQSQSLPGIGCCSSSIVLARARVQQCLAAASHSQAPLLQANGGRAGLPSSSSILKAGNAISFSRRRRRDLRVVAEAATAGTAKVTPASSGGVSLSDVLWPSAGAFLAMAVLGKMDQMVAFKGVSLTIAPLGAVCCVLFSAPDSPAAKKYNMFVAQIACAAFGVLALSLFGPGWLARGAALSACIAFMTITGTSHPPAASLPLLFIDGPKFHSLQLWYALFPGAAGCIVLCLIVTRGGGLPEEELQVLTQAA

SEQ ID NO: 1591 - protein, 78 aa, Zea mays
  VARIANT 53..78: note = Derived polymorphism lacks residues 53 to 78
  VARIANT 49: note = Ancestral polymorphism is F, Derived polymorphism is C
  VARIANT 41..78: note = Derived polymorphism lacks residues 41 to 78
  VARIANT 37: note = Ancestral polymorphism is T, Derived polymorphism is I
  VARIANT 32..78: note = Derived polymorphism lacks residues 32 to 78
  VARIANT 23: note = Ancestral polymorphism is P, Derived polymorphism is S
  VARIANT 21: note = Ancestral polymorphism is E, Derived polymorphism is D
  VARIANT 14: note = Ancestral polymorphism is D, Derived polymorphism is G
  VARIANT 13: note = Ancestral polymorphism is A, Derived polymorphism is T
  VARIANT 12: note = Ancestral polymorphism is I, Derived polymorphism is V
  VARIANT 6: note = Ancestral polymorphism is S, Derived polymorphism is Y
MIINGSVFVVGIADNLLFNFEEPLKDYVRAVQSIKATMLDRANAFRQHFDLDQERKYKELNLYVLQNPFSFFVLSSPE

SEQ ID NO: 1592 - protein, 227 aa, Zea mays
  VARIANT 184: note = Ancestral polymorphism is G, Derived polymorphism is D
  VARIANT 2: note = Ancestral polymorphism is A, Derived polymorphism is E
MAAAAAQKLLEASTKIIGVGRNYIAHAEELGNPIPKEPVLFLKPTSSFLHAGVATAAVEIPEPLESLHHEVELAVVISRRGRDIPEASAMDFVGGYALALDMTARGLQSVAKSAGLPWTLAKGQDTFTPISAVVPKSSVTNPDDLELWLKVDDELRQKGSTSDMIFKIPFLISYISSIMTLMEGDVILTGTPEGVGPVRVGQKIKAGITDLIDVEFDVQRRNRSFST

SEQ ID NO: 1593 - protein, 588 aa, Zea mays
  VARIANT 306: note = Ancestral polymorphism is H, Derived polymorphism is L
MAIRAGRSPLLHLLALAFLILAASPCLQARVDHRKQISHWTGQPNFDLQNVSSGRKDGPHLLGRSKEITHMKLRRVAVRKKMEVVQQDDEALVKLENAGIERSKAVDSAVLGKYSIWRRENENEKADSRVRLMRDQMIMARIYSVLAKSRDKLDLYQELLARLKESQRSLGEATADAELPKSASDRTKAMGQVLSKARDLLYDCKEITQRLRAMLQSADEQVRSLKKQSTFLSQLAAKTIPNGIHCLSMRLTIDYYLLSPEKRKFPNSENLENPDLYHYALFSDNVLAASVVVNSTIMNAKEPEKHVFHLVTDKLNFGAMNMWFLLNPPGDATIHVENVDDFKWLNSSYCPVLKQLESAAMKEYYFKADRPKTLSAGSSNLKYRNPKYLSMLNHLRFYLPQVYPKLNKILFLDDDIVVQRDLTGLWEVDLNGNVNGAVETCGESFHRFDKYLNFSNPNIAQNFDPNACGWAYGMNMFDLEEWKKKDITGIYHKWQNMNENRLLWKLGTLPPGLLTFYKLTHPLDKSWHVLGLGYNPTIERSEIDNAAVIHYNGNMKPWLEIAMIKYRPYWTKYINYQHSYIHGCKISQ

SEQ ID NO: 1594 - protein, 501 aa, Zea mays
  VARIANT 280: note = Ancestral polymorphism is N, Derived polymorphism is K
MAAAEGQVRRDMWGQEYRTSSADCAAALDAYYAAFMSFGRGRVAAVLRAAAADPTCALAAAHAAQSVAPRDPAGAAAFLNAAADNLGKATEYERAVFGTLSVLVGEKRDEEVAIERHFELLEQFPRDLLSLKRAQLICFYMGKPDLSLKFVQQVLPKNQDQNFIYGMLAFPLLELGRMDEAERAARRGLAINKNDFWSQHNLCHVFQQECRFREATEFMESCSPSWEACTSFLLTHNWWHVAVCYLEAESPLCKVLEIYDHNIMKELEKSDCETAEVYLNGLGLLLRLFIRGHIDSAKERLTTLLDALKNESIWHVEWLLDLLILWALSSMGELKSAHNMLESLKSRSDMLSLVFCRNTRRFINSTKSEKQPDCRVRLMDRNRQQAMQKAIKLAEAAYEYGKGDHMKVYDTLGPDFDALGYKMIGASDEQVDVFNEVWYTVLINAGETSKAIEILGKQIRKREGAPFLWRLLEKSYSLAGRSADASVASKKANALQSSYFH

SEQ ID NO: 1595 - protein, 87 aa, Zea mays
  VARIANT 14: note = Ancestral polymorphism is I, Derived polymorphism is T
  VARIANT 15: note = Ancestral polymorphism is Q, Derived polymorphism is H
  VARIANT 57: note = Ancestral polymorphism is K, Derived polymorphism is E
MNVEEEVGRLKEEIHRLGQQQPDGSYKVKFGVLFNDDRCANIFEALVGTLRAAKKRKILTYEGELLLQGVHDNVEITLLPPPAVAAA

SEQ ID NO: 1596 - protein, 1055 aa, Zea mays
  VARIANT 21: note = Ancestral polymorphism is K, Derived polymorphism is N
  VARIANT 802..1055: note = Derived polymorphism lacks residues 802 to 1055
MSRSFFPTCSSQKAEMEEMAKELDDLRAEVEALTAQLRAKSDLADGLKRASADHAARLRDARAEAERNAAEAAARGEEAAAAGERCEVLESRLAEKEQALRHLCAAHEALKATLREKIEGLEGDKRGLLAALEDAEARRGEHEAALRARDVEVARLRGLLSEKDRRCGEAEKRASAPRDVVMRDDMLGKLEEEKAAVQCKLKWKDEQFRHLEEALKKVQDDFRAAKKEWGSDRSTLVDRIDTLEADLDSKIRVAEDFRSRLDMCSQALAHEEGRRKRVETEMSELRHMYGNVISEYQGAKSMVESLSSKTDGDIAYLRSSLAEKATMLKEIEYSKARIEQENEDLRSKLKEYQEAQIGGADAVVSLKSLREKFRALEQTHRSCTEKLRGKEEEWRLQMTKLVNDLDGCLSQLESKDILIVQLQNELLGSHRSLELQTVDNWEALIILTVVQTKFYESCSFVDTAKLNMQHHCEEIEKEISSAKKQLEEQSCIIAQSQAEQKQQSGVITKLHARIEELEHMEQEHKKMQRQLDAYKEMRDNMLRDAHCLKDETSKKESTLQVKLREALSALDEANCALADRKRELSQLEISLHHQKEAIEHLEKLKVDMEAEAKSYMCDNRILKRDLDTALTAKVEAEELLRQEKMQLTCALDEAKYTLSERNSELTQFEINFHQQKQALANLEKVKVDMGTELKTCMDENCVLKRDLGVALIAKMEAEECHTKEKEEFCGIIKEKGMMIDKLQQYVAVLEEENMVKKLDLGSLIKMECDKSIREVKNWYSEIVEISDKKLLELEERLRFAEQKFSCREQEIMNMFDQEESDWYTLIAEKEIAISDIQQTVESVQLDIKHLLEAAAAKVAEVQLEVNQLYGFAETLNSLNIIQEHDTVFKDMLIAECERELDSLQVNLVQEKHQSRNLKNLIEQLEAQTASEMSEKAEEHLEVTNKLKSLEGRNETLDEHLRELKSRTTDMSKAVLQERNQLVNELTGLTNTIGEVIYGGESMMSNLRRIMQKVNEEPCNDRLTSEKTNGRSSSPLIRHKSGHVLDRRSPLKENNY

SEQ ID NO: 1597 - protein, 283 aa, Zea mays
  VARIANT 1: note = Ancestral polymorphism is M, Derived polymorphism is V
  VARIANT 7: note = Ancestral polymorphism is I, Derived polymorphism is R
  VARIANT 18..283: note = Derived polymorphism lacks residues 18 to 283
  VARIANT 29: note = Ancestral polymorphism is R, Derived polymorphism is C
  VARIANT 35: note = Ancestral polymorphism is D, Derived polymorphism is H
  VARIANT 67: note = Ancestral polymorphism is D, Derived polymorphism is N
  VARIANT 76: note = Ancestral polymorphism is G, Derived polymorphism is D
  VARIANT 79: note = Ancestral polymorphism is D, Derived polymorphism is N
  VARIANT 85: note = Ancestral polymorphism is S, Derived polymorphism is L
  VARIANT 96..283: note = Derived polymorphism lacks residues 96 to 283
  VARIANT 163: note = Ancestral polymorphism is H, Derived polymorphism is R
  VARIANT 166: note = Ancestral polymorphism is M, Derived polymorphism is I
  VARIANT 167: note = Ancestral polymorphism is R, Derived polymorphism is S
  VARIANT 184: note = Ancestral polymorphism is P, Derived polymorphism is R
  VARIANT 185: note = Ancestral polymorphism is V, Derived polymorphism is A
  VARIANT 213..283: note = Derived polymorphism lacks residues 213 to 283
  VARIANT 236: note = Ancestral polymorphism is R, Derived polymorphism is W
  VARIANT 241: note = Ancestral polymorphism is G, Derived polymorphism is V
  VARIANT 256: note = Ancestral polymorphism is F, Derived polymorphism is S
MVQKRRIYDITNVLEGIGLIEKKLKNNIRWKGVDDSRPGEFSDDMSILQMGRVGEKLDIDFVISTGDNFYKNGLKGVRDQAFKELFMDIYIAQSLQKPWYSELVDFFFVDTTPFQLEYWTHPGKHRYDWRGVAPRGKYIANLLKDMDVAMKRSTARWKIVVGHHTMRSVSEHGDTEELLELLLPVLKDNGVDFYINGHDHCLEHISSRDSPLQYFTSGGGSKAWRGVFHPNKDKLRFFYDGQGFMSLQLNQDQAHFIFYDVFGNILYRWSSRHPQSSTYLNEE

SEQ ID NO: 1598 - protein, 712 aa, Zea mays
  VARIANT 397: note = Ancestral polymorphism is D, Derived polymorphism is Y
MRRPPIVARVRRSLFLLLCCCCCLAAWSSPPAVRALPLCTDGRAPVPLNRTLGFCSAYGGGGSSSSCCDAAADAALRKRFNAMNISDAACAGVIKSVLCAECSPFSAELFNSSSKIQMVPLLCNYTSSSSSAQSKDSTRDYCKLVWETCKNVTIVNSPFQPPLQGSARLPSSSSKLTDVWQSEHDFCTSFGGSSGEQSLCFNGNGIFFNSTEPSPTPKGICLERISNGSYLNMASHPDGSNRVFLSSQAGKIWLASIPEQGSGGTLQYDEANPFLDITDEVYHDSQFGLMGIAFHPKFATNGRFFVSYNCDRTQSPKCAGRCSCNSDANCDPSKLGTDNGAQPCQYQVVVSEYSTKISSPNVSMATSANPSEVRRIFTMGLPYIAHHGGQILFGPTDGYLYLMMGDGGSEGDPFNFSQNKKSLLGKIMRLDVDSTQGQSQTTNQSLWGNYSIPKDNPFADDSDFQPEIWALGFSNPWRCSFDSERPSYFYCGDVGKDAYEEVDLVTKGGNYGWRVYEGPYIFHPQKSPGGNTSPESINAIFPVMGYDHSAVNKEIGSASITGGYVYRGSADPCLYGRYLYTDLYSSLMWTGTEAPEGSGNYTSAVKPVSCSKASPIGCESVAGSTDPLLGYVFSFGEDSRKDVFVLASKGVYRVVRPSLCGYTCPAERPATDNGTAPGPGGPSSGAPAATRLGRSVAAVAVALALIPCVLLL

SEQ ID NO: 1599 - protein, 457 aa, Zea mays
  VARIANT 210: note = Ancestral polymorphism is Q, Derived polymorphism is H
MESAAPCPRAHAHPVDLRWLLSVAAGGLFALLLVLLATSPSFRLASTSPSPRLFLGPASGSSRARPPLFVEPALSRPAAPSPPASASLPRFAYLISGSAGDAGMMRRCLLALYHPRNRYVLHLDAEAPDADRAGLAAFVAAHPVLAAARNVRVVEKANLVTYRGPTMVTTTLHAAAALLWGEGRGRGADWDWFINLSASDYPLVTQDDLQLLYVRVRSQRIFVLGATEIMYDIVRFARAMPVIIDPALYMKKKGDLFWVPERRSLPTAFKLFTGSAWMVLSRAFVEYLIWGWDNLPRTVLMYYANFISSPEGYFHTVACNADGFRNTTVNSDLHFISWDNPPMQHPHQLTVGDWDRMLGSGAPFARKFRRDDPVLDRIDADILARGPGTVAPGGWCGRGAAGGGGQGQSNGTDPCAAVGDAAVLRPGPGAERLQRLVTSLLSEENFRPRQCVVENEN

SEQ ID NO: 1600 - protein, 111 aa, Zea mays
  VARIANT 24: note = Ancestral polymorphism is P, Derived polymorphism is S
  VARIANT 22: note = Ancestral polymorphism is A, Derived polymorphism is V
  VARIANT 17: note = Ancestral polymorphism is I, Derived polymorphism is T
MGRLALLICVLLLAAAIVANGARSAGTVRGGGGGAAPASPVVATKPTVAAVDKTTPAAAAAATAETTATSEQQQQPTLDDPSSDSKRKVPNGPDPIHNRRARWGEAPSKRV

SEQ ID NO: 1601 - protein, 162 aa, Zea mays
  VARIANT 8: note = Ancestral polymorphism is R, Derived polymorphism is C
  VARIANT 21: note = Ancestral polymorphism is H, Derived polymorphism is N
  VARIANT 26: note = Ancestral polymorphism is Q, Derived polymorphism is E
  VARIANT 34: note = Ancestral polymorphism is L, Derived polymorphism is F
  VARIANT 44: note = Ancestral polymorphism is L, Derived polymorphism is V
  VARIANT 49: note = Ancestral polymorphism is T, Derived polymorphism is M
  VARIANT 111: note = Ancestral polymorphism is A, Derived polymorphism is T
  VARIANT 114: note = Ancestral polymorphism is R, Derived polymorphism is W
MAPEAPSRRGDNTHMKLLCSHGGRFQPCGPDGELRYVGGETRVLVVPRTVSFRDLAARLAEMAGGSVQVRAIRHRLADEGVEDVIVTVTCDEEVAHMRDEYDRLRATRPAARFRVYVTTTASPSSAGRVAAVSNAAAARDQKATSRDVEAAVESRRAIWELE

SEQ ID NO: 1602 - protein, 562 aa, Zea mays
  VARIANT 281..562: note = Derived polymorphism lacks residues 281 to 562
  VARIANT 260..562: note = Derived polymorphism lacks residues 260 to 562
MESRGRRPRSPERRRPAARKVPVVYYLTRSRHLEHPHFVEVPLASPEGLYLRDVINHLNMVRGKGMAAMYSWSCKRSYKNGFVWHDLSEDDLVLPATDGEYVLKGSELVDQSPSGPFYPVTVSNGNQKQQSRPKEGARQPLPRDQSDPSSPPSVTVREAKARRSPSVPSQDEEDDTPSPCRDRSMSQPQELEPQRNERRTQPPASGSASPVELRAHRPTTGCTDAATQTDDLGRRPAGRRALELPRKKSLSTDHDAVVREIAEYRQSHPRRSADLHGISRELLRQCITTPLTVPSTCAKSESLESLIRADNVMTDSFRILEEEDVVARTCPKLRPASVLMQLVTCGSLSVKGHGDAGVVRTCKPRFPNLRFLPSPLISRTMMMGELDYLSENPRLMGMKLEEKEYFSGSLVETKKTQRDGPAERYSALKRSSSYNAERAGEALDCTRREEDKADDVSSRTRCLPRTPILSSFLHPKGDSLRSPVSDCRRSSSARRDYDAASGDGSRRFADASVASATTGAESFRKEEKLVKIEERLSSGARVVIHYTVPCNDSDEGSERSEE

SEQ ID NO: 1603 - protein, 606 aa, Zea mays
  VARIANT 343: note = Ancestral polymorphism is T, Derived polymorphism is K
  VARIANT 190..606: note = Derived polymorphism lacks residues 190 to 606
  VARIANT 1: note = Ancestral polymorphism is M, Derived polymorphism is R
MRRQRRTGGLRPVLLLLPFAALISVATFSLHSADRLLSSSDTGTAQKAASSSRQHRRLPVATLDVRALDAAPPLHAAAARAFRSGGRLLRDVLSSSSPSAPAPPPAGPGAARCPASIVRSGAQLRGAGGGVLLPLPCGLTLGSHVTVVGAPRGGRGAAAVAQFAVELRGEGDGDEAPRILHFNPRLSGDWSRRPVIEMNTRFRGQWGPALRCDGRRSRPDLETVDGLVTCEEWSKNIDDASEELKRLWLRNRVAGKNNRNWLHWPYPFLEEEMFVLTLSAGLEGYHFHVDGKHVTSFPYRVGFLLEDATILSVNGNIDIKSIVAGSLPTTHPSIVQRNLELLTELKTPPLGKENVELFIGILSAGSHFTERMAVRRSWMSLVRNSSSIVARFFVALNGRKEVNEDLIKEADFFRDIVIVPFADSYDLVVLKTVAICDYVARVVPAKYVMKCDDDTFVGLDSVMAEVKKIPDGKSFYLGNMNYYHRPLREGKWAVSYEEWPREEYPPYADGAGYVVSSDIANFVASGMENGRLNLFKMEDVSMGMWVGQFNFNRSGPGSAVAYVHSAGFCQSGCVAGYLTAHYQSPAQMVCLWEKLRRGVAQCCNAR

SEQ ID NO: 1604 - protein, 190 aa, Zea mays
  VARIANT 132..190: note = Derived polymorphism lacks residues 132 to 190
  VARIANT 74: note = Ancestral polymorphism is G, Derived polymorphism is S
MSPLPRRLVVLVLLAAAVAATASAASLSGAANDLLPKYGLPKGLIPDSVTSYSFDEATGAFEIHLASTCYVHFGSHLVYYERTITGKLSRGAISDLSGVQAKKLFLWVYVTGMVAHPDQGTIEFQAGFVSESLSASMFDEVRTCGSSAGAQLRGAAGVIGELGLLPVAQVLSCSVVLFCGSDTYRFALGL

SEQ ID NO: 1605 - protein, 470 aa, Zea mays
  VARIANT 373: note = Ancestral polymorphism is A, Derived polymorphism is P
  VARIANT 34: note = Ancestral polymorphism is G, Derived polymorphism is V
METIQEAEVPGSPSAAAAAADHRTYSNPAFQVSGSIEEDWYDSLAMSESDAEDDFHSVQDDAFSLNGFENEAALSMKDGNGGSFNGAAQSGEQHHKKPKSSELSKGSSENGVRTSISHEDAVSVSGADTTHGGGRILDNCGLLPNNCLPCIASAVGVNEKKRTPSSPTHSMKMPSLKLSFKKKSGEAHPSSTLLSTKDFLERPLAGSQVQLCLLETNTLNSWSRIDPGTFRVRGANYFRDKKKELAPNYAAYYPFGVDVYLSPQKLNHISRFVQLPDIQLSSKLPPLLVPLYPASLFQNETDGEGMSFVLYFRLSDGYSKELPHSFIESIRRLVDDHVEKIKAFPMETTIPFRERLKILGRVANLEDLPLSAAERKLMHAYNEKPVLSRPQHEFYLSDNYFEIDIDMHRFSYISRKGFETFLDRLKACVLDVGLTIQGNKAEELPEQILCCVRLNGIDYTKYQPLLTHGA

SEQ ID NO: 1606 - protein, 404 aa, Zea mays
  VARIANT 40: note = Ancestral polymorphism is R, Derived polymorphism is L
  VARIANT 370..404: note = Derived polymorphism lacks residues 370 to 404
MVAISMYRGNLHIGGPDSGASAPRRWEAPRPTLDVKRFRRLLRNRFRAVARLAGTPLGQASPSSSGMDGGRGAADPEREAPDEEGGAGDGGEEEQEQLQHDQDQDQQHQEEQGNVEAEAEDPEQQEEEEEGAVEDADMEDAGEVVVDGDAEEGQGESEGVDPKPEEEIFSGALLKAQVLEHNQASYPDGIDDKNRKLNEKLDALNKKKHGLVQMLKQFKTNEHLLHIRQLNKYWAMSECQMAPQSGNILVLNAEEEIRRRNMQASLRAAMPQPSENATDGSSVSRLAPRMTVDVNFGDVAGDSDAGSNQGTPGRPLHHFHSISPSTASFARSPFGSLQGHTPRSPATFSTASPSRFATNIHPGQPPALYSASLPGSNYVATSPSPAASGGSSSVFRDPRPPNST

SEQ ID NO: 1607 - protein, 195 aa, Zea mays
  VARIANT 181: note = Ancestral polymorphism is K, Derived polymorphism is I
MRRLALLFLLPLLLATGVTTASAEPATPPASPPPPPPPPPPPPPPPPPPTLAELLPKYGLPPGIFPSTVTAFSLASNGSLTVDLAGPCYVHFEYLTYFEPHITGVLRYGSLSDLQGIQVRRFLIWFNVIRIKVDLPPPPRYVYLDIGWITRKLPAADFQSLHACEDSRRCRLTSALAVAAKWFQAVVQRLGALLA

SEQ ID NO: 1608 - protein, 471 aa, Zea mays
  VARIANT 25: note = Ancestral polymorphism is R, Derived polymorphism is K
MAPHVLVVPFPGQGHMNPMVQFAKRLASKGVATTLVTTRFIQRTADVDAHPAMVEAISDGHDEGGFASAAGVAEYLEKQAAAASASLASLVEARASSADAFTCVVYDSYEDWVLPVARRMGLPAVPFSTQSCAVSAVYYHFSQGRLAVPPGAAADGSDGGAGAAALSEAFLGLPEMERSELPSFVFDHGPYPTIAMQAIKQFAHAGKDDWVLFNSFEELETEVLAGLTKYLKARAIGPCVPLPTAGRTAGANGRITYGANLVKPEDACTKWLDTKPDRSVAYVSFGSLASLGNAQKEELARGLLAAGKPFLWVVRASDEHQVPRYLLAEATATGAAMVVPWCPQLDVLAHPAVGCFVTHCGWNSTLEALSFGVPMVAMALWTDQPTNARNVELAWGAGVRARRDAGAGVFLRGEVERCVRAVMDGGEAASAARKAAGEWRDRARAAVAPGGSSDRNLDEFVQFVRAGATEK

SEQ ID NO: 1609 - protein, 225 aa, Zea mays
  VARIANT 125: note = Ancestral polymorphism is R, Derived polymorphism is C
  VARIANT 46: note = Ancestral polymorphism is G, Derived polymorphism is E
  VARIANT 27: note = Ancestral polymorphism is P, Derived polymorphism is Q
  VARIANT 24: note = Ancestral polymorphism is A, Derived polymorphism is V
MEKYTKALASLLTMLVLAPLLAMATDPDPLQDFCVADLNGKPSVNGYPCQPPSSAGDQFLFSTKIATGGDPLANPNGSNVTELDVSEWPGVNTLGVSMNRVDFAPGGTNPPHVHPRATEVGLVTRGELLVGIVGSLDSGNRYYSKVVRAGETFVIPRGLVHFQFNVGKEDATMVVSFNSQKPGIIFVPLTLFGSSPPIPTPVLSKALRVDASVVDLIKSKFTGGY

SEQ ID NO: 1610 - protein, 70 aa, Zea mays
  VARIANT 37: note = Ancestral polymorphism is R, Derived polymorphism is C
  VARIANT 47: note = Ancestral polymorphism is S, Derived polymorphism is L
MVPLRAAPPPAPPVGGSPTPPGMLKVAASGSTATPLRGGASVDDHLSAYCYFFSSMGLIHVAIRGLDILG

SEQ ID NO: 1611 - protein, 550 aa, Zea mays
  VARIANT 40..550: note = Derived polymorphism lacks residues 40 to 550
  VARIANT 85..550: note = Derived polymorphism lacks residues 85 to 550
  VARIANT 239..550: note = Derived polymorphism lacks residues 239 to 550
MPPVKAEDLVVHAVKEQFAGLDYCITSPPPWITTVLVGFQHYLVMLGTTVLIATIIVPLMGGGHAEKAIVIQTILFLSGINTLLQVHFGTRLPAVMSGSYTYIYPAVAIILSPRYALLIDPLELIHRWLVSSVQRFVFTMRSLQGALIIAGVFQAVVGFFGIWRVFIRFLSPLAAVPFVTLTGLGLFFFAFPGVTKCIEVGLPALVLLVIFAEYASHVFAKGSFVFSRCAVLVTVVIIWIYAEILTAAGAYNERGPVTQFSCRADRSGIIQGSPWVRFPYPFQWGYPIFCFQDCFAMLAASFASLIESTGTLIAVSRYSGATFCPPSVFSRGIGWEGISIILDGMCGTLTGTAASVFEVTCSLCCFQSENAGLLAVTRVGSRRVIKISALFMIFFSLFAKFGAVLASIPLPIFAALYCVLFAYSAGAGFSLLQYCNLNSLRTKFILSISLFLGLSIPQYFRVYEMFFGFGPVHTHSVAFNVMVNVIFSSPATVAAILAYLLDCTHLYWEASVKKDRGWFWWEKFKSYKYDGRSEEFYRLPYGLSRYFPSL

SEQ ID NO: 1612 - protein, 111 aa, Zea mays
  VARIANT 63: note = Ancestral polymorphism is S, Derived polymorphism is F
  VARIANT 59: note = Ancestral polymorphism is P, Derived polymorphism is H
  VARIANT 43..111: note = Derived polymorphism lacks residues 43 to 111
  VARIANT 38: note = Ancestral polymorphism is S, Derived polymorphism is Y
  VARIANT 33..111: note = Derived polymorphism lacks residues 33 to 111
MPSLTPWCSDLLSTTDDDHHHGSRLPCAPLPPQLWPPSGASSQPPPPASSSRPHLTPLPLSQSSCLLRPPIGAPRYQMMSLETDLNTLPMIPNIPEKVFSSDAKSTEGYLY

SEQ ID NO: 1613 - protein, 114 aa, Zea mays
  VARIANT 6: note = Ancestral polymorphism is P, Derived polymorphism is S
  VARIANT 48: note = Ancestral polymorphism is S, Derived polymorphism is F
MVIPPPARAPAITKFLKPYILKMHFTNSFVSAQVIHTPTATVACSASSQEKLLRPSMESTRDVAAAAKIGKLLGERLLFKGIPAVSVSMSRDQKYHGKVKAVIDSLRGVGVKLL

SEQ ID NO: 1614 - protein, 278 aa, Zea mays
  VARIANT 37: note = Ancestral polymorphism is A, Derived polymorphism is V
MDDDDVSPDARDVYVANATVSSYFAASDVASTDRLFAEVSTDVADVVTWTTMVVGHASSGGLGRARHFFDAMPERNVVSWNAMLRAYACAGMLTEARDLFDAMPTRNAATWSCMISDLVLSGRCWEALHDQGLFGDMVRSSGIVLNEPALELHGAMSVVLASAIVNMYGKCGGIHSAIRALYFVKSMLVEPHPGLWGALASACKMHGKVELGEEVAKKLIELEPRHGSRYILLSNLYGSVNRWDDMTSVRKILKRSKVPKGTGNAVVGMTSASCVSNG

SEQ ID NO: 1615 - protein, 377 aa, Zea mays
  VARIANT 343..377: note = Derived polymorphism lacks residues 343 to 377
MATASLLEATRLLSTPRPPRRSLHTHLLRTPRLSALRAHLHRSATLDAQEPTARPGALLVLDALRRSVVDSLAALKRPALALLLAGALLAAASMGGPHAAALAASGGRVGGSAFSSRSSSPPSYGYSAPAPRGGYTAAPYYSPSPFVSFGPAVGIGFGGSGFLVTLIGFAAFLYLAGFLSDSSGGTSVLTETDKTTVLKLQVGLLGMARSFQKELDQIAEKADTSTPAGLSYVLTETTLALLRHPDCCISAYSSVDVKRSVDDGEKRFNQLSIEERGKFDEETLVNVNSIKRNKGGSQRSSGFSNEYIVITILVAAEGVHKLPVINSSNDLKTALQKMGAIPSSKILAVEVLWTPQNENDTLSERELLEDYPLLRPL

SEQ ID NO: 1616 - protein, 211 aa, Zea mays
  VARIANT 119..211: note = Derived polymorphism lacks residues 119 to 211
  VARIANT 52: note = Ancestral polymorphism is D, Derived polymorphism is H
  VARIANT 46: note = Ancestral polymorphism is A, Derived polymorphism is T
MECVLGVVGRDFALVAADTSAVQSILVHKTDEDKVMVLDSQKLMGASGEPGDRVQFTEFIQKNLHLYQFRNTIPLSTAAAANFTRGELATALRKNPYMVNIILGGYDKDVGASLYYIDYIATLHKIDKGAFGYGSYFCLSLMDKLYHPDMTVEEAVDLVDKCIKEIRLRLVVAPQNFVIKIVDKDGAREYARRELVGDNAPAEAATAVVAA

SEQ ID NO: 1617 - protein, 309 aa, Zea mays
  VARIANT 48: note = Ancestral polymorphism is C, Derived polymorphism is R
  VARIANT 60: note = Ancestral polymorphism is K, Derived polymorphism is N
  VARIANT 85..309: note = Derived polymorphism lacks residues 85 to 309
  VARIANT 182..309: note = Derived polymorphism lacks residues 182 to 309
  VARIANT 192..309: note = Derived polymorphism lacks residues 192 to 309
  VARIANT 208: note = Ancestral polymorphism is T, Derived polymorphism is I
  VARIANT 216..309: note = Derived polymorphism lacks residues 216 to 309
  VARIANT 222: note = Ancestral polymorphism is T, Derived polymorphism is I
  VARIANT 224: note = Ancestral polymorphism is A, Derived polymorphism is V
MTEGEGQSESASAPEGVSGLRRNSDDVGWEYGVLVDINNKDKVKCILCDKQMCGGVYRLKQHIAQEGKNAKKCQGMKTTKEKLLEAQEKCKKALDEAKRKREEKTVPISFNACDNDEFKQMCEAIGQFGPGIEPPTMFDLRGRLLEEEYARTKSLLQEREAEKMKNGCSIMTDACIQEKKDQLRKMVVHSRWDSLKDVKSKKGKNATTTILNPTFWKDVKLTLAVFAPLFKVLCLVDGDVKPSMGFVYGELLKAKRHVKEALGNVENRFKDVVAVIEKMDGRLDSPLHLTAYLLNPHYSYADPSIFDVP

SEQ ID NO: 1618 - protein, 236 aa, Zea mays
  VARIANT 8: note = Ancestral polymorphism is L, Derived polymorphism is P
  VARIANT 73: note = Ancestral polymorphism is R, Derived polymorphism is C
  VARIANT 91: note = Ancestral polymorphism is P, Derived polymorphism is L
  VARIANT 179..236: note = Derived polymorphism lacks residues 179 to 236
  VARIANT 206: note = Ancestral polymorphism is P, Derived polymorphism is L
MVGADTAPLRDLEARAARRLDQATLGAVEGGGGSKAARVARLVDVYLAETALEAGLRPAEFEELARAVPAHARPADDALYRAVDTYLKAHPSTAKEERKSLARLIDARKLTVEAAAHAVQNERMSVRAVVQVLFSEHGKLNRLAELSASFSGQRSPSPSPNPALELPGRCPSKREVLAQHQEVRRLRDDVARLQVRQSACLEFSSPHMYTNFGGAPTDAETYVCSMVQVQCNALQA

SEQ ID NO: 1619 - protein, 264 aa, Zea mays
  VARIANT 53: note = Ancestral polymorphism is P, Derived polymorphism is L
MSSMESRPGRTNLVEPIGHGAALPSGGQAVQPWWTSSGAVLGAVSPAVVAVAPGSGTGISLSSSPAGGSGGGGAAKGAASDESSEDSRRSGEPKDGSASQEKNHATSQIPALAPEYLAPYSQLELNQSIASAAYQYPDPYYAGMVAPYGSHAVAHFQLPGLTQSRMPLPLEVSEEPVYVNAKQYHGILRRRQSRAKAELEKKVVKARKPYLHESRHQHAMRRARGNGGRFLNTKKSDSGAPNGGENAEHLHVPPDLLQLRQNEA

SEQ ID NO: 1620 - protein, 133 aa, Zea mays
  VARIANT 35: note = Ancestral polymorphism is R, Derived polymorphism is C
  VARIANT 48..133: note = Derived polymorphism lacks residues 48 to 133
  VARIANT 52: note = Ancestral polymorphism is P, Derived polymorphism is S
  VARIANT 58: note = Ancestral polymorphism is D, Derived polymorphism is N
  VARIANT 59: note = Ancestral polymorphism is G, Derived polymorphism is D
  VARIANT 98: note = Ancestral polymorphism is V, Derived polymorphism is L
  VARIANT 99: note = Ancestral polymorphism is T, Derived polymorphism is I
  VARIANT 102: note = Ancestral polymorphism is R, Derived polymorphism is S
  VARIANT 113: note = Ancestral polymorphism is W, Derived polymorphism is S
MYLLMARSGLTRPTLLGSWMPFPSLRQTGTKRCLRLHPIRDEDAKFGQKGIPYLNTYDGHTIRYPDPLIKANDTIKIDLETNKIMDFFKFDVGNVVMVTGGRNIGRVGEIKNWEKHKGSFEVIDVLLGAFCYV

SEQ ID NO: 1621 - protein, 238 aa, Zea mays
  VARIANT 199: note = Ancestral polymorphism is M, Derived polymorphism is T
MEENQEKFAPESSGGDGGGSVRTICVFCGSRPGNRPSFSAAALDLGKQLVERQMNLVYGGGSGGLMGLVSKAVYEGGRHVLGVIPTALLPEEVSGETLGEVKVVRDMHQRKAEMAKHADAFIALPGGYGTIEELLEIIAWAQLGIHSKPVGLLNVDGYYNSLLSLFDKAVEEGFIDTKARNIFVLADTAADLLTRLTMMARLAADDDDATTTPRGDGDGDGDEHKGATTAAGVKRKRG

SEQ ID NO: 1622 - protein, 144 aa, Zea mays
  VARIANT 23: note = Ancestral polymorphism is M, Derived polymorphism is T
MAAATTPEENAAAAAAVDAITETTNRFTVNTDAAGAGPLKLDDVDGNVYSCKRCGTLLAVADDIVSKSFHCKNGKAYLFDNVVNVTVGEKEDRMTITGMYSVSDIFCVGCGEIVGWKYEAAHERSQKYKEGKFVLERYQLLGAE

SEQ ID NO: 1623 - protein, 488 aa, Zea mays
  VARIANT 251: note = Ancestral polymorphism is G, Derived polymorphism is S
  VARIANT 241..488: note = Derived polymorphism lacks residues 241 to 488
  VARIANT 145: note = Ancestral polymorphism is T, Derived polymorphism is M
  VARIANT 127: note = Ancestral polymorphism is G, Derived polymorphism is A
  VARIANT 102: note = Ancestral polymorphism is S, Derived polymorphism is L
  VARIANT 78: note = Ancestral polymorphism is G, Derived polymorphism is V
  VARIANT 46: note = Ancestral polymorphism is D, Derived polymorphism is G
  VARIANT 45: note = Ancestral polymorphism is G, Derived polymorphism is S
  VARIANT 37: note = Ancestral polymorphism is A, Derived polymorphism is D
  VARIANT 33: note = Ancestral polymorphism is A, Derived polymorphism is T
MFENEADVHDRPDPEVARLLLNMLDKHNKLVATFRFAKEHLDEEGDQKVMLRLLGCNTRHDAQYNLPANGELAAIIVGDCLSSQYKYDVLVHAREGGLKHVSCLHPSYMALQYLLLFPYGDRGYHLGIKYTNVGEGDVTCRKYVTMLEFVRHHSHYRLNEPNPFTCYGRLSNQLAVDAYSTIEASQLQFIVDRQKELRYESIQGITDTIGRGLISADLVGGRVIMPASFMGDLRYHVMNYQDAIAICRVYGPPDLFVTFTCNPKWKEIVDELCFEPGQQPCDRSDIVVRVFHMKVDEFIADIRENKIFGPIRAGFGNSLILKMTVGSCILILFYLMKRDTRPTVDVVLWGERATTFPTEQVHRDSGSSPQIIIFVGTLVRSYADNVSLSGGSSCKWYINAPVPEVNALRASAETNHHPIIWDQGKAAAESTIVAVPEHKKLKDIKYLHPFENKKKEWLVIVKVLKIDRSWWYNVCKKCLRTTKPHGDT

SEQ ID NO: 1624 - protein, 736 aa, Zea mays
  VARIANT 167..736: note = Derived polymorphism lacks residues 167 to 736
  VARIANT 183: note = Ancestral polymorphism is S, Derived polymorphism is L
  VARIANT 251..736: note = Derived polymorphism lacks residues 251 to 736
  VARIANT 521: note = Ancestral polymorphism is P, Derived polymorphism is L
MQCALDPCRAQVVGWPPVRNYRKNTLAAATASRSKAPTEETASGAGPMYVKVSMDGAPYLRKVDIKMYSSYEDLSLALEKMFSCFIAACDFKGQSGLHKSSSKDRLTNGSKVDALKDQEYVLTYEDKDADWMLVGDLPWEIGSSLAQGHPTLVLLQPEIGLDIDKLQMLPSFEAQGAWLVEASLEDHAGLLAAVAQADVVVSAMSGAHIRSHNHSLQHKLLKAIKEAGNIKVCHFYVPLQLPLYLLATNSWVSSRDTGKTMVDASLGEIMTTLLLSHDVFTREIWRLANARGETIQGTIIYYFFLTGLLFLIVQVNLFLLEKLCTVEGYNLVFQACPSPADGLVGKESYAQVQIVIHGCSDVTAMTNGTNVEIGPKGQEPPSISSGNISFVVRVLAKLLQMALAFCFSWEIKVHRRKVKKAVAKKNRDLADRLLNRPPTYKLDRLVLERYPTFVDALRDLDDCLTMVHLFAALPAVDGERVEVKRIHNCRRLSHECLTFISVKGIYYQAEVQGQKITWLTPHALQQVLTDDVDFNVMLSFLEFYETLLGFVNFKIYHSINVNYPPILDPRLEALAVELYALCRYMSAGSRRMIGNSQTDEVMEDKDEKSKAEEVIEEEKVVKNKASSKADESEFRLAQLQHQLPTNEPGALMNLVEESTADDADDDDTKDCKGLFKNLKFYLSREVPRESLLFIIPAFGGTVSWEGEGAPFKEIDEDITHQVDSICNNLLHQSLTI

SEQ ID NO: 1625 - protein, 238 aa, Zea mays
  VARIANT 198: note = Ancestral polymorphism is A, Derived polymorphism is T
  VARIANT 195..238: note = Derived polymorphism lacks residues 195 to 238
  VARIANT 188: note = Ancestral polymorphism is S, Derived polymorphism is Y
  VARIANT 163..238: note = Derived polymorphism lacks residues 163 to 238
  VARIANT 118..238: note = Derived polymorphism lacks residues 118 to 238
  VARIANT 104..238: note = Derived polymorphism lacks residues 104 to 238
  VARIANT 84: note = Ancestral polymorphism is P, Derived polymorphism is A
  VARIANT 64: note = Ancestral polymorphism is S, Derived polymorphism is R
MYAMLMSCQLIGVTWFPVLKDFTHPDQYNFGVNQGSSSFHELHPQFAGYTRGKLHELVMKYFKSRELTLAINEVLDPWISAKQPKKEFEAYFSHNSASRNFLPEDGGSAKRARLLPDQSDENIHLSQDIIASRKEDICFEELCDGASSVDNDSVNPRAGNASWGLLNDHLLARIFHFMRADLKSLISSAATCKSWNAAAKYYRNMCRFIDLSSVGPLCTDSVFCDIMMQYRSVFWGTG

SEQ ID NO: 1626 - protein, 385 aa, Zea mays
  VARIANT 75..385: note = Derived polymorphism lacks residues 75 to 385
  VARIANT 119: note = Ancestral polymorphism is T, Derived polymorphism is I
  VARIANT 163: note = Ancestral polymorphism is T, Derived polymorphism is M
  VARIANT 224: note = Ancestral polymorphism is A, Derived polymorphism is S
  VARIANT 234: note = Ancestral polymorphism is T, Derived polymorphism is I
  VARIANT 241: note = Ancestral polymorphism is G, Derived polymorphism is S
  VARIANT 265..385: note = Derived polymorphism lacks residues 265 to 385
MVGRSSNFGASDAFGAVCTGTGATPRTSNYEDDPPIAPVPEGRQRSRFLAVGSYDNTIRILSLDPDDCLQPLSVQSVSSAPESLLFLEVQASVGGEDGADYPANLFLNAGLQNGVLFHTNVDMVTELEKHIEDMHVLITTPFHPAYVTAERIKKAKNLELLLTAGIGSDLPAAAAVGLTMAEVTGSNTVSVAEDELLRILILLRNFLPGYQQVVQGEWNVAGISHRAYDLEGKTVGTVGAGRIGRLLLQRLKPFNCNLLYHDRLQIDPELEKEIGAKFEEDLDAMLPKCDVIVINTPLTEKTRGMFNKERIAKMKERVIVVNNARGAIMDARAVADACSSGHIAGYGGDVWFPQPAPKDHPWRYMPNHAMAPHISGTTIDAQVRF

SEQ ID NO: 1627 - protein, 172 aa, Zea mays
  VARIANT 150: note = Ancestral polymorphism is H, Derived polymorphism is L
  VARIANT 54: note = Ancestral polymorphism is M, Derived polymorphism is I
MTTIRRFCCDDLLRFASVNLDHLTETFNMSFYMTYLARWPDYFHAAVSPGGRVMGYIMGKVEGQGESWHGHVTAVSVASEFRRQKLAKKLMNLLEEISDKMDKAYFVDLFVRASNMPAIRMYEKLGYVVYRRVLRYYSGEEDGLGKRLQHTYSKSVTTSVLEYLSSTSLFLN

SEQ ID NO: 1628 - protein, 867 aa, Zea mays
  VARIANT 424: note = Ancestral polymorphism is G, Derived polymorphism is A
MLSGIIDGLTGANKHARLKGTVVLMRKNVLDLNDFGATVVDSISEFLGKGVTCQLISSTLVDANNGNRGRVGAEANLEQWLTSLPSLTTGESKFGVTFDWEVEKLGVPGAVVVKNNHAAEFFLKTITLDDVPGRGAVTFVANSWVYPAGKYRYNRVFFSNDTYLPSQMPAALKPYRDDELRNLRGDDQQGPYQEHDRVYRYDVYNDLGEPDGGNPRPILGGSADHPYPRRCRTGRKPTKTDPNSESRLSLVEQIYVPRDERFGHLKMSDFLGYSIKAITQGIIPAVRTYVDTTPGEFDSFQDIINLYEGGIKLPKIQALEDMRKLFPLQLVKDLLPAGGDYLLKLPIPQIIQGTSQDKNAWRTDEEFAREVLAGVNPMVITRLTEFPPKSTLDPSKYGDHTSTITAEHIEKNLEGLTVQQALDGNRLYILDHHDRFMPFLIDVNNLEGNFIYATRTLFFLRGDGRLAPLAIELSEPYIDGDLTVAKSKVYTPASSGVEAWVWQLAKAYVAVNDSGWHQLVSHWLNTHAVMEPFVIATNRQLSVTHPVHKLLSSHFRDTMTINALARQTLINGGGIFEMTVFPGKYALGMSSVVYKSWNFTEQGLPADLVKRGVAVADPSSPYKVRLLIEDYPYASDGLAIWHAIEQWVGEYLAIYYPDDGALRGDEELQAWWKEVREVGHGDHKDAPWWPKMQAVSELASACTTIIWIASALHAAVNFGQYPYAGYLPNRPTVSRRRMPEPGSKEYEELERDPERGFIHTITSQIQTIIGISLIEILSKHSSDEVYLGQRDTPEWTSDARALAAFKRFSDALVKIEGKVVGENRDPQLRNRNGPAEFPYMLLYPNTSDHSGAAAGLTAKGIPNSISI

SEQ ID NO: 1629 - protein, 476 aa, Zea mays
  VARIANT 8..476: note = Derived polymorphism lacks residues 8 to 476
  VARIANT 21..476: note = Derived polymorphism lacks residues 21 to 476
  VARIANT 219..476: note = Derived polymorphism lacks residues 219 to 476
  VARIANT 316..476: note = Derived polymorphism lacks residues 316 to 476
MDGVRCMESPAAGDAPHSSFRTLGPTLLVSMGYLDFGKWLVAVEAGSRFGYDLVLLVLLFNLSAILCQYLSSCIGIVTKKNLAEICHQEYDQKICVVLGLQAGLSLLTSEFTMIAGIVVGFNLVFESNNPITVVCFTSVVVNLLPYTLSLLDKRKAGMFNAYASGFTLVCFVLGLLVSHPKTPVNTNVMFPKLSGESAYSLMVLLGTNIIVHNFYTHSSVVQVQRRFQGHTLGTLFHDHLFSVLFAFSGIFLVNYILMSSAVDESKNTMAINFQDARQLMNQVFTSPVAPIVLLVVLLFSGHIVSMTCIIGSDVISEDLFGIKLPLFVHHLLPKVFAMITTIYHAKVVGFEGLYQLLMVCPIIQAMLLPSSVIPVFRISSSRSLMGRYRISRCVEILCFLAFLLTLFTNIIFVAEVLFGDSTWTNDLKGNTENPILLPYIVVVLISCGSIGFALFLAVTPLKSACNEAERALSVHS

SEQ ID NO: 1630 - protein, 181 aa, Zea mays
  VARIANT 12: note = Ancestral polymorphism is N, Derived polymorphism is D
MSSASVRTYLPNVNLVELLEAKLGYAFSVKGLLIEALTHPSQQEAGATYCYQAPPTNLSGSSSSSSVAPMPKRKNGAGSSRSSPHMWTDEEEWTLLAEIRELLKTQPLVIKKRVKFYESLAGMMNKKFAGKDGYVVLTASKIRTKLLHYKESFSTRAPMSWSAGLSNILLSAVEADVSLCT

SEQ ID NO: 1631 - protein, 959 aa, Zea mays
  VARIANT 249..959: note = Derived polymorphism lacks residues 249 to 959
  VARIANT 340..959: note = Derived polymorphism lacks residues 340 to 959
MVPKRTHDPRSGDESTADESSLEASNFEKNTKPGKTGLGSHCEPTPVVNAAKLLSPEARQYVIDCGFGAFLEMKATKIFSLETIIVILNKCDVSSSDESFTIVLSDEHQLKVTTEVVHSIFGLPTGEISIDQKNFTHTEFLKFWKILKAGGHVTESTTRCRGKPVSTKRITLQSLLNYMEAEADKEKQAFAFFTILLSKLLLTTTSNVPTKGHVALCSYIENTQKYDWCKFVCQDLKNKISSWKQKPTSKIPGCLLLLLICSFRIVVPEPKLEEASAGPLIKHYDDNRILELLKAVKDTIKFKEEIANLKVQRNAKPQPPKEKKPASKRQKGEGQNLGIQIHVEDLLKGYEVDENQRGILLKVIEDEVGSSEIKLMEKLKKIVANRSFFIFYDEIKNRAQIKDKERIQQMEKNLVVDIEDVTISEAVFVKTFKPYGRLHTSIIETLIRIWNKSWDDRIMLSLLAVEQILGKRKDYLERELKDYDKEKKHTIFVPFIIDQHWSLVVVEPGREVITVLDSFYELRLCEKRHENLMAQLQKNLYPFIGLENATHRFITPPVVQNQNNSHDCGFHMLLYIKRYEDQNYHNISEDEVIMCRIETAMLLLNNEDNKCRDKFTESHAITKEQKKEKVRDKVDDKKGDRKDESSDDDYEDKSEEEEEEEEEGTGYKPCDFKIADNWTQNLGNKELRQQLLRKIVDNKDYKSVQFMSPKSDTARRDTDTWNLTGSDIAKSFVDKTLCEDTVATFYVQCLMYDEGQLGADEKTVFSRIFLEPKVAELLLSKEYKLEVVADYMKGQYNAQQICKAMQIFVPICQENHWTLYVVNKKYGQIDILDSSPTAVNDKMKYHQSIAAKVRQRLNAVLLRISKEEHIDFIDFSKWGLPLIPKIRIAHQDRNSMDCGFFVMFFMRHYNPDTHLLEGHKLADDQVEGDQLEATKDIRSPNQPREKGKILEDHVVLFRV

SEQ ID NO: 1632 - protein, 1132 aa, Zea mays
  VARIANT 263: note = Ancestral polymorphism is R, Derived polymorphism is H
MDPQSDAGAAVVLGADPAALTALLADLTSPANEARSRAEQQFHAFRRSHPDALALSLAHLLLSPAHPSAPIAAVLLRRLIAPSSQSFVYPALSPATQSSLRALLLSAASAPALPRSVSRKLSDAVAELASFLLPANAWPDLLSFLYKSIDSTSSPPGLQESALNILARLASHLAASFPNLHGLLHAALSHPSSADVRVAGLNAAISLIQSLPSAAARDQFQDLLPAMMRALAESLNCGNEGSAQEALEMMIELAGAEPRFLRRQLPDVVASMLQIAEAPGLEDGTRHLAVEFVVTLAEARERAPGMMRKLPRYVGRLFAVLMSMLLDVQDEPAWHAAVSEEEDAGETGSYVFAQECLDRLSIAVGGNTILSVAAELLPSFFSSEDWKRRHAALVTIAQIAEGSAKMMIKNLEQVVGMVLNSFQDPHPRVRWAAINAIGQLSTDLGPELQNQLHHVVLPSLASAMDDVQNPRVQASDCSVYHYLKKMISESSEDLAHAASAILNFSENCRPDILTPYLDVIVGKLLLLLQTGNQMVQEAALTALASAADSSQEHFQKYYDAVMPYLKAILMNATDKSNRMLRAKSMECISLVGMAVGKQKFKDDAKQVMEVLMTLQGSQMEADDPITSYMLQAWARLCKCLGQDFLPYMSVVMPPLLQSAQLKPDVSVTSAGPEDENGESDDEGVETITLGDKRIGIRTSLLEEKATACNMLCCYADELKEGFFPWIDQVTTTLVPLIKFYFHEEVRKAAISAMPELLRSAKLAIEKGQAQGRDKSYLKQLSDYIVPALVEAMHKEPEPQICASILESLNESIQLSGTLLDQNQVRSAVEGVKEVIVASTNRRIERTERARAEDFDSEEEELLREENEQEDEIFDQIGDCLGTLVKTFKTSFIPFFDELSMYLTPMLGKNKSPEERRIAICIFDDVAEHCREAAVRYYDTYLPSLLEACMSENPDVRQAAVYGIGICAECGGSAFRPHTGEALSRLYNVIKHPNALDLDNAMAYDNAVSALGKICRFHRDIIDVSQVIPAWLSCLPIKNDLIEAKLVHEQLCVMLEQSERELLGHNNQYLPKIVSVFAEILCAGKDLATEQTASRMVNLLRQLQATLPPSVLASTWSSLQPQQQLALQSVLSS

SEQ ID NO: 1633 - protein, 269 aa, Zea mays
  VARIANT 50: note = Ancestral polymorphism is A, Derived polymorphism is G
  VARIANT 140..269: note = Derived polymorphism lacks residues 140 to 269
  VARIANT 164: note = Ancestral polymorphism is V, Derived polymorphism is L
MAATSPFDCVLLDLDDTLYPGDTGIGAALRRNIDEFLQAKLGVSADEAAATRAELFRAHGSSLAGLIALGYDVHPDEYHSYVHGRLPYDRIARDPQLARLLQSIPQRKVLFTNSDRAHMERALERLGVDEAAFDAVVCFETMNPHLFGDDGGDRRPAVVLKPAVDAIVAGLRAAGSNPRRTLFLDDSERNIAAGKALGLRTALVGKRARSKEADYAVESIGALRRAIPEIWGEAAERSSDKLPVPAVSVVRSTTSDLDSIIIQPTSIHA

SEQ ID NO: 1634 - protein, 331 aa, Zea mays
  VARIANT 146: note = Ancestral polymorphism is G, Derived polymorphism is R
MLYEKRENYSRANPLKPKAGPKGIGRLPGLPLPCLAPPRRRSPATPERERQPPPPPDAPTSTVDASRPCVSPSCRASSNSAAPAPWRQRPARPCGHFPAFAYSRNLIPRSQARRMAPAFMELALEQAKFALDNLEVPVGCVIVEDGKVISSGSNKTNATRNATRHAEMEAIDVLLREWQSMGLDQPQVAEKFAGCDLYVTCEPCIMCATALSIIGIREVYFGCANDKFGGCGSIMSLHNGAASSSDELSGSQASTPKGFKCTGGIMAEEAVALFRCFYEQGNPNGLYFCMHPQGLTDQYECLNNNWFVFLDYNHNAKTSGVQTYKLTVKLV

SEQ ID NO: 1635 - protein, 278 aa, Zea mays
  VARIANT 110: note = Ancestral polymorphism is P, Derived polymorphism is S
  VARIANT 106: note = Ancestral polymorphism is P, Derived polymorphism is A
  VARIANT 47: note = Ancestral polymorphism is A, Derived polymorphism is V
  VARIANT 26..278: note = Derived polymorphism lacks residues 26 to 278
  VARIANT 25..278: note = Derived polymorphism lacks residues 25 to 278
  VARIANT 24: note = Ancestral polymorphism is R, Derived polymorphism is C
  VARIANT 18: note = Ancestral polymorphism is P, Derived polymorphism is L
MAAASLLSRARWLLVEHPAVASFRWQPGRTVGATPSFAAAVICGYLAAVLVLRRLVLPRLPALPPPALRALSAAHNAVLLALSAAMAGGCALSTAATAPAPRWAWAFCFPPRGATEASGPVFFWAHVFYLSKVYELGDTLLILLARRPLTLLHVYHHALVVAMCYLWLATRQSLMPVALVTNAGVHVVMYSYYLSCSVGLRWPGRWKRAVTELQIAQFLFSFAASVVMLWLHFAAGGCEGMAGWVFNAVFNASLLALFLNFHGAAYKGAAKANKGKAE

SEQ ID NO: 1636 - protein, 292 aa, Zea mays
  VARIANT 240: note = Ancestral polymorphism is A, Derived polymorphism is V
  VARIANT 160: note = Ancestral polymorphism is D, Derived polymorphism is Y
  VARIANT 155: note = Ancestral polymorphism is V, Derived polymorphism is A
  VARIANT 67: note = Ancestral polymorphism is N, Derived polymorphism is K
MTLGSAAHKIPLEVAHTLVEIAEVARYAYHHRPGRPATHEGDPTAPPAGADSSGGTNEDAARLLEENAMLRARLADDLALLRELHGAPCVSKECPPDLYNRLMAAVNNVSFLAHLEKLQDESARQLNELTSGDMTGSFLVNAIPFSASMELEVEAADIPDKAGNGKKGLWVLVPCDTAGANLEEISGIDDENYVIVNEDDIVDGIAAFVARCILEDPKSKSLSPMQLQKAVAKALDSMKARWRWSTFWEAGQIIYILATWGITLAGLYKSRHVLKVAAKGAAVSARFVMKAI

SEQ ID NO: 1637 - protein, 768 aa, Zea mays
  VARIANT 537..768: note = Derived polymorphism lacks residues 537 to 768
  VARIANT 540..768: note = Derived polymorphism lacks residues 540 to 768
MASGETNAGNTQRGNTLPNGDIYVGNFAGLVPHGFGKYMWTDGTLYYGEWDTSKMSGRGAIQWPSGASYDGDLCGGFIDGTGSFKGVDGSVYKGSWRMNRKHGMGTMVYANDDTYEGLWNEGLPDGFGKYTWVDGNIYIGLWKSGKMNGRGVMQWTNGDTLDCNWLNGLAHGKGFCKYASGACYIGTWDRGLKDGHGMFYQPGSKMPCNLEVSECVTDHDVSSSSSSGNENINSSLLFLFQKLCNTWRLHSIFHWPRRISNGTTPVFDDNSGNNLSQDSSTVPLTTDNCVQDSGVDKVLVYEREYVQGVLISENPKCHDSGMLDSGKTQEHTWQMQTGGPMETIYKGHRSYYLMLNLQLGIRYTVGKITPVPLREVRSNDFGPRARIRMYFPTEGSQYTPPHCSVNFFWKDYCPMVFRNLREMFHIDAADYMMSICGDDSLKELSSPGKSGSIFYLSQDERFVIKTLRKTELKILLKMLPKYYNHVRAYDNTLITKFFGVHRITLKGGRKVRFVVMGNMFCTELRIHRKYDLKGSTQGRSTKKQNINENTTLKDLDLSYVFHVDKPWRDALFRQISLDCMFLESQSIIDYSMLLGIHFRAPHHLKTSSSHQSSLERCGIPDSDLLQYEEKSSWKGFLLVAHEPGATVGGSHIRGSMVRASEAGYEEVDLVLPGTGRFRVQLGVNMPARARKVHEDTNTELENPDTIEEYDVVLYLGIIDILQEYNMSKRVEHAVKSLKFDPLSISAVDPDLYSKRFVKFLESVFPEQD

SEQ ID NO: 1638 - protein, 502 aa, Zea mays
  VARIANT 387: note = Ancestral polymorphism is V, Derived polymorphism is A
  VARIANT 385: note = Ancestral polymorphism is Y, Derived polymorphism is F
  VARIANT 361: note = Ancestral polymorphism is D, Derived polymorphism is G
  VARIANT 253: note = Ancestral polymorphism is T, Derived polymorphism is M
MDARWAVLLALLVASGGVRVCAAAGAKGANWLGGLSRASFPKGFVFGTATSAYQVEGAASTNGRGPSIWDSFAHVPGNIAGNQNGDVAVDQYHRYKEDVDLMKSLNFDAYRFSISWSRIFPDGEGKVNPEGVAYYNNLINYLLQQGMTPYINLYHYDLPLALEKKYGGWLSAKMADLFTDYADFCFKTYGDRVKHWFTFNEPRIVALLGYDTGSNPPQRCTRCAAGGNSATEPYIVAHNFLLAHATAVARYRTKYQAAQKGKVGIVLDFNWYEALTNSPDDQAAAQRARDFHIGWFVDPLINGHYPQIMQDLVKERLPRFTPEQAKLVKGSADYIGINEYTSSYMKGQKLVQLAPSSYSADWQVQYVFARNGKPIGPQANSKWLYIAPTGMYGCVNYLKEKYGNPTIYITENGMDQPGNLTRDQYLRDATRVRFYRSYIGQLKKAIDQGANVAGYFAWSLLDNFEWLAGYSSKFGIVYVDFNTLERHPKASAYWFRDMLQKH

SEQ ID NO: 1639 - protein, 506 aa, Zea mays
  VARIANT 435: note = Ancestral polymorphism is F, Derived polymorphism is C
  VARIANT 142: note = Ancestral polymorphism is Y, Derived polymorphism is C
MIAVRWAALLVALVVACGSAAAGAAAGEGPNWLGGLSRAAFPKDFVFGTATSAYQVEGAASTNGRGPSTWDAFVHTPGNIVYNQTADVAVDQYHRYREDVDLMKSLNFDAYRFSISWSRIFPDGEGRVNPEGVAYYNNLINYLLRKGITPYANLYHSDLPLALQNKYGGWLNAKMAKLFTDYADFCFKTFGDRVKHWFTFNEPRIVALLGYDAGSIPPQRCTKCSAGGNSATEPYIVAHNFLLSHAAAVSRYRNKYQAAQKGKVGIVLDFNWYEALTNSTEDQAAAQRARDFHVGWFADPLINGHYPQIMQDIVKERLPKFTPEQAKLVKGSADYIGINQYTASYVKGQKLLQQKPTSYSADWQVQYVLERNGKPIGPQANSKWLYIVPEGMYGCVNYLKHKYGNPTVFITENGMDQPGNLTRGQYLHDTTRVQFYKGYLAELRKAIDDGADVAGYFAWSLLDNFEWQSGYTSKFGIVYVDFSTPKLERHPKASAYWFRDMLQKHL

SEQ ID NO: 1640 - protein, 200 aa, Zea mays
  VARIANT 3: note = Ancestral polymorphism is L, Derived polymorphism is P
  VARIANT 20: note = Ancestral polymorphism is S, Derived polymorphism is L
  VARIANT 30..200: note = Derived polymorphism lacks residues 30 to 200
  VARIANT 42: note = Ancestral polymorphism is L, Derived polymorphism is F
  VARIANT 61: note = Ancestral polymorphism is D, Derived polymorphism is Y
  VARIANT 63: note = Ancestral polymorphism is S, Derived polymorphism is C
  VARIANT 65: note = Ancestral polymorphism is L, Derived polymorphism is P
  VARIANT 68..200: note = Derived polymorphism lacks residues 68 to 200
  VARIANT 72: note = Ancestral polymorphism is Q, Derived polymorphism is H
  VARIANT 82: note = Ancestral polymorphism is R, Derived polymorphism is H
  VARIANT 121: note = Ancestral polymorphism is Y, Derived polymorphism is C
  VARIANT 164: note = Ancestral polymorphism is P, Derived polymorphism is L
  VARIANT 173..200: note = Derived polymorphism lacks residues 173 to 200
  VARIANT 175: note = Ancestral polymorphism is P, Derived polymorphism is L
MLLRALKGHLEDSANEGDPSAVHCIRNLNWELLDLATWPIYLVEYLLTRGLELRYGMKLTDLCLLSTEYYRQPAGVKLELLRSLSDDVLEIGAIRSRLSESDGNDEGFRSTGDLLPKGDWCCPECLIRKDGSKNIANPMRGAEILGTDPHGRLYFFTCGYLLVPMANIIRKCWDPNLDKRPDMDEEAGKSVVLNNLMGNL

SEQ ID NO: 1641 - protein, 608 aa, Zea mays
  VARIANT 444: note = Ancestral polymorphism is R, Derived polymorphism is S
MDSSSRGGGGSGSRGRSPRLDRRNAVKRIEYEASAGASASWSSSSSAEQQRSPGLRPSRSLDLAPGADLRISGSVEGEVDELCRSLGLSGPEDFAVPVAAWEARKSRSNSDLLPRSRLDPSTPADETSPIARAVSAPGAQPTRSFPAPIPEESLHSSPASTATESAEEPTVAAPEESPNAAPASAVVAPVGGLPLPSPRRGGGEVGIRGARPPLLSPPPPIGALAPPPVRRSFVDNDMTGSAWDIVQSFAPRDQGSELGLGGSVDSRCNSDKEEENDVEDGDAAVEGELKELRIGETFEGFTGTSSLSTTNDDDASSTTTEAMFIISPNGKFKRNIKSWMRGALLGSGSFGMVYEGISDEGAFFAVKEVSLLDQGSNAQQSIVALEQEIALLSQFEHENIVQYYGTDKEESKLYIFIELVTQGSLSSLYQKYKLRESQVSAYTRQILNGLVYLHERNVVHRDIKCANILVHANGSVKLADFGLAKEMSKINMLRSCKGSVYWMAPEVINPKKMYGPSADIWSLGCTVLEMLTRQIPFPNVEWTNAFFMIGRGEQPTIPNYLSKEAQDFIGQCVRVDPESRPSASQLLEHPFVNRPLRASFESSSPPAI

SEQ ID NO: 1642 - protein, 268 aa, Zea mays
  VARIANT 215..268: note = Derived polymorphism lacks residues 215 to 268
  VARIANT 193: note = Ancestral polymorphism is I, Derived polymorphism is T
  VARIANT 182: note = Ancestral polymorphism is G, Derived polymorphism is V
  VARIANT 170..268: note = Derived polymorphism lacks residues 170 to 268
  VARIANT 93: note = Ancestral polymorphism is D, Derived polymorphism is E
  VARIANT 72: note = Ancestral polymorphism is Y, Derived polymorphism is D
  VARIANT 71..268: note = Derived polymorphism lacks residues 71 to 268
  VARIANT 20: note = Ancestral polymorphism is S, Derived polymorphism is F
  VARIANT 18: note = Ancestral polymorphism is R, Derived polymorphism is W
  VARIANT 9: note = Ancestral polymorphism is S, Derived polymorphism is L
MTASTSSTLTSSRGYSGRASSRKRGIEAVSDSNIFVENLVEKEEFLHTFSKECEYIRTAVTNGSAIKHDGSYESDPAVEVIFFPVILCICDLDLLFELNSKVLLHFFYSRLVPLVLLLVEGSTPIYIGEHGWEMLLVVKKATQEAGSKFELLGFASVHNFYHYPESIRLRISQILVLPPYQGEGHGLGLLEAINYIAQSENIYDVTIESPSDYLQYVRSSIDCLCLLMFDPIKPALGAIVSSLKETNLSKRAQSLRMVPPVDLMETVR

SEQ ID NO: 1643 - protein, 578 aa, Zea mays
  VARIANT 68..578: note = Derived polymorphism lacks residues 68 to 578
  VARIANT 106: note = Ancestral polymorphism is P, Derived polymorphism is L
  VARIANT 114: note = Ancestral polymorphism is A, Derived polymorphism is V
  VARIANT 125: note = Ancestral polymorphism is S, Derived polymorphism is F
  VARIANT 173: note = Ancestral polymorphism is T, Derived polymorphism is I
  VARIANT 180..578: note = Derived polymorphism lacks residues 180 to 578
  VARIANT 191..578: note = Derived polymorphism lacks residues 191 to 578
  VARIANT 313: note = Ancestral polymorphism is R, Derived polymorphism is M
MPYNETPTVNATFNAPDHNDTRSVNNEHTAHYYLDEDNQQDDYDISNGGVVQSARFVTVREYYCFLLQAREGGFNILLFGGRLFQQWVVDMYIKIESMRLDWYSNPVNQKIIRAELYQGLVDVISVGENRASEVGKRIVLPRTFQGGDRDMQQRFLNAMAIVQRLGKPDYFITMTCNPYWEEITNNLLPGQTPQDRPELVTRLVVNEECRFRYPRQFCAATQQGKDSYPLYRRRDDGRRVKVRGCVLDNRWVVPYNPGLFMRYNCHINVEACSSIKAIKYMCKYVYKGHDRASFSVYPAHKEDGVINEIRQYMDARYISPPEAVHRILGFPLFGVNPSVLQLQCHLPGMQSVIIDETAKLQDIVNEPSSSMTTLIEYFTKNRADSFARTLLSKDFPEYYRWIHGSKRWQRQKQRGQIGRIVYAHPAEGERYFLRVLLNHVRGAYSFEDLRTLGAITCSTFREACQKRGLIETDMSLDDCLSEAATFQMPHALQRLFATILVFCEATNVRGLWDKHNDSMPEDYNRDNPKSTCIQQMVLKDIQKLVRSMGKDIKYYYLPEINDSGTFLHCKQMIVLIAN

SEQ ID NO: 1644 - protein, 194 aa, Zea mays
  VARIANT 72: note = Ancestral polymorphism is V, Derived polymorphism is I
  VARIANT 80: note = Ancestral polymorphism is I, Derived polymorphism is T
  VARIANT 100: note = Ancestral polymorphism is P, Derived polymorphism is A
  VARIANT 110: note = Ancestral polymorphism is P, Derived polymorphism is L
  VARIANT 121: note = Ancestral polymorphism is R, Derived polymorphism is L
  VARIANT 126: note = Ancestral polymorphism is M, Derived polymorphism is T
  VARIANT 144: note = Ancestral polymorphism is P, Derived polymorphism is L
  VARIANT 146: note = Ancestral polymorphism is P, Derived polymorphism is L
  VARIANT 169: note = Ancestral polymorphism is L, Derived polymorphism is S
  VARIANT 185: note = Ancestral polymorphism is N, Derived polymorphism is I
MIDKFPGNGKVYHSFDNVDDDSRNNYPIEFLNSMTPNGLPPHVLKVKINSPVILLRNLDPNNGLCNGTRLMIRALQDNAIDAEIVGGHNAGTRVFIPWIAMCPSDDISLLFKLKRKQFPIRLSFATTINKAQGQTIPNVGIYLPEPVFSHGQLYVALSRGVSRQTTRILARPKKELDPTWKSTKIIVYKDVLNC

SEQ ID NO: 1645 - protein, 107 aa, Zea mays
  VARIANT 16: note = Ancestral polymorphism is A, Derived polymorphism is V
  VARIANT 23: note = Ancestral polymorphism is A, Derived polymorphism is T
  VARIANT 29: note = Ancestral polymorphism is D, Derived polymorphism is N
  VARIANT 33..107: note = Derived polymorphism lacks residues 33 to 107
  VARIANT 46: note = Ancestral polymorphism is V, Derived polymorphism is A
  VARIANT 57: note = Ancestral polymorphism is S, Derived polymorphism is L
  VARIANT 66: note = Ancestral polymorphism is D, Derived polymorphism is N
MSALPPDIDREDWLQALPRALVAGFVKADIDFQRKGEVSGTTATLVVIDGFTVTVASVGDSRCILDTQGGELQLLTVDHHLEENAEEREHVTASGGEVGRLNLFGGQ

SEQ ID NO: 1646 - protein, 195 aa, Zea mays
  VARIANT 40: note = Ancestral polymorphism is G, Derived polymorphism is S
  VARIANT 104: note = Ancestral polymorphism is G, Derived polymorphism is A
MATLSMVSVPIAPSSLSLSTRGRSSSASFPAKKGGIGHGGLRIECIRIGGVEIPNHKRVEYSLQYIHGIGRSRSRQILLDLNFDNKITKDLSEEEVITLRKEVGKYMIEGDLFYIDVGLQGSENAESWHTAVWYALQKRFNRVAIERLKEIRCYKGIRHKLGLPVRGQRTKNNCRTLKGKRASVAKKKSPASQDE

SEQ ID NO: 1647 - protein, 287 aa, Zea mays
  VARIANT 242: note = Ancestral polymorphism is P, Derived polymorphism is L
MLCLAGLLLKITRLPPQSHAKIPLELPPSPSASPCGGAGSRRAMAPAFSVSCAPGSSRPLAASPGPSVVVVASSQLPASSRSSERRRAPGLALAAAPGVGGRDGGGRWRAGISSFPFLPPFFTGNKGEKDAEKAMRLKEELLDAIAPLDRGAEATPEDKERVEQIVQQLEAVNQVKEPLKSDLLNGKWELLYTTSTSILQPQRPKYLRPFGKIYQSINADNLRAQNMETWPYFNQVTANLVPLNSRRVAVKFDYFKIFGLGFERRQGKLVRTEDGRPSIQGSIIIML

SEQ ID NO: 1648 - protein, 820 aa, Zea mays
  VARIANT 423..820: note = Derived polymorphism lacks residues 423 to 820
MHPFCCAPLVPVSPVASAAAASSAVAGAPAVMPPPQPPPPPPPPPRSNPASGGERRARAAGVSGGGGGGSSPPEGVKLNEIVGGGISGILYKWVNYGRGWRPRWFALHDGVLSYYKIHGPDRIILSRETERGAKVIGDDSLRRLNRPSTSSSSHSNGHHHPRNPIGEIHLKVSTVRESRSDDRRFSIFSGTKTLHLRAETREDRAAWLEALRATKDMFPRMSSSEMVGPGDTAAAVAVSTERLRQRLQQEGVSEAAIADSEMIVRAEFEALHKQLVLSKQKHALLLETLRQLETEKVDLENTLVDESQRQSKEYGSASKPRHEKYSEGSASESDDYNEPQDPAEETDDDENLYFDTRDFLSSSSFKSSGSDFQRSEAGSDDEDDYPMDGIDPSMKSIGISYPYVRRRKKLPDPVEKEKGVSLWSMIKDNIGKDLTKVCLPVYFNEPLSSLQKCFEDLEYSYLIDRASEWGKRGNSLMRILSVAAFAVSGYASTDGRSCKPFNPLLGETYEADYPDKGLRFFSEKVSHHPMVVACHCEGTGWRFWADSNLKSKFWGRSIQLDPVGELTLEFDDGEVFQWSKVTTSIYNLILGKLYCDHYGTMRIQGNREYSCKLKFKEQSIIDRNPHQVQGVVQDRNGRTVATLFGKWDESMHYVMGDCFGKGKGTEQLSEAHLLWKRSKPPKFPTRYNLTQFAITLNELTPGLKEKLPPTDSRLRPDQRCLENGEYERANAEKLRLEQRQRQCSFLSSCIMLWSSNMIMAITPQARKMQESGWKPRWFAKDKATDTYRYVGGYWESREKSSWEGCPDIFGQVPNDLMVTD

SEQ ID NO: 1649 - protein, 177 aa, Zea mays
  VARIANT 4..177: note = Derived polymorphism lacks residues 4 to 177
  VARIANT 10..177: note = Derived polymorphism lacks residues 10 to 177
  VARIANT 13..177: note = Derived polymorphism lacks residues 13 to 177
  VARIANT 31..177: note = Derived polymorphism lacks residues 31 to 177
  VARIANT 48..177: note = Derived polymorphism lacks residues 48 to 177
  VARIANT 82..177: note = Derived polymorphism lacks residues 82 to 177
  VARIANT 95: note = Ancestral polymorphism is I, Derived polymorphism is T
  VARIANT 104..177: note = Derived polymorphism lacks residues 104 to 177
  VARIANT 127: note = Ancestral polymorphism is S, Derived polymorphism is R
MGMQQSLGIQPTQLGKDAPVAGAARRVSAQRKMIEVESVAAADKQEIREVKDLVFPVNVHLGQHFTKPPPRYSEGALIKKLEERGIGRPSTYASIMKVLLLYDQVTGDVICHGEKNFLQDGRKSFPSGHNSRSREATVDLFLKSAEYLDCAVHHVLIHIPPQRRIINFVFYCINSEH

SEQ ID NO: 1650 - protein, 691 aa, Zea mays
  VARIANT 432..691: note = Derived polymorphism lacks residues 432 to 691
MASLPLCRSPSSLLPSWPHRPISASFNPKNPSSPVAAHVSVQETPPQPQDPSPPSDSNPNGTRPSSSSNTRFLWVNPNSPRAADVARARAGSGRRARLASAAAALGACETTESAVEAALQAAFPEPPSEQDAVIVLNTAAATRAETAVLALRWFLGNAKVRKKVILYNVVLKLLRKKRLWSETEALWAEMLRDGVQPDNATFSTVISCARACGLHSKAVEWFDKMPEFGCSPDMLTYSAVIDAYGHAGNSEAALRLYDRARAEKWQLDPVICSTVIKVHSTSGNFDGALNVFEEMKAIGVRPNLVVYNTMLDAMGRALRPWVVKTIHREMVDQQVQPSRATYCCLLHAYTRARYGEDAMAVYRLMKDEAMGIDVMLYNMLLSMCADIGYVDEAEEIFRDMKASMGAHSKPDSWSYSSMVTLYSSTANVLSAEGILNEMVEAGFKPNIFVLTSLIRCYGKVGRTDDVVRSFGMLQDLGIIPDDRFCGCLLSVAANTPAEELGKVISCIERSNVQLGAVVKLLVDRSSSESFREAARELLRSSRGVVKMPYCNCLMDLCVNLNQMEKACALLDAAQQLGIYANIQTRTQTQWSLHLRGLSVGAALTTLHVWMNDLYTSLQTGNEGLPPLLGIHTGQGKNTYSDRGLAAMFEAHLKELDAPFHEAPDKAGWFLTTNVAAKQWLESKAASELVTV

SEQ ID NO: 1651 - protein, 238 aa, Zea mays
  VARIANT 6..238: note = Derived polymorphism lacks residues 6 to 238
  VARIANT 29: note = Ancestral polymorphism is H, Derived polymorphism is N
  VARIANT 94: note = Ancestral polymorphism is S, Derived polymorphism is F
  VARIANT 116: note = Ancestral polymorphism is S, Derived polymorphism is L
  VARIANT 181: note = Ancestral polymorphism is I, Derived polymorphism is T
  VARIANT 184: note = Ancestral polymorphism is V, Derived polymorphism is A
  VARIANT 206: note = Ancestral polymorphism is D, Derived polymorphism is G
MGVRVQLVDLEPGITHDVRVVGFVGDYHHVFYQGGEATVGETEKDVNEFLFGSLDVPLVNLETSLRNYEPSDVPFDISSVPKETKSQPLAEKKSTGKKSAGPASAVSDPVSTVDASYEKLLSSIPEFADFGKLFKSSAPVELTEAETEYSVNVVKHIFDGHVVLQYNCTNTIPEQLLEQVIVFVDASEADEFLEVASKPLESLPYDSPGQTFVVFEKPEGVIATGKFSNILKFIVKEV

SEQ ID NO: 1652 - protein, 602 aa, Zea mays
  VARIANT 11..602: note = Derived polymorphism lacks residues 11 to 602
MASSGAAANLWVLLGLGIAGVLLAARRLRRPARPDHGAFVARLELLPPPQPPPPQAPHPLTGLCFAIADALHVSGYITSFGSLEWAKTHNAEVLTSSVVSALVDGGAICVGKTVIDEMAYSIHGENRYFDTPTNPAAPDRVPGGCSSGSAVAVAGGMVDFALGIDSIGGVRIPGAYCGVLAFRPSHAVVSNSGVIPVAPSLDTIGWFAKDPSVLHRVGHLLLRLPYAGIRQPRIFYIADDCFELSKIPARRLTQVVTKSVEKLFGINFLMVKDFFFILLGQVRHVNLENYLSSRISSLGNYSNGHKNGDSKFPLLLALCNSMISLHKQEFKDKHMEWINSVKPAVDARIVSDLSEDGDSDIDGCQNVRKEARSALSGLLKDDGILVIPTALGCPPKLNAKELSSESYNSQTLRLLSLASMSGCCQVSIPLGTHDKCPISVSLIARHGGDRFLLDTTQTMYTTIQEQVEILAKSSVSSKQAMNEEAAEAAKEKGNAAFKEKQWQKAVNFYTEAIKLNGKVATYYSNRAAAFLELTSYRQAEADCTSAIELDSKSVKAYLRRGTAREMLGYYKEAVDDFNHALVLEPMNKTAGVAINRLKKLFP

SEQ ID NO: 1653 - protein, 293 aa, Zea mays
  VARIANT 246: note = Ancestral polymorphism is P, Derived polymorphism is L
  VARIANT 185: note = Ancestral polymorphism is A, Derived polymorphism is P
  VARIANT 161: note = Ancestral polymorphism is T, Derived polymorphism is M
  VARIANT 34..293: note = Derived polymorphism lacks residues 34 to 293
MPPASSLTADQLSFFEANGYLVMDSFSSAEEVREMRDRMADLVAGFDGANSAVFSTKDHRQLKDDYFFKSAENISFFFEEKAYGDDGCLKQPKELSINKVGHALHELDPVFKKFSFSESVASLFSSLGYKRPAVIQSMYIFKQPGIGGEVVPHQDNTFLYTEPRTCTGLWLALEDATINNGCLWAIPGSHKKGLVRRMVRDENGTHFDRPSPVYDQKEFVPLEVKSGALVVIHGDLIHQSFENLSPASRHAFSLHVVDTEGCKWSEDNWLVHIHNGIIEEFFIYNTILIFHCP

SEQ ID NO: 1654 - protein, 110 aa, Zea mays
  VARIANT 2: note = Ancestral polymorphism is C, Derived polymorphism is G
  VARIANT 17: note = Ancestral polymorphism is G, Derived polymorphism is S
  VARIANT 47: note = Ancestral polymorphism is D, Derived polymorphism is N
  VARIANT 61: note = Ancestral polymorphism is T, Derived polymorphism is M
  VARIANT 66: note = Ancestral polymorphism is V, Derived polymorphism is I
  VARIANT 75: note = Ancestral polymorphism is H, Derived polymorphism is R
  VARIANT 88: note = Ancestral polymorphism is A, Derived polymorphism is G
MCPNCKVSIGTLPARLGHVNPRQFVPLGSTRGVIVVENERGEMHLLDLVTGVRKSLPSIAMFPLIICVEGLQVQHLGGHGDGTLPIDAFIQKAITVPTHDSGVMVLAIYC

SEQ ID NO: 1655 - protein, 340 aa, Zea mays
  VARIANT 1: note = Ancestral polymorphism is M, Derived polymorphism is I
  VARIANT 32: note = Ancestral polymorphism is R, Derived polymorphism is L
  VARIANT 60: note = Ancestral polymorphism is E, Derived polymorphism is G
  VARIANT 63: note = Ancestral polymorphism is A, Derived polymorphism is V
  VARIANT 88: note = Ancestral polymorphism is P, Derived polymorphism is L
  VARIANT 172: note = Ancestral polymorphism is G, Derived polymorphism is R
  VARIANT 182..340: note = Derived polymorphism lacks residues 182 to 340
  VARIANT 204: note = Ancestral polymorphism is A, Derived polymorphism is S
  VARIANT 210: note = Ancestral polymorphism is L, Derived polymorphism is S
  VARIANT 276: note = Ancestral polymorphism is A, Derived polymorphism is T
  VARIANT 289: note = Ancestral polymorphism is P, Derived polymorphism is L
  VARIANT 307: note = Ancestral polymorphism is V, Derived polymorphism is E
MTWIRGGPSSLDSQNIAAAIDDSCHAFLAAVRSSCAFRRRFRALHPPPLLDFFFDPDGNENPAFMPIRRGSDRGHAATVRDLDALLTPRPGEDVVFVANDWHTAILPCYMNSMYKPNGILLMGRKLNWMKAEIIESDLVLTVSPHYIKELTSGPHKGVELDGVLRAKPLEIGIVNGMDVYEWDPSTDKYISVKYDATMVTEARSLNKERLQAEVGLPVDSSIPVIVFVGCLEEQKGSDILIVAIPEFVGENVQIIVLVWHGKEEDGGIAKFNVPLAHMMFARADFIIVPSRFEPCGLIQLQGMRYGVIPICSSIGGFVDTVEEGVTGFHMGSCNVETQPT

SEQ ID NO: 1656 - protein, 41 aa, Zea mays
  VARIANT 1: note = Ancestral polymorphism is M, Derived polymorphism is I
  VARIANT 16: note = Ancestral polymorphism is A, Derived polymorphism is T
  VARIANT 25: note = Ancestral polymorphism is D, Derived polymorphism is G
  VARIANT 30..41: note = Derived polymorphism lacks residues 30 to 41
  VARIANT 37..41: note = Derived polymorphism lacks residues 37 to 41
MLEKEGAEGEEEAKRAYIAAREESGRRLLQKKTSHQYLLKR

SEQ ID NO: 1657 - protein, 242 aa, Zea mays
  VARIANT 25: note = Ancestral polymorphism is R, Derived polymorphism is W
  VARIANT 32: note = Ancestral polymorphism is A, Derived polymorphism is S
  VARIANT 145: note = Ancestral polymorphism is R, Derived polymorphism is C
  VARIANT 148: note = Ancestral polymorphism is C, Derived polymorphism is Y
MGRGKVELKKIENPTNRQVTFSKRRMGLFKKSNELAILCDAQIRVIIFSGSGRMYEYSNPPWRIASVFDRYLKAPSTHFEEMDIQDERNRLRMIMAQYMAEDLASFSVQDLSNLEQQIEFSLYKVRLRKHELLDQQLLEIHQRVRRRCTGTGSSHGSPTCSRTPTSMAGCGKLPPPVPGHSFAVDCCGRGVRSQISTLTDDGDGVDACRFALVVGVRPQQDDAERAALFILESLIMSHELPP

SEQ ID NO: 1658 - protein, 175 aa, Zea mays
  VARIANT 152..175: note = Ancestral polymorphism lacks residues 152 to 175
  VARIANT 39: note = Ancestral polymorphism is P, Derived polymorphism is L
  VARIANT 26: note = Ancestral polymorphism is R, Derived polymorphism is W
MDRVDSSAFASMGPIEGYDNEKDPCRGRPLRLCASHLCPASSTLTLDLSVPSSVSGHVARIASVVGRTALSTSSRHQQRTATLAWRCTCACSPLLLERAPSSSINPVVISPHHTTQDAAEDETQLAALKRLSRSHPRLERDDDLAFIAFQKRFDEFPEPTEKGEHQRKERGSLLV

SEQ ID NO: 1659 - protein, 192 aa, Zea mays
  VARIANT 153: note = Ancestral polymorphism is G, Derived polymorphism is D
  VARIANT 148: note = Ancestral polymorphism is A, Derived polymorphism is V
  VARIANT 147: note = Ancestral polymorphism is S, Derived polymorphism is F
  VARIANT 145: note = Ancestral polymorphism is S, Derived polymorphism is I
  VARIANT 139: note = Ancestral polymorphism is L, Derived polymorphism is P
  VARIANT 138: note = Ancestral polymorphism is R, Derived polymorphism is H
  VARIANT 137: note = Ancestral polymorphism is R, Derived polymorphism is H
  VARIANT 133: note = Ancestral polymorphism is S, Derived polymorphism is L
  VARIANT 130: note = Ancestral polymorphism is A, Derived polymorphism is T
  VARIANT 125..192: note = Derived polymorphism lacks residues 125 to 192
  VARIANT 120: note = Ancestral polymorphism is S, Derived polymorphism is F
  VARIANT 118: note = Ancestral polymorphism is R, Derived polymorphism is C
  VARIANT 110: note = Ancestral polymorphism is R, Derived polymorphism is C
  VARIANT 93: note = Ancestral polymorphism is R, Derived polymorphism is C
  VARIANT 88: note = Ancestral polymorphism is E, Derived polymorphism is K
  VARIANT 86: note = Ancestral polymorphism is W, Derived polymorphism is R
  VARIANT 83..192: note = Derived polymorphism lacks residues 83 to 192
  VARIANT 77..192: note = Derived polymorphism lacks residues 77 to 192
  VARIANT 6: note = Ancestral polymorphism is Q, Derived polymorphism is R
MASDQQALPVPVPVPVPPNPNPTAPADLTPPSASAARKLPIKRRSPRPSSSPPSSSSPASSDPLRAPGGGGGSDQQQPPFKFQRIWSESDELRFLQGLLGCGTQGLVFPRDLNVFYDRFSESMPQPYTRAQLSEKLRRLKNKFRSMSARVAGGIDPARLAPHDRDVLHLCSRLWDPANAATSPFAASAGTLF

SEQ ID NO: 1660 - protein, 148 aa, Zea mays
  VARIANT 93: note = Ancestral polymorphism is G, Derived polymorphism is D
MAVSIELTKEYGYVVLVLVAYVFLNLWMGFQVGKARRKYKVFYPTMYAIESENKDAKLFNCVQRGHQNSLEWMPVFFVILLLGGLQHPTIAAGLGGIYIVARFFYFKGYATGVPDNRLKIGGLNYLALLGLIICTASFGINLLIREML

SEQ ID NO: 1661 - protein, 367 aa, Zea mays
  VARIANT 194: note = Ancestral polymorphism is R, Derived polymorphism is G
MNKRPRDDHSFASAPKRQYGAGGGYGPQQGYSEERSSARRVADHYSARSNQTLEERENSPIIHLKKLNNWIKSVLVQLYARPGDCVLDLACGKGGDLIKWDKAKVGYYVGVDIAEGSIKDCMTRYNGDTDQQRRKRFSFPARLICTDCYEARLDEYLYEDAPFDICSCQFALHYSWSTEARARQALANVSALLRPGGIFIGTMPDANVIIKRLRESEGLEFGNSVYWISFGNEYAEKKFPASRPFGIKYKFHLEDAVDCPEWVVPFHLFKLLAEEYDLELVLMKNFHEFVHEYLQKPEFAELMRRLGALGDGRQDQSTLSQDEWEVSYLYLAFVLRKRGQPPTQRRASNANRGKMFLTEGDIEVLGV

SEQ ID NO: 1662 - protein, 127 aa, Zea mays
  VARIANT 56: note = Ancestral polymorphism is R, Derived polymorphism is H
MAEGRGSARAIGAMAFAVACCYCCVAIADAATTYYVGDSNGWSFSSPSWPNGKHFRAGDTLVFRYIPWIHNVVAVDEDGYNGCTTPPGSRTYTSGADSVTLARGDNFFICTRFGHCNLGMKLVVYAA

SEQ ID NO: 1663 - protein, 501 aa, Zea mays
  VARIANT 113: note = Ancestral polymorphism is P, Derived polymorphism is L
  VARIANT 155: note = Ancestral polymorphism is I, Derived polymorphism is T
  VARIANT 157: note = Ancestral polymorphism is C, Derived polymorphism is R
  VARIANT 160: note = Ancestral polymorphism is P, Derived polymorphism is S
  VARIANT 172: note = Ancestral polymorphism is F, Derived polymorphism is S
  VARIANT 384..501: note = Derived polymorphism lacks residues 384 to 501
MLPVLEVLCCAAAGRGGRGLVQPVLRRTLQTNPRLEGALEMLLVLEVLCCAAAGRGGVDWYSLCCCGRFRRTPDWRAPWRCSWCSRSSGGCPGDAPGARGAGGIHMTAYFTAPWAGGATSTSRRALRHRLGRRAGKHPPASLRFPDPCLVQLIRIECRVSEYGWTTQKVFQFLNFLVNGVRSVVFVLRRNVQLVEPEDMPGLAFFTTYALLVLFWAKIYYQARAMSTDWLRPTFYWINGVVYAIQEFVAHTLNVNCAKFGRRASRILITGGEDLKVNLWAIGKPGFTSPVESVSFDSSEVTIGAGAASGTIKIWNIEEAKVVRTFTGHKSSCASLDFHRFGEFLAIGSSDTNMKIWDTRQQRCIHTYKGHTQRINVLKFTPDGRWIVSGGADNSVKVWDLTAGKLMHDFCLHEGPVNCLVVHPYEFLLATGSVDKTVKFWDLETFELIGSAGHEILWRGYIKMVYYQGQAKMVIQLIRSAPSEQNNSRVICYTNGYMYQWD

SEQ ID NO: 1664 - protein, 351 aa, Zea mays
  VARIANT 131: note = Ancestral polymorphism is A, Derived polymorphism is T
  VARIANT 184: note = Ancestral polymorphism is G, Derived polymorphism is W
MGRRLDVLLGRTTKQTARLKSLLGLAATRLGVVRGHRQVRCGQARGDVEQLLRLGHADRALARAEHVVREQNALDVLAELEACCNLIAERAALVDDAHRGECPEELREAAAGLVYAAARCGDLPELQEVRAILAAKFGREFVSAASNLRSGCGVNPKIVQKLSTKQPSLESRQLVLQEIAADKGIAVRIYEPPPPYEDSGSSNHSHRKTEHDGERISRTPPVDGRDEDISGHSAQRYKDVEAAAQAAFESAASAAAAAKAAMELSRGEPRGPGDRRRAGRTQMDDPEIEKQDEVLHGNKPEKIGHGRNYSSDVEITPEDDEANHGNVAVDEPKQREPARGKPASVRTKWGF

SEQ ID NO: 1665 - protein, 185 aa, Zea mays
  VARIANT 28: note = Ancestral polymorphism is G, Derived polymorphism is D
  VARIANT 18: note = Ancestral polymorphism is R, Derived polymorphism is G
MSLLASPTPFGVTAIRRRVAPLPLLPAGGRAALHVALARRGGVSSRTQRRLEERGGKKRRGGVVAPDVDEDAAEAGVAEWEGEPLGFEVSTEPMPRLPDPETPDFWEGPQWEALGFFVQYMWAFGVVFGLIACGVAVATYNDGATDFKDTPAYKESQSQEFPEESESSSADVFEGNPTEVAPALE

SEQ ID NO: 1666 - protein, 235 aa, Zea mays
  VARIANT 214: note = Ancestral polymorphism is A, Derived polymorphism is T
  VARIANT 144: note = Ancestral polymorphism is A, Derived polymorphism is V
MLGFRQMPWSSAQEQEQAPSEQLCEGVSAVVAARQGMEKPLTAVAEAFEELARGMEADGGELRLAPFSDSCALVSVLFSSLGMAFRFAEIEYVTKVNDLIGAGKSYRTLSDILDKDIQNDCVKKQGSHSRNLRRVRLGLGLIKALFEQFLDTEGTLYDAATIAYGQVCAPFHSWAIRKAVGAGMYTLPTREQLIVRLNETDFSVQKEMRRYIDASSPIIEYIDNLFLSRNISLDW

SEQ ID NO: 1667 - protein, 310 aa, Zea mays
  VARIANT 55: note = Ancestral polymorphism is G, Derived polymorphism is S
  VARIANT 72: note = Ancestral polymorphism is A, Derived polymorphism is V
  VARIANT 112: note = Ancestral polymorphism is P, Derived polymorphism is R
  VARIANT 129: note = Ancestral polymorphism is N, Derived polymorphism is H
MRGSVILALLATASSSFFGATAAASEGWPTAAAIFSDPNNLTADWVGPEVCNYTSVYCAPLPSGPDRRGALAVAEVNLNHGDIVGFLPPELALLADLALLHLNSNRFCDVLPRALRRLRLLHELDLSNNRFVGPFPDVVLDLPALRFLDLRFNDFEGVVPPCLFDRLLDAIFLNHNRLRFQLPDNFGNSPASGVVLAHNAFGGCLPVSVANMSSTLKEILLINNGLSSYFLPEIGLLRELTVLYVSFNQLAGPLPLKLTLMRKLEQLDVAHNLLTGAVLPGICDLPRLKNFTLTYNFFTGEAPSCARLVA

SEQ ID NO: 1668 - protein, 392 aa, Zea mays
  VARIANT 306: note = Ancestral polymorphism is G, Derived polymorphism is D
  VARIANT 266: note = Ancestral polymorphism is G, Derived polymorphism is A
MAGDRLAREEAGMVEVGNAVVVVTAEVEVVVVKAATVAAEEEAEVAEVEMAAAAMVEVAKAGAVKEATAVVVMGAATVACVGRTARTRRCLAREEVVGQCEVLEARQVAYPRQYRAGEQVVRDVQLLQLPHQGELQRQRAGELVEADEVGGEAVVDEQDLLERAGHVGDADREATAEGVVREDNTRRRRVAEVVRELEAEAVVVEEDGIEQAIEEAGRDDALKVVEAEVQEAQRREVQDDVREWADKAVVAEVELVEEAEAAKRAGEDVAEAVGVEVEQGKVGEEGELRREEAHDVAMVEVDLGDGERTAAVGAGGERRAIDARVVAHLRAYPIGGEVVGVGEDGLPLSRPAGAGLGTAMTGPPPPPPSATPQKPRPSRRRRRRRQWQGAPE

SEQ ID NO: 1669 - protein, 111 aa, Zea mays
  VARIANT 50: note = Ancestral polymorphism is T, Derived polymorphism is I
MGNFLFCLMGDMSYTLHHHEVVGKHLSIVQVNEKTSIARIYLANALHMIIEMTDEQMIAFIVHRVTASAVFLTAFPSLPRKYVKALLHTWARGRGAMPLVSFMFLRDLSFK

SEQ ID NO: 1670 - protein, 366 aa, Zea mays
  VARIANT 319: note = Ancestral polymorphism is I, Derived polymorphism is T
  VARIANT 298: note = Ancestral polymorphism is D, Derived polymorphism is Y
  VARIANT 95: note = Ancestral polymorphism is P, Derived polymorphism is S
MPPTPNPKNLAASLPILTLGGGASGGGRPPSKFESATVDLPTSVILLAAVDRGSDEMAPPDPEDGSREEKRTKASKLQEQGEGEEEATGLPSDVPRGHFAVYVGERRRRFVVPITLLDRPEFRYLLRRAKEEFGFTSAGGALVLPCEEVAFCSLTSALACARPRPAPPSDRDPLGTSDITAEETAAWFPDTLDDPLEKDLYTQLWYSTIADAAPQHEGTFPGPTSHPSPPLPPVGSSNVESSWAGDICSTFCDNNQVPRTSTGIRGKDAALQSNVPSGAGAHDGTSSSEKKGPNQRKDACVARADPTLQQGRLIHVMHIFLSGASPLNTEIQTNKASILDETIEYLKSLQMQVQVSSYYLNLHDPI

SEQ ID NO: 1671 - protein, 220 aa, Zea mays
  VARIANT 17: note = Ancestral polymorphism is D, Derived polymorphism is Y
  VARIANT 56: note = Ancestral polymorphism is A, Derived polymorphism is S
  VARIANT 87: note = Ancestral polymorphism is P, Derived polymorphism is R
MATPTSSGDGSPPGSSDLMIVAALAALAEENGSSQAAIARRIEAEARGDLPASHPALVAAHLSRMSAAGELVAVAGGKYALPPPVPPPPESPADDEEDDYADDEEEEEEAPEPEPLPQPPAKRGRGRPPKPRPTGFPAGVPGAAGPGPIGVPGAAAAAAAPRRRGRPPKPRDPHAPPKIPRPRGRPRKNPLPEGMAPRPRPGAPASAKAARPQFAEVGFV

SEQ ID NO: 1672 - protein, 528 aa, Zea mays
  VARIANT 77: note = Ancestral polymorphism is R, Derived polymorphism is C
MRAPPSAGGFNSPWTLAIRAAADQGRPRRAIALYLASLRSSCRPCPFALAAVLKSVPRLPEHAVLPAAASLHAHLLRLGLLSHPYPHAALSHLYSHLLPPHHNHARGLLDDAPTPLNRHSLVSSNSLLASLLRAGDIPAARAMFEAMPARDVVSWNSMVAGLAKAGHLDEAIEMFDQMPETNVASWNALVSGFMAQGHLAQAQELFERMPTRNNVSWITMISGYAKAGDVQAAANLFDRMGSKDLYAWNAMISCYAQNGCAREALGIFNRMLKPHIWVVPNEKTFSSVISACSQLGDLRFGLWVENFMGYVGVDLDDHLRTALVDLYTKSGRMDRAFDLFRGLRSRDVVSYSAMIVGCGMHGKLNEAVGLFKEMSKARIDPNAVTFVGLLSAYSHAGLLEEARACFTSMTSRYRINPSMEHYTIMVDILGRCGKLEEAFQLVMQIPVCPDASVWGALLLACRLHNNIELGEVVASKCFELEPQESGYYILLGNIYAQAKKWDKVKGLRKMMAERGLSKTPGSSWVHVA

SEQ ID NO: 1673 - protein, 125 aa, Zea mays
  VARIANT 101: note = Ancestral polymorphism is C, Derived polymorphism is Y
  VARIANT 68: note = Ancestral polymorphism is R, Derived polymorphism is H
  VARIANT 67: note = Ancestral polymorphism is V, Derived polymorphism is L
  VARIANT 60..125: note = Derived polymorphism lacks residues 60 to 125
  VARIANT 58: note = Ancestral polymorphism is S, Derived polymorphism is F
MTKIAVDGLGKNGFINYYGLQFGSGSIPTHLVGAALLRGEWKEFVFSLASFCLNITKFVQRDDINELRKHYKEHGDIDMALRNFPRHLVAERAILQCLKKCPGNHLQALKGIPRTLRMMYVAFFI

SEQ ID NO: 1674 - protein, 105 aa, Zea mays
  VARIANT 10: note = Ancestral polymorphism is G, Derived polymorphism is D
  VARIANT 24: note = Ancestral polymorphism is N, Derived polymorphism is I
  VARIANT 34..105: note = Derived polymorphism lacks residues 34 to 105
  VARIANT 50: note = Ancestral polymorphism is S, Derived polymorphism is N
MKIIEDDGPGAAFYASAKAMTNGNHTFYVSKLIQRLARLSKYDTMYHMHSITSSASWEKILLSGFRGCCTQLLMKGFAGVATKIHAKSSMVAGEAGTHFLALYHQ

SEQ ID NO: 1675 - protein, 557 aa, Zea mays
  VARIANT 62: note = Ancestral polymorphism is G, Derived polymorphism is D
MPFRPSLPCRCPFDRKLTSFLSAVASLADSRSRSPFPPAGAVPATLTPTAYNALMSAYSRAGRHDEVLRLFFSLPFAPTAPLFTTLISSLAASGSKSAALDAFSLLASGIGPTTSAFTALLKSIDAASSESVYRAFFATMAAMECAPDAATYNCLIWILCDSQRLDEAWGVLDSMLEVGVCPTVRSYTAILHGYCKQGRVLEAERLLDTMIQVGCAPDVISYSVLIQGLCRVGEFGKVERILGESEAKGWTPNAVTYNIYMSALCRMGFLDEAFRQVDVMHSRGVYMTIETVNILFDCLCRGSMFSEALTLLECSEELNWDVDVFCYNTMMSRLCDTGDIARVLKLLVDLVKKGIGPDMFSFTIAIRSLCRAGKFKVAKCLLDNKGIEYDVVAFNTLIHGLCMAGELHEMLQTYMDMTSRNVFPNNFTIGMVIDSFCKNREFGAAIKVFLEYSEGCLVPDHFFRLNTWLVKAKGWEYLLTLLRTMRSKGLVLDVCLFNSLVRMFCCEGLGGAKLWLYVAQLFKQSKQDYRDEPKVIFSLTAHAPIPSPSIRQCDFES

SEQ ID NO: 1676 - protein, 110 aa, Zea mays
  VARIANT 81: note = Ancestral polymorphism is G, Derived polymorphism is R
  VARIANT 64: note = Ancestral polymorphism is R, Derived polymorphism is S
  VARIANT 49..110: note = Derived polymorphism lacks residues 49 to 110
  VARIANT 46: note = Ancestral polymorphism is R, Derived polymorphism is H
  VARIANT 38: note = Ancestral polymorphism is R, Derived polymorphism is H
  VARIANT 20: note = Ancestral polymorphism is A, Derived polymorphism is V
MWSPVLAPPSHLLPLSLLTAVLPAATLWPFLDIVCSGHRHLRLARRAPRSRTQTRAGFTIDFWRRQRDWELEHGEFGQLLGRRLQVEARSEWSGRRGFVSPFRYIRFGST

SEQ ID NO: 1677 - protein, 630 aa, Zea mays
  VARIANT 211: note = Ancestral polymorphism is L, Derived polymorphism is S
MLAVSSGAVAHTGSMVAVPAREVLAVQMELTAADMGTGPGTVCAKVGPVGCAVDAPVVQQPQMDGHGGPMWTRILKIFKWGPDAEKALEVLMLRVDHWLVREVMKTDVGVNVKMQFFRWAAKRRNYEHDTSTYMALIHCLEVVEQYGEMWKMIQEMVRNPICVVTPTELSDVVRMLGNAKMVRQAITIFYQIKTRKCQPIAQAYNSMIIMLMHEGQYEKVHQLYNEMSTEGHCFPDTVTYSALISAFCKLGRRDSAIQLLNEMKEIGMQPTTKIYTMLIALFFKFNDAHGALSLFEEMRHQYCRPDVFTYTELIRGLGKAGRIDEAYHFFCEMQREGCRPDTVFMNNMINFLGKAGRLDDAMKLFQEMETLRCIPSVVTYNTIIKALFESKSRASEVPSWFERMKESGISPSSFTYSILIDGFCKTNRMEKAMMLLEEMDEKGFPPCPAAYCSLIDALGKAKRYDLACELFQELKENCGSSSARVYAVMIKHLGKAGRLDDAINMFDEMNKLGCAPDVYAYNALMSGLARTGMLDEALSTMRRMQEHGCIPDINSYNIILNGLAKTGGPHRAMEMLSNMKQSTVRPDVVSYNTVLGALSHAGMFEEASKLMKEMNTLGFEFVRIIVYFEE

SEQ ID NO: 1678 - protein, 348 aa, Zea mays
  VARIANT 277: note = Ancestral polymorphism is R, Derived polymorphism is W
MAPAGNGADDHELPLFHPSPCAHYYVQSPSAASHTLSHPASDSMALILSPFPNLHHDADARHSSDGRDHEHDHEEASRLTLSRYSSSRGSNSSFPVGDKKPGRRRHALSGRSSGRHDDGDDDADGEAQRSGAWRYVKLDPEAPCCCIAFQVAWRVAASAALALLVFVLATRPRHPRVSFRVGKVQRFALGEGLDGSGVETSFLNCNSSVDMAVENHSKVFTLRVGPPRLEMSFGRFVFATSQARLGDGWSHDVGPRGTSTVRLFVAAQDKPMYAAGRGMQDLLESSHGLPLTVTVRARSRYRVVGSLVRLTYRHDSECVVLLRRTPDRSNGIRAAAGSRATTTCSALS

SEQ ID NO: 1679 - protein, 648 aa, Zea mays
  VARIANT 16..648: note = Derived polymorphism lacks residues 16 to 648
  VARIANT 585..648: note = Derived polymorphism lacks residues 585 to 648
MIHPLVLSLPFPAIISRPRRHRHHTTTPSLPSHSRSLHHYRLLRFTPLVASCGDRRRIVRGASATMGLFTVTKKATTPFEGQKPGTSGLRKKVTVFQQPHYLQNFVQSTFNALPADQVKGATIVVSGDGRYFSKDAVQIITKMAAANGVRRVWVGQNSLMSTPAVSAVIRERIGADGSKATGAFILTASHNPGGPTEDFGIKYNMGNGGPAPESVTDKIFSNTTTISEYLISEDLPDVDISVVGVTSFSGPEGPFDVDVFDSSVNYIKLMKTIFDFEAIKKLLTSPKFTFCYDALHGVAGAYAKHIFVEELGADESSLLNCVPKEDFGGGHPDPNLTYAKELVERMGLGKSSSNVEPPEFGAAADGDADRNMILGKRFFVTPSDSVAIIAANAVQSIPYFASGLKGVARSMPTSAALDVVAKNLNLKFFEVPTGWKFFGNLMDAGMCSICGEESFGTGSDHIREKDGIWAVLAWLSIIAFKNKDNLGGDKLVTVEDIVRQHWATYGRHYYTRYDYENVDAGAAKELMANLVSMQSSLSDVNKLIKEIRSDVSEVVAADEFEYKDPVDGSVSKHQGIRYLFGDGSRLVFRLSGTGSVGATIRVYIEQYEKDSSKTGRDSQEALAPLVDVALKLSKMQEYTGRSAPTVIT

SEQ ID NO: 1680 - protein, 369 aa, Zea mays
  VARIANT 161: note = Ancestral polymorphism is A, Derived polymorphism is V
  VARIANT 140: note = Ancestral polymorphism is N, Derived polymorphism is K
MALLSDLINLDLSGRTGKIIAEYIWVGGSGMDVRSKARTLSGPVDDPSKLPKWNFDGSSTGQAPGDDSEVILCPRAIFRDPFRKGQNILVMCDCYEPNGEPIPSNKRHGAAKIFSHPDVKAEEPWFGIEQEYTLLQKDTKWPLGWPLGGYPGPQGPYYCAVGADKSYGRDIVDAHYKACLYAGIDISGINGEVMPGQWEFQVGPAVGVSAGDQLWVARYILERITEIAGVVVSFDPKPIPGDWNGAGAHTNYSTKSMRSDGGYEVIKKAIGKLGLRHREHIAAYGDGNERRLTGRHETADINTFVWGVANRGASVRVGRDTEKEGKGYFEDRRPASNMDPYVVTSLIAETTMLWEPSHSNGDGKGAAAP

SEQ ID NO: 1681 - protein, 585 aa, Zea mays
  VARIANT 484..585: note = Derived polymorphism lacks residues 484 to 585
  VARIANT 481: note = Ancestral polymorphism is R, Derived polymorphism is I
  VARIANT 404: note = Ancestral polymorphism is A, Derived polymorphism is V
  VARIANT 399: note = Ancestral polymorphism is A, Derived polymorphism is V
  VARIANT 381..585: note = Derived polymorphism lacks residues 381 to 585
  VARIANT 380: note = Ancestral polymorphism is W, Derived polymorphism is L
  VARIANT 240..585: note = Derived polymorphism lacks residues 240 to 585
MEGLATVLLLYALLVLALESPLVSTSPFGGAAGGTARKLHLSFGAGERAAPARPASASVPGASAHGQDHRLSRFATGLDVRLLDSARSGALRRSIADAVAAGARAFSDLEALDPAVVAAPSGESDAARCPHSIALTAEELGARGRVVELPCGLALGSHITVAATPRAPHEERNPAIVVLRDGERHAMVSQFMVELQGLRAVDGEDPPRVLHFNPRLRGDWSGHPVIERNTCYRMSWGAVQRCDGWRSRPDEETVDGLVKCEKWIRDDDDRLEKSKTTSKTAWWLNRLIGQKEEVNFGWPFPFVEGRLFVLTLSAGLEGYHVSVDGRHVTSFPYRTGFVLEDATGLSLNGDLDVHSVIAGSLPTTHPSFVPQNYLEFSTVWQAPLLPDEPVEIFIGILSAANHFAERMGVRKTWMSVVHKSPNMVARFFVALHGRTEVNAELKKEAEFFRDIVFVPFLDNYDLVVMKTLAICEYGVVTLWYRAPEILLGERQYSMPVDVWVLGTPNEQSWPGVTSLPDFKSAFPKCQSQDLAAVVPNLEPAGLDLLSPIYVFIAHGQKMLRYEPSKRITARQALEHDYFKDLEMVQ

SEQ ID NO: 1682 - protein, 226 aa, Zea mays
  VARIANT 83: note = Ancestral polymorphism is G, Derived polymorphism is R
MGLCASVLQWTAKRRRQRQRQRQQQQPEPRRSTPKALYVVRNGAGQPSRPEALVVYGPPHGSGGSGLQSQKAGDGEAGSRKRGHECYDCMDVLGRRLHAPPPRLPCGSTRSVATVEPVVTAGTMPAPVSGPRGGATADGKKAAPAAEGCRTPMTPRRTPVWQRRILMGTRCELPRFSGVILYDEHGRPLQSSSQNRAGHLTSRASRHETKGKKKAARTTTTLRDLL

SEQ ID NO: 1683 - protein, 333 aa, Zea mays
  VARIANT 89: note = Ancestral polymorphism is L, Derived polymorphism is P
  VARIANT 141: note = Ancestral polymorphism is S, Derived polymorphism is R
MALARAKRLPPLHLSLNVPTRPAVQEPPSRQQANPPLAGPQSASTPLARSSQFRLADFDRLAVLGRGNGGTVYKVRHRETCALYALKVLHQGDAAATEADILGRTASPFVVRCHSVLPAGSGDVALLLELADGGSLDAVRRRRGAFAEAALAEVAAQALSGLAYLHARRIVHLDVKPANLLATAAGEVKVADFGIARVLSRAGDLCTSYVGTAAYMSPERFDPDAHGGHYDPCGADVWSLGVTVLELLMGRYPLLPAGQQPNWAALMCAICFGEPPALPDGAASPELRSFIAACLQKDYRRRASVAELLAHPFVAERDVLASRRSLQQLVAEV

SEQ ID NO: 1684 - protein, 981 aa, Zea mays
  VARIANT 32: note = Ancestral polymorphism is S, Derived polymorphism is N
MEVPPEMLDALAGWFGQSLSPDAAVRRAAEQSISSATSSPGFALALLGLAASPRHDLQARLAASVHFKNLLRRRWPKPDADADADADYLPASDCAIIKAHLLQLLLTAPPLIQAQLSEALAAAAASDFPARWESLLPSIVSSLGSAVNAGDIAATNSLLTAVVSLFSRFRNAFDNNALRLDLKYCLDIFAAPLLEVFLFASRRLQATATTANPLELRPVFECLRLCCEIFYSLNSIDLPEFFEDNMRQWMTEFRTFVTTSYSPPVEADGAPDALRAAVCDNLQLYMEKYEEEFRGYLKEFVEAVWGLLMAQTTSPSRAQLAVTAIRFLTTVAESVHHALFGSPEAMKQICDSVVVPNLRLRDEDEELFECNWVEYVRRDSEGSDADTLRRAACRLLRGLAANYREQVAALVSAQVQQMLAAYAANRANNWKEKDAAIYLVIALMQKPGATGGGTAVVDMESFFTSVIVPELQAPDWQSEPMLKATVLRFLKEFRDQIPKATALALLPSVVRFLTHESNVVHSYAATFIENLLIIKDAIPVPGVTTVTRSPRFVAADINPFAPQIIQNLSTALGFPDSYENPYLMKCLMRVLGIANIAGQIVHEITARLVGILMEVCNNPKNPDFNHYLFEALAAVIGRTGEQDPALLPAFEASLFPVLQRILVEDISEFWPYAFQIFAQLVNLSRPPLSQNYMQLFGVLLSNATWDRPPCVPALVRLLRAFLRKIPNELNQEGRLPNILAISRSLLSRSSTEDSAFYMLNTIVENVGFDILNPYITEIWSALFTRLQTRQAVKYVNSLVVFMSLVLVKYGSSVLVSSVDSIQPNLFTQILQRFWIPNLKLIKGALEVKLTAVASTKLLCESAVLLDAAAAQLWGKLLDSIVTLLSRTNQDGTQEQNDGTDAVDIQKTSSYSVSFVRLQYAGKSEDDLLKEVNDPKQFVVTSLATLSAQFPGRFGLVIEQHVDPANKSVLLQLCAAYSANIV

SEQ ID NO: 1685 - protein, 626 aa, Zea mays
  VARIANT 298..626: note = Derived polymorphism lacks residues 298 to 626
  VARIANT 333..626: note = Derived polymorphism lacks residues 333 to 626
MSARRAAKSQHAAATPRIINFNLARRSGGGRPSRAAGRAQPRPPAPPAGPVNLGALFEMERRARGLESAPASPPCSRAVLRSQEDAEEQEEKWRFQAEILRAECNFLRMEREVALRKLDRHRGQMEAALKSAVETLVSGRKKIDGKGDVGLAATLDEGIEDLEEMMEELRVEESGRRAMSGVRELQRSHGRNFDRQASSLRRRLEKMTPADPEPCIKDIREIALPVPAPPPPPAERSDDDERVHGANTPDVEMLRMKMEGMSKGMRERMAEYSRRLEAVASGDNTGCESGKCGNRHSRKASASSQRSWSGGSTASNGNAPSTLDAGPHGRSRQNVAAEKRQQQQTCWSLDLKNGDAVTVAAPYCFGMNDSLSMGNFEYTCPKNNLPCTLETARSIWGPSMTFRIGDVAPTTRKAKLFLVGLKGLGQARLRKVLAITVPFFQQIMAGECKLVGSASCCHCREIVWKVMEQVKAESDQWTEMQEMLEQVRLEMQELQASRDAWQHRAMASDISLRSLNSQVLEWKNRAQASEQRVEELHREILELESKLHTFKAHLPAPAAIPNQKQWSDACKMEYPRAKPQHPRSQESGKEEIKKHVLICRVKRSPSSVLSKRSPFQEIGNISLPRH

SEQ ID NO: 1686 - protein, 329 aa, Zea mays
  VARIANT 47: note = Ancestral polymorphism is S, Derived polymorphism is L
  VARIANT 53: note = Ancestral polymorphism is A, Derived polymorphism is V
  VARIANT 79: note = Ancestral polymorphism is V, Derived polymorphism is L
  VARIANT 88: note = Ancestral polymorphism is E, Derived polymorphism is K
MALTVRERRLPQLHISLDVPSCAFRHPNPPAAASASAPRASGEFRLSEFDRLAVLGRGNGGTVYKVAHRRTSALYALKVLHRGDPAAEVDALRRAGSSPHVVRCHSVLLAPAAAPGDVALLLELVDGGGSLDAVAARRGAFPEAALAEVAAQALSGLAHLHGRRVVHRDVKPANVLVGAAGDVKIADLGIARVLPRAGDRCDAVAYEGTAAYMSPERFDTERHGHADPRSADVWGLGVTVLELFMGRYPLLPAGQKPSWAALMCAICFGELPSMPDGAASPELRAFVAACLQKDYTKRASVAQLLAHPFVARRDVAASKDALRRLVAGA

SEQ ID NO: 1687 - protein, 283 aa, Zea mays
  VARIANT 32: note = Ancestral polymorphism is Y, Derived polymorphism is H
MEVKTVKVSNLSLNALKREITEFFSFSGDIEYVEMQSESEWSQLAYVTFKDSQGADTAVLLSGATIVDRAVIITPAENYQLPPEAHKQLSGANVSTESAVRKAEDVVSSMLAKGFVLSKDALNLARSFDERHNILSNATATVASLDRQYGLSEKISLGRAIVGSKVKEVDERYQVSELTKSALAAAEQKASVAGSAILSNQYVSAGASWLTSAFDMVTKAAGDMTSMAKDKVERAEEERKAIMWEERSGLVSEYAKIHLDEPSSWEPAVLPLESVDEQKLQAV

SEQ ID NO: 1688 - protein, 199 aa, Zea mays
  VARIANT 119..199: note = Derived polymorphism lacks residues 119 to 199
  VARIANT 114: note = Ancestral polymorphism is P, Derived polymorphism is L
  VARIANT 111..199: note = Derived polymorphism lacks residues 111 to 199
  VARIANT 33: note = Ancestral polymorphism is S, Derived polymorphism is F
MPSTAPTPDQSDPKTRIHNLSRCYHRGFLLYPSLASPSQEYLNSASRPPPSLVSAMVKYSTEPTNPTKSAKAMGRDLHVHFKNTRETAFALRKLSLTKAKSYLEDVIAHKQAIPFRRYCGGVGRTAQAKSRHSNGQGRWPVKSARFILDLLKNAESNAEVCNSSLRSYMSSPCHIELILSEKEEPVKKEAESQIATRKA

SEQ ID NO: 1689 - protein, 74 aa, Zea mays
  VARIANT 39: note = Ancestral polymorphism is A, Derived polymorphism is V
  VARIANT 20: note = Ancestral polymorphism is L, Derived polymorphism is M
  VARIANT 17: note = Ancestral polymorphism is A, Derived polymorphism is V
  VARIANT 16: note = Ancestral polymorphism is V, Derived polymorphism is M
  VARIANT 3: note = Ancestral polymorphism is R, Derived polymorphism is S
MRRAHLPASAQRRPTVALLLGLVLALCLTVLSIQSSFSAAPGAPGRRLDLDADDVRELAGFQSRVQQCVLSGCQ

SEQ ID NO: 1690 - protein, 631 aa, Zea mays
  VARIANT 461: note = Ancestral polymorphism is W, Derived polymorphism is S
  VARIANT 412: note = Ancestral polymorphism is T, Derived polymorphism is I
  VARIANT 228: note = Ancestral polymorphism is T, Derived polymorphism is I
  VARIANT 215: note = Ancestral polymorphism is T, Derived polymorphism is I
  VARIANT 167: note = Ancestral polymorphism is T, Derived polymorphism is I
  VARIANT 138: note = Ancestral polymorphism is P, Derived polymorphism is S
  VARIANT 136..631: note = Derived polymorphism lacks residues 136 to 631
  VARIANT 4: note = Ancestral polymorphism is A, Derived polymorphism is D
MRIAFLVLLVLSLFLLPNGIGKSLAARPSVVNIRSILQLNSTTGGVSDVAIRAAVEDINLDPTVLNGTTLQVQTRDTNCNDGFLGMVQALQFMETDVIAIIRPQCSPIAHIISYVANELQVPLMSFASDATLSSIQFPFFVRTMPSDLYQMAAVAAVIDYYQWKIVTAIYVDDDYGRNGIAALDDELTARRCKISFKIGFRSNAKKSDLLNLLVTVSNMESRVIILHTGSEPGLKLLSLANGLKMMGNSYVWIATDWLFAYLDANSSVSAETINAMQGVLTIRPHTPKSKVKSNLVSKWSSLSKKYYHSDLRTSAYGFYVYDSVWTVARALDAFFEDGGRISFTNDSRLRDETRGTLHLEAMSVFDMGNKLLNKIRNVNFTGVSGQVQFNAQFELIHPAYDIISIIGNGMRIIGFWSNYTRLLSTVLPEDLYSKPPNTSLANQQLYDVIWPGETAQRPRGWAFPSNAKELKISVPNRFSFKDFVSKDNATGSMKGYCIDVFTQALALLPYPVTYRFIPFGNGTENPHYSQLVQMVVDNDFDAVIGDIVITMSRTKAIDFTQPFIESGLVILSPIKKHITNSWAFLHPFTLGMWCVTGLSFLVVGVVIRILEHRINNDFRGSPRQQIITIVW

SEQ ID NO: 1691 - protein, 150 aa, Zea mays
  VARIANT 11: note = Ancestral polymorphism is P, Derived polymorphism is A
  VARIANT 19: note = Ancestral polymorphism is L, Derived polymorphism is M
MSRPVHGLLLPLLFAVCLMIPLKPRAPYVAVRAASLYVLVYGQTGALDDVQITVRVEARNGNTHSAAYFSRLECRLAFAGATLAVLRAYPFRVPAKGVLPLAYVARAEGAPLGDAGSVAMEAALRDGVVPFRVEGEARMRWKVAGIVGVD

SEQ ID NO: 1692 - protein, 995 aa, Zea mays
  VARIANT 195..995: note = Derived polymorphism lacks residues 195 to 995
  VARIANT 170..995: note = Derived polymorphism lacks residues 170 to 995
MVHSAYDAVELVADVPGHIEAVASHAGKLLVAVSDTEGFLWGSDCSLRIYSAPSPSDGGGEIRWDGPYALERQEPRFWRRPPLAMEVSASRDLLISLSEWIALHRLPGLETVAVVSSKTKGANVFAWDERRGFLAVGRQKRLTVFRLDSGREFVEVKEFGVPDILKSMAWCGDNICLGIRREYMIINSMTGALTEVFSSGRIAPPLVVPLLTGELILGKDNIGVFVDQNGKLIQDGRIIWSDTPASVVIHKPYAVARLPRHVEIRSLRPPNALVQTVVLRDVQKLVQTDHCILAALSNSVHGLLPVPIGAQIVQLTASGEFEEALALCKLLPPEDSNLRAAKESSIHIRYGHFLFDNGSYEEAMEQFSDSHVDITYVLSLYPSIVLPQTNIIGDHDKLLDMPELARESSDVTDEMESYSLQLQEPDDKSPLEVKKMSHNALAALVKYLQKKRSGIIERATAEVTEEVVSGAVHHSLKLSEPYKSKKLSKKRAQTHTSSIAREMATVLDTCLLQALILTGQSSGAIELLKGLNYCDLKICEEFLKERREYMVLLELYKSNEMHRDALQLLNQLVEESKSEMENTYFNKKFNSQMILEYLRPLCRSDPMLVLESSLYVLERNPSETIELFLSENVPADLVNSYLKQHAPNLQSTYLELMLSMNDTGINPNLQNELVQLYLSEVLDWYKILKEEGNWTEKTYSPTRKKLISTLESNSGYNTDALLKRLPQDALFEERAILYGKINQHLRALSLYVHKLQMPERAVAYCDRVYEEREQQPSKSNIYFNLLQIHLNPRKAEKEFEQKIIPVASQYSGIQKASATKPKGGRVGKKVVEIEGADDIRFSPSGTDSGRSDGDGDDVNDRGPIMLNEALELLSQRWDRINGAQALRLLPRDTKLQDLVSFLEPLLRNSSEHRRNYLVIKNLILRANLQVKEDLYNRCQAVVKIDGDSTCSLCHKRVANSAFAIYPNGQALVHFVCFKESQQIKAVRGANSVKRR

SEQ ID NO: 1693 - protein, 997 aa, Zea mays
  VARIANT 90..997: note = Derived polymorphism lacks residues 90 to 997
MGVGGGGGGGGEAAAVSAPAPAEEAGKDAEDGSGWTLKAKLIAVAVLVWVLGALALGVFLHSYFRHAALRKAEEGLVSMCEERARMLQDQFAVSVNHVHALAILVATFHYEKRPPALDQNTFADYTARTSFERPLLSGVAYAQRVVHGDRESFERQQGWIIKTMKHEPSPVQDEYAPVVYSQETVSYIEGLDMMSGEEDRENILRSRASGKAVLTRPFRLMSNHLGVVLTFPVYHVDLSSDAKEEDRVAATAGYLGGSFDVESLVENLLRQLAGNQELVVNVYDVTNSSNPLVMYGSEVSLGNPSPSHICMLDFGDPFRKHHMVCRYRNKPQLPWSAISSSSGVFVICMLVGYIVGAAWSRYDNVKEDCRKMEELKKQAEAADVAKSQFLATVSHEIRTPMNGVLGMLDMLLDTDLTSTQRDFAQTAQVCGKALISLINEVLDRAKIEAGKLDLESVPFDLRSILDDVISLFSSKSREKGIELAVYVSERVPELLLGDPGRFRQIITNLVGNSIKFTERGHIFVQVHLADHSNLATEPKVESVANGMNGHKDEKTAVATSVSLNTLSGFEAADSRNSWENFKLLLSYEKNEMPYESVSDKVTLVVSVEDTGIGIPLDAQAKVFTPFMQADSSTSRTYGGTGIGLSISKCLVELMGGQINFVSRPHVGSTFTFTAALQRCDRSAIGDSKPVMLHPLPSSFKGLSALLVDRRPVRATVTKYHLQRLGIACDVVATIELALGVLSGRNGSSLTSTKQPCMLLIESDSWGFKIDVPLRSRLLEMKQNGPPGLPKTILLAAAESGKLKAHYAVDSVITKPLKASGLAACLFQTLGITQSSNERRDNSGSLHGLLLGKNILVVDDNKVNLRVAAGTLKKFGAKVECVESGKDALASLQVPHKFHLCLMDIQMPEMDGFEATKQIRAMEAKANEQAVACDDSETDGATRAARWHLPVLAMTADVIQATHEECTKYGMDGYVTKPFEEKQLFQALQKFLDPGMSS

SEQ ID NO: 1694 - protein, 276 aa, Zea mays
  VARIANT 157: note = Ancestral polymorphism is N, Derived polymorphism is S
  VARIANT 127: note = Ancestral polymorphism is L, Derived polymorphism is P
MAYAARLVAKVHLAATPQAEPRHLSSFRVGALSRSTTVQRQKFVAKSAISAVESGDTFVGVKQNTRPIIVIDNYDSFTYNLCQYMGEVGANFEVYRNDEITVEEIKKLFVACSTGFLLEEYLFPQALALLKIQEYPCKQLQSLGPQYRCLGFAWVYSALERHLEVVRSPYGVVHGKGSLVHYDEKLDGTLFYDIPNPFQAGRYHSLVIEKDSFPHDTLEIVAWTDDGLIMAARHRIYKHIQGVQFHPESIITTEGRLMVNNFIKIIEGYEASNCSP

SEQ ID NO: 1695 - protein, 377 aa, Zea mays
  VARIANT 54: note = Ancestral polymorphism is A, Derived polymorphism is S
  VARIANT 105: note = Ancestral polymorphism is V, Derived polymorphism is A
  VARIANT 137: note = Ancestral polymorphism is A, Derived polymorphism is S
  VARIANT 212: note = Ancestral polymorphism is R, Derived polymorphism is S
  VARIANT 256: note = Ancestral polymorphism is R, Derived polymorphism is S
  VARIANT 314: note = Ancestral polymorphism is R, Derived polymorphism is S
MADAEDIQPLVCDNGTGMVKAGFAGDDAPRAVFPSIVGRPRHTGVMVGMGQKDAYVGDEAQSKRGILTLKYPIEHGIVSNWDDMEKIWHHTFYNELRVAPEEHPVLLTEAPLNPKANREKMTQIMFETFNTPAMYVAIQAVLSLYASGRTTGIVLDSGDGVSHTVPIYEGYALPHAILRLDLAGRDLTDYLMKILTERGYSFTTTAEREIVRDMKEKLAYIALDYDQEMETAKTSSSVEKSYELPDGQVITIGAERFRCPEVLFQPSFIGMEAAGIHETTYNSIMKCDVDIRKDLYGNIVLSGGTTMFPGIADRMSKEITALAPSSMKIKVVAPPERKYSVWIGGSILASLSTFQQMWIAKAEYDESGPSIVHRKCF

SEQ ID NO: 1696 - protein, 124 aa, Zea mays
  VARIANT 7: note = Ancestral polymorphism is A, Derived polymorphism is S
  VARIANT 22: note = Ancestral polymorphism is A, Derived polymorphism is G
  VARIANT 41: note = Ancestral polymorphism is N, Derived polymorphism is S
  VARIANT 51: note = Ancestral polymorphism is D, Derived polymorphism is E
  VARIANT 87: note = Ancestral polymorphism is A, Derived polymorphism is T
  VARIANT 94: note = Ancestral polymorphism is G, Derived polymorphism is A
MATKSIASLLAVALLLLLSSPAAVVVVRAQQQQRGNPCPTNAVADLKVCADVLVLLKLKINVPQSQRCCPLLGSLVNLDLAACLCATIRLNVLGIPVNLPLDVPLVLNYCGRNASAVPGSNCSF

SEQ ID NO: 1697 - protein, 1158 aa, Zea mays
  VARIANT 783..1158: note = Derived polymorphism lacks residues 783 to 1158
  VARIANT 541..1158: note = Derived polymorphism lacks residues 541 to 1158
  VARIANT 459..1158: note = Derived polymorphism lacks residues 459 to 1158
  VARIANT 431..1158: note = Derived polymorphism lacks residues 431 to 1158
  VARIANT 49..1158: note = Ancestral polymorphism lacks residues 49 to 1158
MPLRRFLSPRVSGASDSAGLGAGLRRVLPSAPLRHHCKRFRVLASGWGYLILEGNMSENIDLVLEFLRKNRFAKAEAALRGELTGRADSNDMATQRRVAELKEGEEQQEGLVGSNVGPKGAAAARSADSSREFIVKEIDVGALPNGSDGKKGSGIGQPQDNVGDLYPWTFSIANSTAEQLAELLVSEEVPRHRRGAVLAEKRDRGVGTEQPGPVLEQKVSFGRGKGKVDAAGRTENSEQCHFRDKSLVPEKEEMLNGCTVKTVLPFPTENPSSSYNSTHHENERKEVKRSSNADGVGKGAKGHLDEGNRQYYFEKSLDTDLVSDRCFDLQLVGDSQREELPKLPPVRLKSEDKLVNMNWEEKINHHGSGAKQSSADHAFMIGSYLDVPIGQEITSSGGRRTIGSSWLSVSQGIAEDTSDLVSGFATLADDSLEYPIGEYWDSDEYDDDDDVGYTRQPIEDETWFLAHEIDYPSDNEKATGHTRGNDRHDRPTKDEDDDQSFVEEDSYISGEQYFHGKNIAQIGTSEGPMVHGIPDNDMIAQYDGQLLDSEELNLMHSEPAWQGFVSQNSELGMLGNGKFLNDSERPHPDDLFVEDDQHGSVRSIGVGISSDAADIGSEVRESLIGGSSEGDIEYFNESSLSVSGKRHPHQDTEKKRVGAKGVKHDQIIYAADIQKGNLPPGAADVGFSFPPPLHSGKNHESDAKSLWSKKDEMYCINDPDDCQNGMVSDDMLATWRKKNSESSLRSSRDEMTSDVVRSRNSSASYDETEDTSNARHHKLDDAQEEDTGTNLDDEEAAALQEQVRQIKAQEEEFETFNLKIVHRKNRTGFEEDKNFHVVLNSVIAGRYHVSEYLGSAAFSKAIQAHDLHTGMDVCVKIIKNNKDFFDQSLDEIKLLKYVNKHDPADKYHLLRLYDYFYYREHLLIVCELLKANLYEFQKFNRESGGEVYFTMPRLQSIAIQCLEALQFLHGLGLIHCDLKPENILVKSYSRCEIKVIDLGSSCFETDHLCSYVQSRSYRAPEVILGLPYDKKIDVWSLGCILAELCTGNVLFQNDSPATLLARVMGIIGSIEQAMLAQGRDTYKYFTKNHMLYERNQESNRLEYLIPKKTSLRHRLPMADQGFIEFVAYLLEVNPKKRPSASEALKHPWLSFPYEPISS

SEQ ID NO: 1698 - protein, 452 aa, Zea mays
  VARIANT 40: note = Ancestral polymorphism is L, Derived polymorphism is F
  VARIANT 99: note = Ancestral polymorphism is V, Derived polymorphism is A
  VARIANT 275: note = Ancestral polymorphism is P, Derived polymorphism is L
MAIDKVDAKEREKIEAVRKLLCKQAPLSAKQAQYCNDACLERFLRSRGDSVKKAAKHLRTVLSWRESVGADHIMADEFSAELADGVAFVSGHDDDGRPVVVFRIKQDYPKFHSQKSFVRLLVFTLEVAVACMSRFVDQFVVLFDASKPPILVTVRTDTKHSFFRSASAFLNLLMGTLKIVADYYPGRLHRAFVIDPPSLFSVLWKGVRPFVELAPATAVVCSLDFEDSLEDASFTAYPRTASLRFEPAAVVGKNPGVGSVSSRFSVTPTDNPIKPWYLSTIPTSVGSRSVVPTSSSPSLVGASPLSARSFSFASPATLRSTVATPPPFPRGAGAPLTPSSAAKAQKTPPQPQQFPRTPRPSFLQSPSMLFAFRKDGQASRVERERESFLPYLRFYRRPYDEISYRAKMRPPLGGLISIVGDKFRQKPVPQPQPLRRHAGLHHQHHYQQQQRI

SEQ ID NO: 1699 - protein, 188 aa, Zea mays
  VARIANT 170..188: note = Derived polymorphism lacks residues 170 to 188
  VARIANT 142..188: note = Derived polymorphism lacks residues 142 to 188
  VARIANT 120: note = Ancestral polymorphism is R, Derived polymorphism is L
MGVGYTEVRGKVTGLTPGRHGFHIHVFGDTTNGCNSTGPHFNPHNKPHGAPFDDERHLGDLGNIVANEDGDAEVFIRDLQISLSGPHSILGRAVVVHADPDDLGRDRYQPTPPLVKHHIRPEDMLGELGYPYDRYVPKYSLQVELPHIVVQCYKWEKAAHCPAALQTSKYFDSCFPFSGIISTLQIPE

SEQ ID NO: 1700 - protein, 233 aa, Zea mays
  VARIANT 29: note = Ancestral polymorphism is R, Derived polymorphism is C
  VARIANT 124..233: note = Derived polymorphism lacks residues 124 to 233
  VARIANT 159: note = Ancestral polymorphism is R, Derived polymorphism is Q
MLGLAGDPALVRLEMGRSVSYDDGPVPVRPAPTSLPISRSRSDGGAVPASATKPPLGGRSPGSSEATPEGEEEEADPRCLIRNLDDDSEFVVKEGSELREVGTGRQLTMEEFVDLCVGRSPIVQELMRRENVASSGSSTPVQRSNSDSSNGATRHRRRRRHSSWLRGIRNVAGSVVASSRDRRSSDDKDTCSEKGGRQSSSATDDSQDSAGAVRHGPVRVKVRQYGKSYKEFI

SEQ ID NO: 1701 - protein, 312 aa, Zea mays
  VARIANT 61..312: note = Derived polymorphism lacks residues 61 to 312
  VARIANT 56: note = Ancestral polymorphism is T, Derived polymorphism is M
  VARIANT 43: note = Ancestral polymorphism is M, Derived polymorphism is V
  VARIANT 40: note = Ancestral polymorphism is E, Derived polymorphism is K
  VARIANT 30: note = Ancestral polymorphism is L, Derived polymorphism is I
MLCFDLPSLFYLTDHYCFQMVQLLLSYESLEINAINIQNETTMDLADKVPYGESKTEIIEWLTEAGAKNARNVEKIDEASELRRTVSDIKHNVQAQLSENAKTNKRVTGICKELQKLHREAIQNTINSVTMVATLIASIAFIAIFNFPGQYFQDVNSGGDIGEAQIAKLTGFRVFCLLNATALFSSLVVVVMQITLVAWETGAQKQVIKIINKLMWTACLSTGAAFTSLAYVVVGPQHAWMAFTVSAIGGPIMIGTLLFLAYPLLCPRFKFGEDRQRRIKRAGGSKSFSWSLHDGFSDLEAFSDHEKMIYAL

SEQ ID NO: 1702 - protein, 50 aa, Zea mays
  VARIANT 3: note = Ancestral polymorphism is Y, Derived polymorphism is N
  VARIANT 11: note = Ancestral polymorphism is L, Derived polymorphism is I
MIYGRVDVIALDNARQRGGFLHNAGVIVNPKGDMKGFAITGPIDKECANL

SEQ ID NO: 1703 - protein, 85 aa, Zea mays
  VARIANT 35: note = Ancestral polymorphism is R, Derived polymorphism is Q
  VARIANT 50: note = Ancestral polymorphism is T, Derived polymorphism is M
  VARIANT 54..85: note = Derived polymorphism lacks residues 54 to 85
  VARIANT 58: note = Ancestral polymorphism is R, Derived polymorphism is C
  VARIANT 64: note = Ancestral polymorphism is P, Derived polymorphism is L
MRERDVPGSTTAKMSVSHAEDVEISLCDDNSEDEQRRRKIGSLRRKAIHTLKKRGRRCVDFRFLPAAVSIEDVSDVEVERAVASF

SEQ ID NO: 1704 - protein, 493 aa, Zea mays
  VARIANT 396: note = Ancestral polymorphism is R, Derived polymorphism is S
MVLSHGVGGSDESVHSTFASRYVRTSLPRYRMPEQSIPKEAAYQIINDELMLDGNPRLNLASFVTTWMEPECDKLIQASVNKNYVDMDEYPVTTELQNRCVNMIAHLFNAPLGDAETAVGVGTVGSSEAIMLAGLAFKRRWQNKMKAAGKPCDKPNIVTGANVQVCWEKFARYFEVELKEVKLSDGYYVMDPQKAVDMVDENTICVAAILGSTLNGEFEDVKLLNDLLTKKNAETGWDTPIHVDAASGGFIAPFLYPELEWDFRLPLVKSINVSGHKYGLVYAGIGWCIWRTKVDLPEELIFHINYLGADQPTFTLNFSKGSSQVIAQYYQLIRLGFEGYKNIMENCQENATVLKQGLEKTGKFNIVSKDNGVPLVAFSLKDSSRHSEFEISDFLRRFGWIVPAYTMPPDAQHVTVLRVVIREDFSRTLAERLVLDIEKVLHELDALPARVPSGDLAALAAAESSEREMEKQRQVISLWKRAVLAKKKTNGVC

SEQ ID NO: 1705 - protein, 98 aa, Zea mays
  VARIANT 26..98: note = Derived polymorphism lacks residues 26 to 98
  VARIANT 33: note = Ancestral polymorphism is S, Derived polymorphism is Y
  VARIANT 39: note = Ancestral polymorphism is P, Derived polymorphism is L
  VARIANT 40: note = Ancestral polymorphism is G, Derived polymorphism is S
  VARIANT 66: note = Ancestral polymorphism is E, Derived polymorphism is K
MPPLRHRSLVASHCPRPPRHKLFSFQWIIALGSIVQEEPGYELQRYVENGSLANIIKPNKFEPIPESLVALYIAQVLEGLVYLHEQVSFIEISRAQIY

SEQ ID NO: 1706 - protein, 176 aa, Zea mays
  VARIANT 141: note = Ancestral polymorphism is V, Derived polymorphism is M
  VARIANT 101..176: note = Derived polymorphism lacks residues 101 to 176
  VARIANT 96: note = Ancestral polymorphism is R, Derived polymorphism is S
  VARIANT 95: note = Ancestral polymorphism is E, Derived polymorphism is D
  VARIANT 69: note = Ancestral polymorphism is L, Derived polymorphism is H
  VARIANT 67: note = Ancestral polymorphism is R, Derived polymorphism is H
  VARIANT 12: note = Ancestral polymorphism is C, Derived polymorphism is Y
  VARIANT 1: note = Ancestral polymorphism is M, Derived polymorphism is I
MEGEAETVVGSCSKPCGPLEDYYIPDYILKPGAQQVLVDHATPCPIVVFINSRSRGQLGSSLIKTYRELLNEAQVFDLSKEAPDKVLHCLYANLERLKMEGHILAVQIWRTLRLIVTGGDGTASWLLGVVSDLKLSHPPPVATVPLGTGNNLPFSFGWVSGQHHSYKQISFILLCR

SEQ ID NO: 1707 - protein, 214 aa, Zea mays
  VARIANT 6..214: note = Derived polymorphism lacks residues 6 to 214
  VARIANT 168: note = Ancestral polymorphism is G, Derived polymorphism is R
  VARIANT 178: note = Ancestral polymorphism is K, Derived polymorphism is E
MLFLSQQASQVYGVPLSRSLLIKPGVYPEQRPCNEDTRRKWIEALAQPNKRLCSLSDHVPHGYRRKSLFEGLIRYNVPLLRATWFIKVTYLNQLQTRQTPNSISVAGSDNQRSQWTKDVVEYLQHMLDEFCSKEGAFVHPSFREQSSPGPTAGTNQIKMKTEASPAARDIEEHLVHFKWWYMFFSSNGISQKNCLFPQYLSNGYLTNSRRERFS

SEQ ID NO: 1708 - protein, 327 aa, Zea mays
  VARIANT 169..327: note = Derived polymorphism lacks residues 169 to 327
  VARIANT 61..327: note = Derived polymorphism lacks residues 61 to 327
  VARIANT 49..327: note = Derived polymorphism lacks residues 49 to 327
  VARIANT 23: note = Ancestral polymorphism is A, Derived polymorphism is T
MAAVNLLAESAAVRLRAPVPPGAGEELTARLTERVPSHGVLRGSGHGGWGERTQVEGDGGQEGGTPAAEPGPSRVRVAEERARYAGAGEVSKIEGRLKNGYYARHGFRTIKHDIRTMCQDALRYKDGYDLDDVKQIVVSFIQLAKRLGNPRYISERNGVAAQDSLDISQYSFDTKLKKKQNKTRANLVAAGADNSSRAFDLEIKRSLSKLKKKDVCSGSETSDDDGYSEGDETESETTVSDTESDFDVNSGAWDLKGNGLKLTEHGESVIDDRILGARMTKRKSIESSQLVTHSIDEILYWHNAVPRELSDIAEETKRIHQSGIFLT

SEQ ID NO: 1709 - protein, 434 aa, Zea mays
  VARIANT 167: note = Ancestral polymorphism is R, Derived polymorphism is W
  VARIANT 171..434: note = Derived polymorphism lacks residues 171 to 434
MRDPKPRRSQAARTLAARLRKHSTLLLLLLWFALSLALFLSATPPSAAPLRRSSSFLRSKPRALAATTTDAAAVAPRVRIYVYDLPARFNRDWAAADARCSRHLFAAEVAVHEALLAYAGRAARPEDADLFFVPVYVSCNFSTPNGFPSLSHARGLLADAVDLVRARMPYWNRSAGADHVFVASHDFGACFHPMEDVAIADGIPEFLKRSILLQTFGVQGHHVCQEVEHVVIPPHVPPEVAHELPEPEKAQRDIFAFFRGKMEVHPKNISGRFYSKKVRTELLQHYGRNRKFYLKRKRFDNYRSEMARSLFCLCPLGWAPWSPRLVESVLLGCIPVIIADDIRLPFPPVLQWQEISLQVAEKDIASLGMVLDHVVATNLTVIQKNLWDPVKRRALVFNRPMEAGDATWQVLRELEVLLDQSRRRRSVGSYSWRR

SEQ ID NO: 1710 - protein, 199 aa, Zea mays
  VARIANT 15..199: note = Derived polymorphism lacks residues 15 to 199
MASALSSLRYGDSLSVVGISAATAVLCEAISWLLIYRTATYDSLRASIERHSRKLDAMKSGSNSSGAASSSAQAASSRAKKMDRVETSLKDAARELSLAKLKSGAVVAAVLFVVFGLLNSLFEGRTVAKLPFAPIPLVQRMSHRGLPGNDPTDCSMVFLYFLCSMSIRTNLQKLLGFAPPRAVAAAGGGLFPMPDPKVN

SEQ ID NO: 1711 - protein, 137 aa, Zea mays
  VARIANT 51: note = Ancestral polymorphism is A, Derived polymorphism is S
MSSTGGSGRGKAKPATKSVSRSSKAGLQFPVGRIARYLKAGKYAERVGAGAPVYLSAVLEYLAAEVLELAGNAARDNKKNRIVPRHIQLAVRNDEELSKLLGTVTIAAGGVMPNIHQNLLPKKAGHKGDIGSASQEF

SEQ ID NO: 1712 - protein, 337 aa, Zea mays
  VARIANT 188: note = Ancestral polymorphism is Q, Derived polymorphism is H
  VARIANT 110: note = Ancestral polymorphism is G, Derived polymorphism is R
  VARIANT 86: note = Ancestral polymorphism is A, Derived polymorphism is V
  VARIANT 54: note = Ancestral polymorphism is G, Derived polymorphism is A
MPNDAPSPPIHSAKDAMDALAGILGGALPGSVAAAEDPAAALLNDPDVASEVTGRLRGPGSGAGNDSLCRWLYDAFRSNVPELQLVVLRFVPVLAGVYLCRAVSRKTLAGFEAVLLALYAHAAAQRGAGEAETVSLPNLANPSPYHDAKVPPKAKPVDLDVAVLSPPLEPHGTVRATRRAQIVGAVLQLYHGKLAHMPLSSKMDFCGFCVAWAGTHSKLDGADKQRLPPAPAGGDAEKWQRVPLPWELFQPALQIVAHCLLGTTGSDELKAQAARAAECLYWRATETMDARAVLATRSLVRLSQMVEEPIPEPSFSGAIENTAELEAMRANILNSNN

SEQ ID NO: 1713 - protein, 308 aa, Zea mays
  VARIANT 284..308: note = Derived polymorphism lacks residues 284 to 308
  VARIANT 279: note = Ancestral polymorphism is V, Derived polymorphism is L
  VARIANT 247: note = Ancestral polymorphism is K, Derived polymorphism is T
  VARIANT 239..308: note = Derived polymorphism lacks residues 239 to 308
  VARIANT 217..308: note = Derived polymorphism lacks residues 217 to 308
  VARIANT 168..308: note = Derived polymorphism lacks residues 168 to 308
  VARIANT 112..308: note = Derived polymorphism lacks residues 112 to 308
  VARIANT 99..308: note = Derived polymorphism lacks residues 99 to 308
  VARIANT 89..308: note = Derived polymorphism lacks residues 89 to 308
  VARIANT 80: note = Ancestral polymorphism is H, Derived polymorphism is Y
  VARIANT 72: note = Ancestral polymorphism is P, Derived polymorphism is L
  VARIANT 39: note = Ancestral polymorphism is P, Derived polymorphism is A
MNQSESSSVARGRGKNKRIWTYYEDEELIKALYEISLDPKWKSEGDFKNGYCSVLENELKARLPGCGLSAIPHIESRVRHFRTKYGAIEVMLAKSGFNWDDNRKMVQCEKQQYEAHCKDNPDAKGLYGIAFPHFDTLAAIYGKDIATGEGVEGLGEAVINMEKEIAMGEDCPVVEEDMVSMDTPQLSMDNRNSDNSTSSSSKRRKKHKDNMSSDPFLDLASGIRVDLNKASQHFGRMAEVMEMEAKKDQMQELQEKSVVELTRLGFGGSELLKAAAVFVKVPNQMTMLFALPETLRREFILNMIAGNN

SEQ ID NO: 1714 - protein, 903 aa, Zea mays
  VARIANT 53..903: note = Derived polymorphism lacks residues 53 to 903
  VARIANT 200..903: note = Derived polymorphism lacks residues 200 to 903
MEAKPSSAAHGDAPAVEAPRRRGSGGKRKSAGSSFTPSKRQAKERNAAFHVPQHLLHSGPLTRAARHSPHKLAGTPPESGPASSSAATGDGVSGGQAEVDAIRPETEETPAPELPLVDEMLEAVRSRGPGVHVVPTFAGWFSWKEIHSVEKQILPSFFNGKSVKRTPEVYLAIRNSIMMKFHANPQLQLESKDLAELSIGESDARQEVLEFLDHWGLINFHPFPPAGHEESKPEESQDNSNDEKASLIEQLFKFESVQSYMTPLLNKEDVGAPPPLPSLFPEPVLIENMVAAAEPSVEYHCNSCSVDCSRKRYHCRTQADFDLCCVCYNEGKFDPGMAKTDFILMDSAEVSGASGTSWTDEETLLLLEGLEIFGGKWAEIAEHVATKTKAQCMLHFLQMQIEDRFHDGDDINQNIPVSTEQATTEKAIVETPEKMEVGDKVEGRDNADEKASEKTEGSCEETKTEDANVVNKDTQKSGGKDSGASPSTEEAKQSSDDQPIVKENSVDVDTSGEKLSNVAIDILKCAFEAAGHSPEYEGSFADAGNPVIALAAYLAGLVEDGNATTSFRSSLKSISEVPPALQLASRHCFILEDPPNELKDICVSVSKKNTDADQTKDEDMISNSIANEKKEINEKEDKSLSVEKTNNSSMSQNDHQESNIKSVSRDDCSSVEPKGNNAKESSDSTGIGDMSAIGTTKDVVAGNSKQVNDSPSVEVEAPDDSSLKSKDELNDTEDAVATPATVQEQKHSQTLENGDKAEPNNIERVVVHEKGSIVTANQNDSITRLKRAAATAVSAAAVKAKFLGDQEEYHIRRLTALMIEKLFQKLEVKMSLFSEIEQVVLRTREYTEKTRKKLLMERNAIIAARMGALPSRPNQPGVAGNRLPPGYGNPPLRSPNAMPRPSS

SEQ ID NO: 1715 - protein, 350 aa, Zea mays
  VARIANT 196..350: note = Derived polymorphism lacks residues 196 to 350
MPRTGSGAAAREKGMGSGGSAWVEAEWTARARVSSRRSPECSVERVSTAEVCMVEAAKSRASRRRSAVCGGASHCSAEAAGEVEKVSRKEAVSRGRARISAVPRTGSGATAREKGMGSGGLAWVEAEWTARARVSRRRSSECGAERVSTAEACARMLQHSNSANELLLRRKLEEQQQAAELQHAIELQSRRLMGLQLLDLKARAAATAAAASALPTPVANAFASSHPLSTMAVESPLESGEQLKLSSGFALEGKLNGGDKEESACEASPDAADSDQSGDHNLPDSPFASPTKSAALVHDSFAATEHENTASLVGSKIDVGSNHLRPLRWKSLRPAPTSSPCAGILEAKEK

SEQ ID NO: 1716 - protein, 67 aa, Zea mays
  VARIANT 8: note = Ancestral polymorphism is L, Derived polymorphism is F
  VARIANT 13: note = Ancestral polymorphism is L, Derived polymorphism is M
  VARIANT 31: note = Ancestral polymorphism is Q, Derived polymorphism is H
  VARIANT 47..67: note = Derived polymorphism lacks residues 47 to 67
MHLPYSYLKDLNLYCLQSFNAWVCLIQQQIQYLQRSEYWTHHRTSIQLVLSLGLMFIFLMISLKIRC

SEQ ID NO: 1717 - protein, 551 aa, Zea mays
  VARIANT 343: note = Ancestral polymorphism is L, Derived polymorphism is P
MAYMCADSGNLMAIAQQVIQQQQQQQQHQRHHHHLPPLPLPLPPRQAPPMPPAPAPASPHGQIPAASLPYGGGAWSQADHFFPDAFVGTSPADAVFPDLSAAADFDSDVWMDSLIGDAPVFADSDLERLIFTTPPPPVDAAAQPESATRASLPQPAAVATAAACSSPSSLDASCSAPILQSLLACSRTAAADPGLAAVELVKVRAAASEDGDPAERVAFYFGDALARRLACGGGAQAQPLTAVDARFATDELTLCYKTLNDACPYSKFAHLTANQAILEATGTATKIHIVDFGIVQGIQWAALLQALATRPGEKPSRVRISGLPSPYLGPKPATSLAATSARLRDFAKLLGVEFEFVPLLRSVHELDRSDFLVEPDETVAVNFMLQLYHLLGDSDEPVRRVLRLVKSLDPSVVTLGEYEVSLNRAGFVDRFSNALLYYKPVFESLDVAMPRDSPERVRVERCMFGERIRRAIGPEEGAERTDRMAASREWQTLMEWCGFEPVKLSNYAMSQADLLLWNYDSKYKYSLVELPPAFLSLAWEKRPLLTVSAWR

SEQ ID NO: 1718 - protein, 195 aa, Zea mays
  VARIANT 122..195: note = Derived polymorphism lacks residues 122 to 195
MDVLDHSDDEEEQQDRCGTSSGRSGSRLGARARRQKRRSGGSRQNLLLMDCVGGNGDRALEDTVPLPDYELLSQSARLHDDAKNPPPALLVAEEEQQQKAPAKQGKASPPQPPPLPLPQRQQKPAAWRLIEYVRSRNRSGGAGPGVGGCGAWSDGDSKSSEDGEDGGGEGKKDKKKKRSSWLPDPDRRWPVQGFC

SEQ ID NO: 1719 - protein, 295 aa, Zea mays
  VARIANT 45: note = Ancestral polymorphism is L, Derived polymorphism is F
  VARIANT 214: note = Ancestral polymorphism is L, Derived polymorphism is Q
MFRRKHASHSNSSDAEQQEAKINELKSALGPLSAHGEKYCSDTCFRRYLEARNWNVTKSRKMLEESLKWRATYKPEDIRWPDVSVEAETGKMYKANFRDREGRTVIIMRPTKENSTSHDGQIRFLVYVLENAILDQREGQEKMVWLIDFTGWTMAHATPIKTARECTSILQNHYPERLAIAFLLNPPKVFEAFYRAVKYFLDPRSIEKLNFVYLKDEESMKVLYKCIDPVVLPVEFGGKNSVVYNHEDYSKLMLQEDIETSSFWEDDAKTVNHAINGTLVPDVASQLSRIAAKAS

SEQ ID NO: 1720 - protein, 298 aa, Zea mays
  VARIANT 12: note = Ancestral polymorphism is S, Derived polymorphism is L
  VARIANT 17: note = Ancestral polymorphism is S, Derived polymorphism is P
  VARIANT 63: note = Ancestral polymorphism is F, Derived polymorphism is V
  VARIANT 107..298: note = Derived polymorphism lacks residues 107 to 298
  VARIANT 137: note = Ancestral polymorphism is S, Derived polymorphism is F
  VARIANT 200: note = Ancestral polymorphism is I, Derived polymorphism is N
MTTGHMNPNYTLSMIMPLVTKTFNLLSMLEGTKLKRTMVSMIGDLSIIQRGRNMFRRKHGADVNSDDAEQREAKISELKAALGTLSARGEKYCSEACLRRYLEARNWNVAKSRKMLEESLKWRAAYKPEDIRWPDVSVEAETGKMYRASFRDREGRTVVVMKPTKQNTSSHEGQIRFLVYTLENAIFSLPEGQEKMVIKIFLDPKSVEKVNFVYQKDEESMKVMYKYIDPEVLPVEFGGKSNVVYNHEEYSELMIQDDIKTASFWAVDAKTNHANPAINGTLVPEVAPQSSSLAAKAS

SEQ ID NO: 1721 - protein, 314 aa, Zea mays
  VARIANT 15: note = Ancestral polymorphism is V, Derived polymorphism is M
  VARIANT 16: note = Ancestral polymorphism is R, Derived polymorphism is C
  VARIANT 35: note = Ancestral polymorphism is A, Derived polymorphism is V
  VARIANT 36: note = Ancestral polymorphism is A, Derived polymorphism is V
  VARIANT 38: note = Ancestral polymorphism is A, Derived polymorphism is V
  VARIANT 105: note = Ancestral polymorphism is G, Derived polymorphism is E
  VARIANT 111: note = Ancestral polymorphism is V, Derived polymorphism is I
  VARIANT 121..314: note = Derived polymorphism lacks residues 121 to 314
MEFLCVVAGKHVWSVRVDLHILDNGGNLIDAANIAALAALSTFWRPECTVGGDDGQQVTVHDPEVRDPLPLTIHHMPIAVTFAYFGEGNIVVLDPTYKEEAVMGGRMTAIVNSNGDVCAIQKAGGEGLMSSVTMQCLRIASVKATDITSKIKKAVLIWDVEAQPNRHAVLGSSESRPDLILTGHKENAEFALAMCPAEPYVLSGDVEDEKMAAWKALGAMLLVQLFNTGKACACAECTKDKTGCRDMGDDGDWIGVNKGFNSDAVLAMETIHSLSASKSSYPMADLTQLFMTATQEGKRSESQGQILRVVSLFF

SEQ ID NO: 1722 - protein, 99 aa, Zea mays
  VARIANT 50: note = Ancestral polymorphism is L, Derived polymorphism is P
MAPSASMLFLSYHQLHRPTEVGTPPPPPRREAAAPGGFWRRMSVSSVLSPALLQWRPEGEATLHERDAGEEIKSSAPADADKELESKFEEALRLSCWSS

SEQ ID NO: 1723 - protein, 364 aa, Zea mays
  VARIANT 260: note = Ancestral polymorphism is A, Derived polymorphism is T
MATQWFSNMVMDEPSFFHQWQSDTLLEQYTEQQIAVAFGQGEPVDHAVAAALATAMPMQLQQPAAAEQPHHRPRKAAKVNTSWDSCITEQGSPAADSSSPTILSFGGHTAFAKAEPTTHQPPSCAGYYGAAAAAAKAPKQEMMDAAAMPPFQQARPAKRSYDDMAAVAEAANAPSANTRPASQNQDHILAERKRREKLSQRFIALSKIVPGLKKMDKASVLGDAIKYVKQLQDQVKGLEDDARRRPVEAAVLVKKSQLSADDDEGSSCDENFVATEASGTLPEIEARVSDRTVLVRIHCENRKGVLIAALSEVERLGLSIMNTNVLPFTASSLDITIMAMAGDDFCWSVKDIVKKLNQAFKSSF

SEQ ID NO: 1724 - protein, 319 aa, Zea mays
  VARIANT 181..319: note = Derived polymorphism lacks residues 181 to 319
MAAPVADDASASPGYVLRSTLEGHRRAVSTVKFSPDGRLLASASADKLLRVWSSSDLTPVAELEGHGEGVSDLSFSPDGRLLASASDDRTVRIWDLAVGGGARLVKTLTGHTNYAFCVSFSPHGNVLASGSFDETVRVWEVRSGKCLRVLPAHSEPVTAVDFDREGDMIVSGSYDGLCRVWDSATGHCVKTLIDDESPPVSFAKFSPNGKFILAATLDSTLRLWNFSAGKFLKTYTGHVNTKYCIPAAFSITNSKYIVSGSEDKCVYLWDLQSRRIVQKLEGHTDTVIAVSCHPKENMIASGALDNDKTVKVWVQKEED

SEQ ID NO: 1725 - protein, 388 aa, Zea mays
  VARIANT 143: note = Ancestral polymorphism is K, Derived polymorphism is I
  VARIANT 157..388: note = Derived polymorphism lacks residues 157 to 388
  VARIANT 189: note = Ancestral polymorphism is N, Derived polymorphism is Y
MVSGVCVGTEGQVDPEAVAPAVAEEAVVPAPAREVVVGYALTSKKAKSFLQPKLRGLARKKGILFVAIDQKRPLSDQGPFDIVLHKLTGRGWQQLLEEYREAHPEVTVLDPPGAIANLLDRQSMLQEVSELDLTDCHGNFFEKCLLIVGTNQLVSPWMVLRTFLKADFIIMVQFSSAGKVRVPKQLFVNTDPSSIPAAVRRAGLSLPLVAKPLVAKSHELSLAYDPTSLTKLEPPLVLQEFVNHGGVMFKVYIVGDAIRVVRRFSLPNVDEGDLSNNAGVFRFPRVSCAAASADDADLDPRVAELPPRPLLEILARELRRRLGLRLFNIDMIREHGTRDRFYVIDMNYFPGYGKMPGYEHVFTDFLLSLAKKEYKRRQSYSSLSSGEW

SEQ ID NO: 1726 - protein, 469 aa, Zea mays
  VARIANT 197..469: note = Derived polymorphism lacks residues 197 to 469
MVLPALPNAHTVLLLFASMAWSQEEASSRIAEPHASSYMTARTSVGLIEETGWEQSSWDELGIQGGFIYWRSHCPKGYPESAPSISADIPYLPKIQWSKSSRSKHVLWRLQAVTVAASCCILTHASPTPYQSARTPQLQRSLPFRVPQRLAALRHHDQAVRPFDAPVRELCPLPQRSRGRQDHRPLTPNFQVLVGVYKVRQAIVTTHFKVTFDFVPCHREGKKKEETSSQLGCAVPVRENAAGMESQQADDSDSHGSRAPSIHTLLQDRRALNRSTCCASASPKDSLASLGLDRGRLPESRLPARRARAYIRKKIRGPSTRGRVRAPVPEGGGNGERGREEAEQTAAAAAAAVGGVPPAAGVLHGVRRRRGPVGSRCRRGGEQAQAHASGRHGQWDRRKVIYFWGSFCLYPVLFVLLSLLINELELNSPSQFGKKARHDDRGTNWWAVALNPVGHDASLLSNMNTAAVA

SEQ ID NO: 1727 - protein, 359 aa, Zea mays
  VARIANT 198..359: note = Derived polymorphism lacks residues 198 to 359
  VARIANT 186..359: note = Derived polymorphism lacks residues 186 to 359
  VARIANT 148..359: note = Derived polymorphism lacks residues 148 to 359
  VARIANT 146: note = Ancestral polymorphism is A, Derived polymorphism is V
  VARIANT 142..359: note = Derived polymorphism lacks residues 142 to 359
  VARIANT 134: note = Ancestral polymorphism is S, Derived polymorphism is L
  VARIANT 106: note = Ancestral polymorphism is A, Derived polymorphism is S
  VARIANT 104: note = Ancestral polymorphism is I, Derived polymorphism is T
  VARIANT 65: note = Ancestral polymorphism is S, Derived polymorphism is R
MEEITQHFGVGASSHGHGHGQHHHHHHHHHPWASSLSAVVAPLPPQPPSAGLPLTLNTVAATGNSGGSGNPVLQLANGGGLLDACVKAKEPSSSSPYAGDVEAIKAKIISHPHYYSLLTAYLECNKVGAPPEVSARLTEIAQEVEARQRTALGGLAAATEPELDQFMEAYHEMLVKFREELTRPLQEAMEFMRRVESQLNSLSISGRSLRNILSSGSSEEDQEGSGGETELPEVDAHGVDQELKHHLLKKYSGYLSSLKQELSKKKKKGKLPKEARQQLLSWWDQHYKWPYPSETQKVALAESTGLDLKQINNWFINQRKRHWKPSEEMHHLMMDGYHTTNAFYMDGHFINDGGLYRLG

SEQ ID NO: 1728 - protein, 211 aa, Zea mays
  VARIANT 34: note = Ancestral polymorphism is D, Derived polymorphism is N
MGASESLLSRQQLQQPRPQWADEITTVSEGRRDDADADPLVRRIRSLTIAPPLLSSQSEAEAESSLTDILVGKPSNSSATSGNLNPNVLAELFAMYREWQEENAKKISRKQEEIENKIETADALAVKLLQRFNYCLTYMRSTSHNLAEVHPLQIEVGESKGRLTEVISNCDALCKRIAAEGPESLRSSVQPFMAARAEAEGSGSLDPKQES

SEQ ID NO: 1729 - protein, 485 aa, Zea mays
  VARIANT 199: note = Ancestral polymorphism is Q, Derived polymorphism is L
MVSMIADEKPQPQLLSKKAACNSHGQDSSYFLGWEEYEKNPYDPVANPGGIIQMGLAENQLSFDLLEAWLEANPDALGLRRGGASVFRELALFQDYHGMPAFKNALARFMSEQRGYRVTFDPSNIVLTAGATSANEALMFCLADHGDAFLIPTPYYPGFDRDLKWRTGAEIVPVHCTSGNGFRLTRAALDDAYRRAQKLRLRVKGVLITNPSNPLGTTSPRADLEMLVDFVAAKGIHLVSDEIYSGTVFADPGFVSVLEVVAARAATDDGVVGVGPLSDRVHVVYSLSKDLGLPGFRVGAIYSSNAGVVSAATKMSSFGLVSSQTQHLLASLLGDRDFTRRYIAENTRRIRERREQLAEGLAAVGIECLESNAGLFCWVNMRRLMRSRSFEGEMELWKKVVFEVGLNISPGSSCHCREPGWFRVCFANMSAKTLDVALQRLGAFAEAATAGRRVLAPARSISLPVRFSWANRLTPGSAADRKAER

SEQ ID NO: 1730 - protein, 472 aa, Zea mays
  VARIANT 112: note = Ancestral polymorphism is P, Derived polymorphism is L
MVSSCIVRRKRSRSPTHCFDSGSRTRPRPSPSSPDVGRKRSRSPPHCSDREGRKCTRPSASPYGGPNRSLSTSCGFDSARFERARLTTGDGKVAAVASLSDDMLLEVFKRLPPPRDVIRCAAVCRRWRRVISGAGAACLPRPPSHFGFFRNYGPSPLPPFVRTAGLSLDISFLPVPPACGAVLVDSRNGRLLLRELGPGYPRELRLLVCSPLEKAYVRVPPLCIAEHMVACSVLVPGEGDAFRVVVVLFGNDPKHFSVLVYFSISSAWESATGPVHRNLVPRQGPSVVVGDVMYKLQSEEKYIMVVDAVQMTLSAVPLPDARTLLYAGNHWIGRTPDGRLCFFVIREQLTLATWVLQAPGKWVEQQPVDLRTLMHPAFMGDLAHMKLSAKMSDQLRGFKLVSFAAFCEGTCTLFFVMADWVVMLDPRTRRLLRLWRNSDESRPLGDVYPCEMLQWPPVLKNFGGSESDEAGI

SEQ ID NO: 1731 - protein, 622 aa, Zea mays
  VARIANT 374..622: note = Derived polymorphism lacks residues 374 to 622
  VARIANT 119..622: note = Derived polymorphism lacks residues 119 to 622
MLRGAISRLGARLRLHADPSPASPRLRVLSTRRGKRSSPTLSPADCDDEGPLRGLFVLSRDPECPPRLLVVQPRLRPGSLLESKLAEALNLANSLEERRDGFYHSEFGAKGAPPHLVVQNPASRGRSHAGIQLYASPFLVLSSTLIMPDTYFGPGTVDNVKCYLSATESEEDVDAVFVNAILSGIQQRNLEASTISLSPFFLEHAHVAWGKSVLDRVGLIIEIFNAHAETKEAKLQSELAALMYMKTRLVRVRGPGGRLTFGPSGEAEVVSARGRGSGGRGFMSGAGETELQLQRRRIQERRVSLLAQIEDVRRTRAIQRSSRKRHGGSFGQELVTVAVVGYTNAGKSTLVSALSEADLYSDDRLFATVDPRLRSVILPSGRKALLSDTVGFISDLPVQLVEAFHATLEEVVEADMLVHVLDSSASNLEEHRSTVLQVLQQIGVSQEKINNMIEVWNKIDLVDENVKSDGIDDEVFLTEGEQEDDIFSEDDAPSEQTSFDSVDVDDGADSEYLSEENSEDSNELPSKKSFAEPTEMGAMKELSSKECFGELRVLDTNGHTFPQPASTCHVKTSAVTGTGLQELLALIERKLTEQQTVVQRSYGPFDRKWRPTSMDCEKAAEP

SEQ ID NO: 1732 - protein, 46 aa, Zea mays
  VARIANT 22..46: note = Derived polymorphism lacks residues 22 to 46
MQRDCYEFRVFCKTTFHVSLKQVHSLLVCGLLIMCMEECSLLTGQE

SEQ ID NO: 1733 - protein, 136 aa, Zea mays
  VARIANT 37: note = Ancestral polymorphism is S, Derived polymorphism is R
  VARIANT 33: note = Ancestral polymorphism is S, Derived polymorphism is R
  VARIANT 1: note = Ancestral polymorphism is T, Derived polymorphism is M
MKRGSAEAAEGSGEKEMSSAWEEEKKIDAEMRSRRSSRRRRAPRARSPPAASAPPAPLATTSRKEVGAESDEEIRRVPEMGGASASASSGACADERPKGEDDKQGQVAAGAQPPAGGKKRGRTAGRSGCCGTACHY

SEQ ID NO: 1734 - protein, 494 aa, Zea mays
  VARIANT 175: note = Ancestral polymorphism is T, Derived polymorphism is M
  VARIANT 50: note = Ancestral polymorphism is E, Derived polymorphism is K
MPSGGVFSGSVNLKHVKLGYQYLVNHFLTLLLVPVMAATALELARLGPGELLSLWRSLELDLVHILCSAFLVVFVGTVYVMSRPRPVYLVDYACYKPPASCRVPFATFMEHTRLISDDDKSVRFQTRILERSGLGEDTCLPPANHYIPPNPSMEASRAEAQLVIFSAIDDLVRRTGLKPKDIDILVVNCSLFSPTPSLSAMIINKYKLRSNIRSFNLSGMGCSAGLISIDLARDMLQVHPNSNALVVSTEIITPNFYQGSRRDMLLPNCLFRMGAAAILLSNRRREARRAKYRLVHVVRTHKGADDRAYRCVYEEEDEQGFSGISLSKELMAIAGDALKSNITTIGPLVLPMSEQLLFFFRLVGRKLVNKGWRPYIPDFKLAFEHFCIHAGGRAVIDELQKNLQLSPRHVEASRMTLHRFGNTSSSSLWYELAYIEAKGRMRRGDRVWQIGFGSGFKCNSAVWKCLRSIKTPTNGPWDDCIHRYPVDVPEVVKL

SEQ ID NO: 1735 - protein, 261 aa, Zea mays
  VARIANT 154..261: note = Derived polymorphism lacks residues 154 to 261
  VARIANT 124: note = Ancestral polymorphism is L, Derived polymorphism is P
  VARIANT 122: note = Ancestral polymorphism is C, Derived polymorphism is F
  VARIANT 118: note = Ancestral polymorphism is G, Derived polymorphism is R
  VARIANT 113: note = Ancestral polymorphism is G, Derived polymorphism is D
  VARIANT 111: note = Ancestral polymorphism is K, Derived polymorphism is E
  VARIANT 103: note = Ancestral polymorphism is E, Derived polymorphism is K
MLLVSQAANGSLSARRLPSKPPGPSTTNPYPLFANPRLLRRRLALSGAGADQAPRRAAPTPAAAGEGPSASSTEDPVLVRVADDGVPLEGVIQIEKPGDAAAESKLVSYAKLGLLAGGDVFCLLLFSAIGRFSHGLPVLDAETFKTADPFIAGWLLSAYLLGGFGDDAKGRNGVGSAVITAAKSWAVGIPLGLAIRAVTSGHLPPTPFILVTMGSTGVLLTAWRALVSQLFSNQQKQQDDVYRRGSPFELFELLTSLVRRW

SEQ ID NO: 1736 - protein, 97 aa, Zea mays
  VARIANT 78: note = Ancestral polymorphism is G, Derived polymorphism is E
  VARIANT 72: note = Ancestral polymorphism is R, Derived polymorphism is W
  VARIANT 69: note = Ancestral polymorphism is R, Derived polymorphism is W
  VARIANT 42: note = Ancestral polymorphism is V, Derived polymorphism is D
  VARIANT 39: note = Ancestral polymorphism is P, Derived polymorphism is L
  VARIANT 38: note = Ancestral polymorphism is N, Derived polymorphism is D
MLGLAKRVGARILLTSTSEVYGDPLEHPQIEAYWGNVNPIGVRSCYDEGKRVAETLMFDYHKQHGIEIRIARIFNTYGPRMNIDDGRVVSNFIAQAV

SEQ ID NO: 1737 - protein, 594 aa, Zea mays
  VARIANT 10: note = Ancestral polymorphism is Y, Derived polymorphism is S
MEVEDLEDLYNIDASYDQDDPDEDEGEQQSEDDQEMDMLGGAVAEEDGADDARGSSADEEEDEEDDEEEEEEEPEGARLVAGDCGPSPRARVSEFAAAAGAAVERAHTANCPVCMDPWTSQGPHRISCIPCGHVYGRSCLEKWLTQRGNRSATCPQCGKRFKHKDIINLYAQEVAVPNSELEKEISYLRREICSLKKMVVHHDKMFEEMIKRQNDGVRSKRQKVAEHSYEAANLVASTPATISFSLQNELPVAGARVISIDTSNKIILVSGRANAIGAEYVVTKISMLSNREVRKIHLPPETKAVRDMCILPGGSAIFTSLGRRLSLFSMATDSIVLNWDLPAPGWSCAVGASGSHHIYAGLQNGMVVVFDIRQTVRPLRCMVGLSANPVHTLHSVIDNNGSRKVLSASAIGPCMWDADSNQSRPHLLTGTGDERVCISLACAAPWSDLLVASFRPRVDPSGDAVAASQVYLSQTPTRSGQGKPGQHTLIRRRTGNTCFAEGTTCYANVSELRMSKSAIIPYGYGGHQQKHLFSYGDESLRGVRTWQLPSFGMHADLCTHREPILDLRYAAETEGPGGYLGCLSEEKLQVFRVN

SEQ ID NO: 1738 - protein, 219 aa, Zea mays
  VARIANT 216: note = Ancestral polymorphism is I, Derived polymorphism is T
  VARIANT 204: note = Ancestral polymorphism is K, Derived polymorphism is E
  VARIANT 194: note = Ancestral polymorphism is A, Derived polymorphism is T
  VARIANT 171: note = Ancestral polymorphism is A, Derived polymorphism is D
  VARIANT 155: note = Ancestral polymorphism is A, Derived polymorphism is T
  VARIANT 103: note = Ancestral polymorphism is P, Derived polymorphism is T
  VARIANT 18..219: note = Derived polymorphism lacks residues 18 to 219
  VARIANT 10..219: note = Derived polymorphism lacks residues 10 to 219
MNFTSIEPSRPPVTQPCQGAATHPSQAAFMLTQPSQPSFTQPSQPAFTQPSRIAYTQPSQAAFAQPSQAAFAQPSQAAFAHPSQATITQAISNEDDDLRVLDPIAPTSVSKRAKNVGAGSSRTRIDKRGQDGKVVEMMERFLEMKEKQDEVEKRATTNANEDDFPITTCIAIVDGMEELSDDEKVDAYDVFKDAQNRAIFMTAKDATRIKWLRKKIART

SEQ ID NO: 1739 - protein, 421 aa, Zea mays
  VARIANT 29: note = Ancestral polymorphism is T, Derived polymorphism is S
  VARIANT 139: note = Ancestral polymorphism is R, Derived polymorphism is L
  VARIANT 200..421: note = Derived polymorphism lacks residues 200 to 421
  VARIANT 267: note = Ancestral polymorphism is A, Derived polymorphism is V
MQARVASMEDVKEARQAAMAAGQGRVLPSGMLKVFLGFLLLAVGLSAVGMYMARHAVAAAAPALFRPCLSGSSAEEEPEGLERWTRPPARVEHAMTDQELLWRASFAPRVRGYPFRRVPKVAFMFLTRGPLPLAPLWERFFRGHEGRYSIYVHALPSYHANFTSESVFYRRQIPSKMRCYPKDITDTNLAFVESVSDFARDWFLCYVYVAEWGQMTMCDAERRLLANALLDISNEWFVLVSESCIPIFDFNTTYRYFRNSNQSFLMAFDDPGPYGRGRYNWNMTPEVELDQWRKGSQWFEVHRELAIEIVKDTVYYPKFKEFCRPHCYVDEHYFPTMLTIEAPNRLANRSVTWVDWSRGGAHPATFGRGDITLEFLRRVREGRTCLHNNQNSTMCFLFARKFAPSTLEPLLELAPTVLGFG

SEQ ID NO: 1740 - protein, 403 aa, Zea mays
  VARIANT 20: note = Ancestral polymorphism is P, Derived polymorphism is S
  VARIANT 31: note = Ancestral polymorphism is A, Derived polymorphism is T
  VARIANT 93: note = Ancestral polymorphism is T, Derived polymorphism is I
MAMAMRVESVEEAKQAAILPAAQEQRRVFPAGMLKLFLGLMLFGVVMGLSAFGVFLARHAEEMAAVAPALFRPCLGAAAAAEPEPEEGLERWTRPPARAQHAMTDEELLWLASYAPRMRGRSGYPFQRVPKVAFMFLTHGPLPLAPLWERFFRGNEDRYSIYVHTMPLYRANFTSNSVFYRRQIPSKAVQWGQMTMCDAERRLLANALLDISNEWFVLVSESCIPLFDFNTTYEYFQNSSHSFVMSIDDPGRDGRGRYNLNMAPEVELEQWRKGWQWFEADRDLAVAIVEDTVYYPKFKQFCRPGCYADEHYIQTMLKIEAPHKLANRTATWVDWSRGGPNSAHPATFGRGDITEEFLKGVRGGETCLYNGRNTTVCFLFARKFAPSALQPLLELAPTVLGFG

SEQ ID NO: 1741 - protein, 365 aa, Zea mays
  VARIANT 40: note = Ancestral polymorphism is R, Derived polymorphism is C
  VARIANT 128: note = Ancestral polymorphism is V, Derived polymorphism is D
  VARIANT 206..365: note = Derived polymorphism lacks residues 206 to 365
MENDAKEARQGQHRVFPWGMLKVFLLLGLGLSAAGVLMARHGHEVAAATLFRPWLGVSPTAAAAEGLEHSMTDEELLWRASFAPGVRRYPFRRVPKVAFMFLTRGPLPLAPLWERFFRGNEGRYSIYVHALPSYRANFTSESVFYRRQIPSKVAEWGQMTMCDAERRLLANALLDISNEWFVLVSESCIPIFDFNTTYQYFLNSSQSFVMAIDDPGPYGRGRYDWNMTPEVDVTQWRKGSQWFEVNREVGIEIVKDTVYYPKFKEFCRPSCYSDEHYIQTMLSIETPQSLANRSVTWVDWSRIAAHPARFGRVDITEEFLREVREGQTCLYNEKNSTLCFLFARKFAPSALEPLLELAPTVLGFG

SEQ ID NO: 1742 - protein, 123 aa, Zea mays
  VARIANT 89: note = Ancestral polymorphism is Y, Derived polymorphism is C
  VARIANT 106..123: note = Derived polymorphism lacks residues 106 to 123
MDPITRPAAPSFHRPAVATAKHLHQAAATLARRNGVSRRCLLTLLMSTAAIPGGSESRKALLQEYLKKSKENKEKNDKERLDDYNKRNYRDYFGLIEGQVREKTEEERTESEKRILEWLDKNR

SEQ ID NO: 1743 - protein, 884 aa, Zea mays
  VARIANT 92..884: note = Derived polymorphism lacks residues 92 to 884
MEAGAPPRGWRCGVLWLVSVEIVLVLVCTRGAGADSGESKGSFLQDSEAGEKDVYLSHSCIHDEILHQRRRAGRKEYSVMPQVYHESREDAERVRGRHLLGMSSWRAPHENARKPIRIYLNYDAVGHSPDRDCKNVGDIVKLGEPPVSSAPGTPICDPHGDPPLVGDCWYNCTLEDIAGKDKRQRLRKALGQTVEWFRKALAVEPVKGNLRLSGYSACGQDGGVQLPHAYVEDGVANADLVLLVTTRPTTGNTLAWAVACERDQWGRAIAGHVNVAPRHLTAEAETLLSATLIHEVMHVLGFDPHAFTHFRDERKRRRGQVTAQSLDKKLGRMVTRVVLPRVVMHARHHYGAFSQNFTGLELEDGGGRGTSGSHWEKRLLMNEIMTGSVDTRSVVSRMTLALLEDSGWYQANYSMAEHLDWGQNQGTEFVISPCNSWKGAYHCNTTQLSGCTYNREAEGYCPIVNYSGDLPKWAQYFPQANKGGQSSLADYCTYYVAYSDGSCTDVNSARAPDRMLGEVRGSNSRKSSRKSTMFDWKYSSSCSFSYDVAVDGIWKSCPQSGGPVQFPGFNGELICPMYHELCTTVPVPMIGQCPKSCSFNGDCIDGTCHCFPGFHGHDCSRRSCPDKCSNHGTCKANGICECQSGWTGIDCSTAVCDEQCSLHGGVCDNGKCEFRCSDYAGYTCQKGSAILPSLSMCHDVLVRDSDGQHCAPSELSILQQLETVVLVPNYNRLMPSGRTFLNFFNNANCAAAAKRLACWVLLSLTFSLLTFLSCFLLSQFNGVTRMGTTGSGYATLHANCTIQLVERVWIVQTRPFLAKGKKKRRVFRAQDMARRSLSGYNISEASSVMALDTGSKRPFHLGTRRWAALVYKLCWSGLFVRRLV

SEQ ID NO: 1744 - protein, 462 aa, Zea mays
  VARIANT 325: note = Ancestral polymorphism is T, Derived polymorphism is M
MATITTPLRSALFSPAASSAGRHRGGRRRAPSSVRCDASPPSHAAAASLDPDFDKKAFRHNLTRSDNYNRKGFGHKKETLELMSQEYTSNVIKTLKENGNQYTWGPVTVKLAEAYGFCWGVERAVQIAYEARKQFPEERIWLTNEIIHNPTVNKRLDEMGVEIIPVDAGIKDFNVVEQGDVVVLPAFGAAVEEMYTLNEKKVQIVDTTCPWVSKVWNMVEKHKKSEYTSIIHGKYSHEETVATASFAGKYIIVKNMAEATYVCDYILGGQLDGSSSTKEEFLEKFKKAVSPGFDPDVHLDMVGIANQTTMLKGETEEIGKLIEKTMMQKYGVENVNDHFMAFNTICDATQERQDAMYQLVKEKVDLILVVGGWNSSNTSHLQEIGELSGIPSYWIDSEQRIGPGNRISYKLNHGELVEKNNWLPEGPITIGVTSGASTPDKVVEDALQKVFEIKRQEILQVA

SEQ ID NO: 1745 - protein, 58 aa, Zea mays
  VARIANT 29: note = Ancestral polymorphism is A, Derived polymorphism is T
  VARIANT 28: note = Ancestral polymorphism is G, Derived polymorphism is D
  VARIANT 2: note = Ancestral polymorphism is A, Derived polymorphism is V
MALTNFIVTVAVVGAGVLLFTTDIRRSGALFRRNARQLQQWLQEDTTSAASKWNERLT

SEQ ID NO: 1746 - protein, 127 aa, Zea mays
  VARIANT 24: note = Ancestral polymorphism is I, Derived polymorphism is N
  VARIANT 40: note = Ancestral polymorphism is R, Derived polymorphism is W
  VARIANT 47: note = Ancestral polymorphism is P, Derived polymorphism is L
  VARIANT 78: note = Ancestral polymorphism is E, Derived polymorphism is K
MVHDVVSVKSATVAGKKGSVSFTIDCSKPVEDKIMEVISREMVTELPRLPALTGPSPRGCRNSDGDEISLRVDFCRIEYPDPRASGLRAPLKDVKNTLSVRSILKALEKGAFRCTTKKTGLGPELEF

SEQ ID NO: 1747 - protein, 203 aa, Zea mays
  VARIANT 33: note = Ancestral polymorphism is A, Derived polymorphism is V
  VARIANT 31: note = Ancestral polymorphism is C, Derived polymorphism is F
MAHSRSHHHLLLLPAPMATACLLLATLLALCAAPAPTHGARVLMPGGAGAVTKAQQGGTGSGSNATADEYLAPHNQARAAVGVAPLRWNAGLASAAAGTVAQQRRQGGCAFADVGASPYGANQGWASYRARPAEVVALWVAEGRYYTHANNTCAAGRQCGTYTQVVWRNTAEVGCAQASCATGATLTLCLYNPHGNVQGQSPY

SEQ ID NO: 1748 - protein, 481 aa, Zea mays
  VARIANT 315: note = Ancestral polymorphism is H, Derived polymorphism is R
  VARIANT 279: note = Ancestral polymorphism is S, Derived polymorphism is I
MGEPNSNDNAMVHDNEMIDGNGVIHGSEMIHGSVMIHGDEMPHGNEMIHGNEMIHGTEMVEGSEMIHGHEMVQVNDLIHGNEMVAVNVMVNGDEMPHVNEFINTEVTPRRRRKKKSLVWEHFTIEPMPGGNSRACCNLCKQTFAYSSGSKIAGTSHLKRHITLGSCPVMKDQDRRLTLPLAGGHATDNDGEGTVERPTKRRYRYTGYANATFDQERSSSYLAKMIILHDYPLHIVQQSSFTKFIESLQPRFRVVDVETMEGEVYAVFQKAKENLLQAFSTMPGRISLTIGLWTTSQTLGYVSLAGQFIDSDWKVHRRMLNFMMVSSPHSENALSEAISSSLLEWNMKDRLFTITLDNDCSSHDIYSANLRDHLSNKNNLMLKGQLFVVRCYAHILNVVAQDVIASIHGVIYNIRESIKFIKASPNRGLLFSMGLLGYIFSKSTISLVLGITPGLATLLLGTQSEVLEERQIQLPAYLGSGR

SEQ ID NO: 1749 - protein, 301 aa, Zea mays
  VARIANT 266..301: note = Derived polymorphism lacks residues 266 to 301
  VARIANT 243: note = Ancestral polymorphism is C, Derived polymorphism is R
  VARIANT 215..301: note = Derived polymorphism lacks residues 215 to 301
  VARIANT 159..301: note = Derived polymorphism lacks residues 159 to 301
  VARIANT 154: note = Ancestral polymorphism is M, Derived polymorphism is T
  VARIANT 92: note = Ancestral polymorphism is V, Derived polymorphism is L
  VARIANT 80: note = Ancestral polymorphism is S, Derived polymorphism is A
MTMSIVAAVLLLLLVHVHPRAAAAQPSPGYFPSSTVRPMAFSDGYDNLWGPQHQTLSQDRMALTLLMDRTSGSGFKSKRSYRNGYFGVSIKVQPGYTAGVNTAFYLSNNELYPGRHDEIDMELLGTVPGEPYTLQTNVYVRGTGDGARLVGREMRFHLWFDPAADFHHYAILWNPDQIVFLVDDVPIRRYAAASAPFFPDRQMWAYGSIWDASDWATDGGRYRADYSYQPFLAGFRGFRTAGCEAAAPAQCRPVPASPAGAGLSVQQRDAMRWAQQTSMVYYYCQDYTKDRSLYPECSLAS

SEQ ID NO: 1750 - protein, 473 aa, Zea mays
  VARIANT 286: note = Ancestral polymorphism is Y, Derived polymorphism is S
MTMTPAPVANGAAAGAGGGMKRRGGRLWYAAAGALLVALLAVAVSYRSFPGVPSSPSSPGSCGCPAARKYTGMVEDCCCDYETVDAINEEVLHPILQELVKLPFFRYFKVKLWCDCPFWPDDGMCKLRDCSVCECPENEFPEPFRKPYNGLSPDSMMCQEGKPQAAVDKTLDSKVFKGWVETDNPWTSDDETDNNEMTYVNLQLNPERYTGYTGDSARRIWDAIYKENCPKYPSEELCHEKKALYKLISGLHSSISVHIAYDYLLDESTNSWGQNLPLLYDRVLKYPERVQNLYFTYLFVLRAVTKAANYLEQAEYNTGNPEDDLKTESLVKQLLYNSKLRSACPLPFDEAKLWQGENGPELKQEIQKQFRNISAIMDCVGCEKCRLWGKLQVHGLGTALKILFSVDGDSHMNQPLQLQRNEVIALFNLLNRLSESVKFVHEKGSSIEEVIEEQIPSTVQKSVSMPNLKLDFL

SEQ ID NO: 1751 - protein, 263 aa, Zea mays
  VARIANT 24: note = Ancestral polymorphism is G, Derived polymorphism is S
  VARIANT 52: note = Ancestral polymorphism is G, Derived polymorphism is S
  VARIANT 126: note = Ancestral polymorphism is T, Derived polymorphism is I
  VARIANT 129: note = Ancestral polymorphism is R, Derived polymorphism is H
  VARIANT 139: note = Ancestral polymorphism is R, Derived polymorphism is Q
  VARIANT 143: note = Ancestral polymorphism is S, Derived polymorphism is L
  VARIANT 161: note = Ancestral polymorphism is D, Derived polymorphism is Y
  VARIANT 168: note = Ancestral polymorphism is G, Derived polymorphism is R
  VARIANT 169: note = Ancestral polymorphism is C, Derived polymorphism is Y
  VARIANT 183..263: note = Derived polymorphism lacks residues 183 to 263
  VARIANT 220..263: note = Derived polymorphism lacks residues 220 to 263
MPLSELPPRPLLEILARELRRRLGLRLFDIDMIREHGTRDRFYVIDMNYFPGMWLFPCVASPFAGKGAPSPRRAPPNPRRRNGESPFFGRRTSILDTVTKVWSCVVMLDLECDDLINDMFHHFLVTVNRIIWLGGLNYRIALSYCLAKALVEMHKQLLEKDQIERRCGCIFQGCKEGMISFLRYINTHSTRIVTLVRSHYVASCSRPTSEESLASLTTDQCTIFSWLRSEPCFLAVAGMHSVILLSALLGATNMSLTNGQRSA

SEQ ID NO: 1752 - protein, 88 aa, Zea mays
  VARIANT 5: note = Ancestral polymorphism is A, Derived polymorphism is D
  VARIANT 51: note = Ancestral polymorphism is P, Derived polymorphism is A
  VARIANT 58..88: note = Derived polymorphism lacks residues 58 to 88
MAAADSTKLSLAFVLLLSALVVLGEVGGSMAADCSTLRCIQGGYITCDNYPGKQLDGCDCVCAPDNGRNCVLHLQSGSTYNCSRSNKG

SEQ ID NO: 1753 - protein, 716 aa, Zea mays
  VARIANT 70..716: note = Derived polymorphism lacks residues 70 to 716
  VARIANT 179..716: note = Derived polymorphism lacks residues 179 to 716
MDKLRVHRCTGDAVEWSPSPIVALAASPCASQVAAAREDGSLELWLVSPGSVGWHNQLTIQGNDESRVTSLVWGRRGGEATGRLLSSSVDGSVCEWDLFYLQQKIVLDTVGIPIWQMAIEPSVDAKNTENNSSEFAVNGHPNQNDSSDSDLSNIDDGDNSEDEDGSTNTISSYHVNDFQRLALACDDGSVRLYNVPESGALTYYRSLPRVSGRTLSVAWSSNAKFVFSGSSDGLIRCWDSTSFHEMYRITVGLGGASNSPELCVWSLLFLRCGTIVSGDSTGSVQFWDSRHGTLLQAHSYHKGDVNALTTVPSGNRVFSAGSDGQVILYKISKDEFGASKNVIKEQVQKWVYVGYLRAHTHDIRALTMAVPICREDALPEEKVVKIRRREKHEFSYHRWAHLGVPMLISGGDDAKLFAYSAREFTQFSPHNFCPAPQHPLIKLARNSTVNGDYVMLVQSSNFLDVLLVTVQNKLTTPSTSSSRGDATVRQLVRLKSKGSRKIISSAACANGTLLAYSDGVRPCLFALRHKGGKKYTLDKLELPKGLPCSQSMLFTVDSSNLILAGRNGKIYIIDIATREISNVFHPTRRADGAKISREPPVTKMFLSADGQWLAAVNCYGDIYVFNLEVQRQHWFISRMNGGSVTSGGFCPKNNTLIITTSKNEVYVFDVETKQLGEWSKRYTHQLPRSFQEFPGEVIGLSFSPQSSSSVIVYSTR

SEQ ID NO: 1754 - protein, 340 aa, Zea mays
  VARIANT 117..340: note = Derived polymorphism lacks residues 117 to 340
  VARIANT 312: note = Ancestral polymorphism is D, Derived polymorphism is V
MIPYPPLALWQLAITPLLRRAAFCYPRRRLNFPAAVPSDHQLLLVLLSQAHQPRRAPGVPGGQGERAPHAGVGAVPRALSEVAGSDAAPGQQLRRRGARRDQDHRVRPGPGPGPSRCPGACPVQAAHARLPAVAHGQELQHEPRRRGVRRGQRPAAAADGGAPRGGGLRRGAGRAPDRAHRAQDAPPHRVRQPQGRQRRGRVPPRRLRRPLRHRRLARHRPQRQGPARRAPEPRRLHRPPDRPRPRTPAPLIIRSNTSGLWCTAKRAIAKPCYSLQYTRAYLHDCDYETIYRTELNAMATTVFLSNVVVNRDCYLSFLLSLYMFLLLKKRTLLYNMIDVE

SEQ ID NO: 1755 - protein, 238 aa, Zea mays
  VARIANT 62: note = Ancestral polymorphism is R, Derived polymorphism is W
MAAPPTVRGYGPASPSSSVALPRARSRVPASLVPVPTRRAPSVRLRAAVADVPRGGLQLQRREVEVLSGTVFGREEDEVLEKVGEEKVDGWIRESIAEIVRHIGEAPFLVHLFSSGDGDGEHVTVRRETAAPESWPDVRRRWGMGGQRRPDGVILVEQVAAVAVDGGASASEAARQVWGLVVQARGMEHASCYVLDTCRVRSSAGFCTHFCLARAKCFGDPVELQLRNAWLNRLAGRR

SEQ ID NO: 1756 - protein, 286 aa, Zea mays
  VARIANT 159: note = Ancestral polymorphism is L, Derived polymorphism is F
  VARIANT 116: note = Ancestral polymorphism is N, Derived polymorphism is I
  VARIANT 89: note = Ancestral polymorphism is A, Derived polymorphism is P
  VARIANT 13: note = Ancestral polymorphism is N, Derived polymorphism is D
MQRAVQAVRSHGNVLKYAVLQHISAPKPAMLPAAFSRFMSVSSARLEDRGFETATVADVLKSKGKSADGSWLWCTTEDSVYDAVKSVCPHFPMIVLTPSESMVMHQMIRLPFGTLNFLQMTQHNVGALVVVKPGQNKSIAGIVTERGDEQISVLLASNFWPVAVHHSTFGIKESQLFRALYSRYNRNCIKLKYTYYLRKIIVQGRSSKSTKVGDIMTEENKLITVNPDTKVLQAMQLMTENRVRHIPVIDGTGMLGMVSIGDVVRAVVAEHREELNRLNDYIQGGY

SEQ ID NO: 1757 - protein, 135 aa, Zea mays
  VARIANT 17: note = Ancestral polymorphism is L, Derived polymorphism is M
  VARIANT 21: note = Ancestral polymorphism is P, Derived polymorphism is S
  VARIANT 26: note = Ancestral polymorphism is S, Derived polymorphism is I
  VARIANT 60: note = Ancestral polymorphism is G, Derived polymorphism is D
  VARIANT 71..135: note = Ancestral polymorphism lacks residues 71 to 135
MLQLLMAAAFSAAPLTLYVPPVRSLILFVEAMEVVCRDCGPYSHDVVAHFRVALSRVLAGLAQPISGRLRWIDLKATRLRYPNLSSYRRVHTVGFQDGTWILLNFLPMEMSGEGQIQGAAKSNEVDISEWRQSSK

SEQ ID NO: 1758 - protein, 933 aa, Zea mays
  VARIANT 668..933: note = Derived polymorphism lacks residues 668 to 933
  VARIANT 565..933: note = Derived polymorphism lacks residues 565 to 933
  VARIANT 127..933: note = Derived polymorphism lacks residues 127 to 933
  VARIANT 116..933: note = Derived polymorphism lacks residues 116 to 933
  VARIANT 102..933: note = Derived polymorphism lacks residues 102 to 933
MSAQQMNALEQLASIDLIELCKEARIERCRATRDLSSCGRYVHHVLNSCGHASLCAECSQRCDVCPICRSPISDNGNRVQLRLYYKCLEAGLISKQHDDRFQEKEDHGNPVSMDVQRLHSLFDVAVQNNLTSLICHYITDVCLDENAVSSDPLLAFLLDEVVIKDWCKKAVNALITEIGVIYKFGLEMMRSKLSQLQKFATQLAGIYSVLEVMVSSFTEAVSAHVNDLHQLIENTLKAKQHLEAMIWCIRHSFIQDICSRYADHTSWSSDVIQRKAYAETKWPGFSDEVSDVNQASKSTLFIEQALQNLGIEQSYMDKEEEIAITCLQNEQSSSMFCSTITTDHFSIDRYPFKNLREAVDVLFLHGASDMVIAKQAILLYYLFDRHWSRPDSEWRYLVDDFAATFGITNRTLLECLVFCLLDDYSSEALEEACSHLPKISSKETHPKIAQVLLERQKYDMALLVLKCTGHGSFSATENFKKDDISSLSEAVTVVRVRIECRLLTEAFMYHRSYCSKVKEQHSADMTHAEDALKNSWVYHVEMMVTEFCAICIKRNLVDKMIDLPWDSEEEKHLHKSLFDSAHEMPMKPNGSLLVVYYLRRYRYLEAYEVDRSLQKFEQKILENTTEEIASKIRAIARWRESLVVKCLDMLPEVQRENVKAINSGEQSQFARTAQLSSPAHVGKSQSPVMDLSTTFTTSLQNKSSLLRKNNALTDSGGLIRSSRSEFGRKVPSVLDTRASPHGPPTSNMRSSAGDMFPTVGQRVESPFLRGAKDISSRKGEEGFKKGIKYGDHDPVPMYLNLSSGDTPMKDYRTSLLKTAVNKTTIFQGKDSVGKGELHFGSRAEKPFILNGTGVGQNGLAKVSGYAGFREDYKVPTKENILSSSKRSSIDGAEASKGVSRWRSDESSEDEEERTNRESGASLVTRRRPRFSRR

SEQ ID NO: 1759 - protein, 329 aa, Zea mays
  VARIANT 262: note = Ancestral polymorphism is C, Derived polymorphism is F
  VARIANT 273: note = Ancestral polymorphism is A, Derived polymorphism is E
MADFRTSTQRERWIFQSHDLMERWAAANQRAAQTLAQYGTTRLNVDLLDGSVSYPESMPDHVEGSSVVKPLSYEEEQLTRVFYEQKIQEVCAAFKFPHKIQATAIIYFKRFYLQWSVMEHQPKHIMLTCVYASCKVEENHVSAEELGKGIQQDHQIILNNEMILLKTLDFDLIVYAPYRSIEGFIDDLEDFCRAGNGPFQRLKELRQAAISHVDKMMLTDAPLLYTPGQLALAALHKSNDLLRVVDFERYLEIIFSRQHSDCPIEQFVQSINEINYLVDQLNIPTVKDMRHVDRKLKHCWDPSSHDEHNKKKEKKSKHKSKRTSTDAQL

SEQ ID NO: 1760 - protein, 160 aa, Zea mays
  VARIANT 3: note = Ancestral polymorphism is A, Derived polymorphism is T
  VARIANT 33: note = Ancestral polymorphism is N, Derived polymorphism is S
  VARIANT 57: note = Ancestral polymorphism is L, Derived polymorphism is R
MLAQLSVYIEHTTVPKVTEYINMKTQKISKLLNKRFTTPVWIKHKEPREVNMFVDLLLLEINGVVSEVKQILPGLVRQHRHSDSTGSTTSSRSNPMREEMLNRSNTHQARSQFLENHLAKLFEQKMEIFTKVEYTQVPADSLVLLEVKSCYQFLVLITES

SEQ ID NO: 1761 - protein, 437 aa, Zea mays
  VARIANT 314..437: note = Derived polymorphism lacks residues 314 to 437
MAARRSLVVFLPWCCGPAASWADISRSVRSPLFPLFARFMGERLSGQTFPWRGPEDFTSLAPCFHGSWFESTIRPPLVEEEWPPLPRSVSALKMDPKGRNPNWDRWGQKDAPQGSQSWNKNRNLSWRLKPNLGKSDVKEDIVTSSSGDGGQSGSKDIVRFKVHVKSVAMIPPIIEVGVKPFLYDIFFKIDDITDEGWNDESINLGKRASVDRQGLDDPSYEKTDKKARNVGEKSVKEEMRLEKHWRYDVSRQIFWKISKSPLGAQAEGSGKTEAEKQVVSMEVEHGEGIRRSSRLESNDDMKIADKAATRAMAKDAFMNKDLGIDLGNSINKSIANLELIKSLELSRNVLAFRYVKNSVEHNLQVGSDSELDKSIQDENGNNQLTDLDDVMVLRKGRKIRYKKNSVKKKKKKSSSKIRYSPNKGKRIPSVSNLNYLE

SEQ ID NO: 1762 - protein, 275 aa, Zea mays
  VARIANT 263: note = Ancestral polymorphism is F, Derived polymorphism is I
  VARIANT 261: note = Ancestral polymorphism is S, Derived polymorphism is R
  VARIANT 232: note = Ancestral polymorphism is V, Derived polymorphism is F
  VARIANT 206: note = Ancestral polymorphism is M, Derived polymorphism is T
  VARIANT 198: note = Ancestral polymorphism is G, Derived polymorphism is S
  VARIANT 196: note = Ancestral polymorphism is S, Derived polymorphism is C
  VARIANT 182..275: note = Derived polymorphism lacks residues 182 to 275
  VARIANT 129: note = Ancestral polymorphism is W, Derived polymorphism is C
  VARIANT 87: note = Ancestral polymorphism is D, Derived polymorphism is H
  VARIANT 83: note = Ancestral polymorphism is H, Derived polymorphism is Y
  VARIANT 55: note = Ancestral polymorphism is F, Derived polymorphism is L
  VARIANT 38: note = Ancestral polymorphism is G, Derived polymorphism is R
  VARIANT 35..275: note = Derived polymorphism lacks residues 35 to 275
  VARIANT 29..275: note = Derived polymorphism lacks residues 29 to 275
MVSVRVSYLIEKQMIAIRIALGETHIIAETKKFLSRSGVNVAALEEHASKRNDKFKRSNYVILVKNLPFNSTKEELATLFQKHGSLDKIILPPTRVFALVVFVEATEAQYAFKKLLYTPYKDTPLYLECAPENILSPTSAPVDEEVKNEDGERILTKANIDQTVEGVSAEDIDPDRVEILLRTHNADLDIPIKRYSKGYIYHILKMWITLGCPCQPSCFSYDISLKYWLRIVDDCFPASNFASTFSFPQGGELGKLQIDISKFMARKPGLQMIGC

SEQ ID NO: 1763 - protein, 165 aa, Zea mays
  VARIANT 159..165: note = Derived polymorphism lacks residues 159 to 165
  VARIANT 36: note = Ancestral polymorphism is L, Derived polymorphism is F
  VARIANT 31: note = Ancestral polymorphism is S, Derived polymorphism is F
MPRSPSILAHFQLPPFLVEGAVRHENQFLSSESRRLEVLVSQAREEVAAAKQAAATNESEAATLRSEVERLEGLLAAEKASHEEEMRRGARLGDQLQTTYQEKAALEEEIETLKGSATAEGKGVEEGCDSVDARAGTPKDQGVVPPALVRGCWSSCHGWHRSGLV

SEQ ID NO: 1764 - protein, 199 aa, Zea mays
  VARIANT 183: note = Ancestral polymorphism is L, Derived polymorphism is P
  VARIANT 168: note = Ancestral polymorphism is L, Derived polymorphism is P
  VARIANT 143: note = Ancestral polymorphism is D, Derived polymorphism is G
MLARIIFCVVVAAAVLAVVLLATVSPLPHRSGSRKGAAGQRTFTVYIHPTASTAVRQEQAQGRRQEASALVFHHRMTAGPESASRAVGAASGFLLPAGERGSAVASVFDTVHLTFDGSAGLSGSLCVEASNEKARRAARRRHGGEEEEVLRVVGGTGAFSFARGHAVLRGQWSRPGATAAALLLELSIFSAESDQLIAH

SEQ ID NO: 1765 - protein, 166 aa, Zea mays
  VARIANT 69: note = Ancestral polymorphism is G, Derived polymorphism is D
MGACNSCEATAVAAAPGPATAEARVVLADGALRRFPGGTRASQAVKAAAGGAAPTASWFLCSADGLELGGAVAPVRPEEALQPGQLYFVLPAAMRRRPLQAEEMAALAIRASAALAGDHDGPLVFPEAAAAAAAGAGARCGKACRRSRRGGSRGRDFAPDLGAIAE

SEQ ID NO: 1766 - protein, 1031 aa, Zea mays
  VARIANT 534..1031: note = Derived polymorphism lacks residues 534 to 1031
  VARIANT 520..1031: note = Derived polymorphism lacks residues 520 to 1031
  VARIANT 504..1031: note = Derived polymorphism lacks residues 504 to 1031
  VARIANT 380: note = Ancestral polymorphism is V, Derived polymorphism is G
  VARIANT 376..1031: note = Derived polymorphism lacks residues 376 to 1031
  VARIANT 363: note = Ancestral polymorphism is G, Derived polymorphism is R
  VARIANT 359: note = Ancestral polymorphism is G, Derived polymorphism is S
  VARIANT 358: note = Ancestral polymorphism is V, Derived polymorphism is A
  VARIANT 330..1031: note = Derived polymorphism lacks residues 330 to 1031
  VARIANT 310..1031: note = Derived polymorphism lacks residues 310 to 1031
  VARIANT 298: note = Ancestral polymorphism is G, Derived polymorphism is S
  VARIANT 290: note = Ancestral polymorphism is G, Derived polymorphism is R
  VARIANT 288: note = Ancestral polymorphism is G, Derived polymorphism is R
  VARIANT 286: note = Ancestral polymorphism is G, Derived polymorphism is R
  VARIANT 282: note = Ancestral polymorphism is T, Derived polymorphism is M
  VARIANT 265: note = Ancestral polymorphism is R, Derived polymorphism is C
  VARIANT 264: note = Ancestral polymorphism is A, Derived polymorphism is T
  VARIANT 262: note = Ancestral polymorphism is L, Derived polymorphism is P
  VARIANT 249: note = Ancestral polymorphism is A, Derived polymorphism is V
  VARIANT 212..1031: note = Derived polymorphism lacks residues 212 to 1031
  VARIANT 211..1031: note = Derived polymorphism lacks residues 211 to 1031
  VARIANT 206..1031: note = Derived polymorphism lacks residues 206 to 1031
  VARIANT 188..1031: note = Derived polymorphism lacks residues 188 to 1031
  VARIANT 185: note = Ancestral polymorphism is R, Derived polymorphism is Q
  VARIANT 141: note = Ancestral polymorphism is R, Derived polymorphism is W
  VARIANT 123..1031: note = Derived polymorphism lacks residues 123 to 1031
  VARIANT 115..1031: note = Derived polymorphism lacks residues 115 to 1031
  VARIANT 67..1031: note = Derived polymorphism lacks residues 67 to 1031
  VARIANT 23..1031: note = Derived polymorphism lacks residues 23 to 1031
  VARIANT 13..1031: note = Derived polymorphism lacks residues 13 to 1031
MVMVDEGGKGEAQPPGLDPRTRRSAATRATDDMDGGGRGEEWEGAPPATCSRSRRRRCPCPSSSPAWTPPSGARGATISATVAIRRAGPAAPAPGPHTPTPAEERSAKRVRMCLQCGAAVTPQWRSGPMGQGTLCNAYRVRLKVAGVLRDQGRLLPEYRPLASPTFEPSEHANKHSQVMQLHRQRKSQGQHHPLPAEHPRAMDVLQFPQRWQAYTALRSAGKSVEIIFVSLDRDEASFRDHFQGMSWLAVPFDAAGLLRQKLCARFAIERIPALIPLSASATPSSGLGCGEDAVRLVGEYGVDAYPFSAQRRRELESMDDARRGGGRLQELLGCEERDYVISADDIKIPIADLAGKTVGLYFGAHWCPPCHVFTKQLKEVYNELKILRPVSFEVIFVSIDRSKGEFQASMSSMPWLAIPYSDAVRKKLTRIFVVKGIPGLLILGLDGKALKTDVHRPELLPTYEGSRCNKIKGIKAPRITPKNVIRFSSYTDTFYFITPEAWYWSEYLYLKKESLTVVISDVKCDDLKEEGKVQQTKRGNSIHDHSSSHSIRSFSALTESGPGLTSVHPSSRTRPPPFYALLPRSDGPFAGDEHTPQQELSGVEQREARDPMAAAEGQWVLMATGRTPTNIAVIKYWGKRDEALILPINDSISVTLDPDHLSATTTVAVSPSFPSDRMWLNGKEISLLGGRFQSCLREIRKRARDFEDKEKGVKIKKEDWDKLHVHIASYNNFPTAAGLASSAAGLACFVFTLGKLMNVKEDYGELSSIARQGSGSACRSIYGGFVKWCMGEKDDGSDSIAVQLADETHWNDLVIIIAVVSSKQKETSSTSGMRDSVETSPLLQYRAQTVVPGRVLKMEEAIKNRDFESFAKLTCADSNQFHAVCLDTSPPIFYMNDTSHRIISLVEKWNHSEGTPQVAYTFDAGPNAVLIAQNRKTAAHFLQKLLYYFPPQDNDLSSYLVGDKSILGDAGLHSMKDVEALPAPPDTKIPDQKFKGDVSYFICSRLGAGPKVVVDEGQALIDSVTGLPKGV

SEQ ID NO: 1767 - protein, 350 aa, Zea mays
  VARIANT 310: note = Ancestral polymorphism is V, Derived polymorphism is G
  VARIANT 306..350: note = Derived polymorphism lacks residues 306 to 350
  VARIANT 293: note = Ancestral polymorphism is G, Derived polymorphism is R
  VARIANT 289: note = Ancestral polymorphism is G, Derived polymorphism is S
  VARIANT 288: note = Ancestral polymorphism is V, Derived polymorphism is A
  VARIANT 260..350: note = Derived polymorphism lacks residues 260 to 350
  VARIANT 240..350: note = Derived polymorphism lacks residues 240 to 350
  VARIANT 228: note = Ancestral polymorphism is G, Derived polymorphism is S
  VARIANT 220: note = Ancestral polymorphism is G, Derived polymorphism is R
  VARIANT 218: note = Ancestral polymorphism is G, Derived polymorphism is R
  VARIANT 216: note = Ancestral polymorphism is G, Derived polymorphism is R
  VARIANT 212: note = Ancestral polymorphism is T, Derived polymorphism is M
  VARIANT 195: note = Ancestral polymorphism is R, Derived polymorphism is C
  VARIANT 194: note = Ancestral polymorphism is A, Derived polymorphism is T
  VARIANT 192: note = Ancestral polymorphism is L, Derived polymorphism is P
  VARIANT 179: note = Ancestral polymorphism is A, Derived polymorphism is V
  VARIANT 142..350: note = Derived polymorphism lacks residues 142 to 350
  VARIANT 141..350: note = Derived polymorphism lacks residues 141 to 350
  VARIANT 136..350: note = Derived polymorphism lacks residues 136 to 350
  VARIANT 118..350: note = Derived polymorphism lacks residues 118 to 350
  VARIANT 115: note = Ancestral polymorphism is R, Derived polymorphism is Q
  VARIANT 81..350: note = Derived polymorphism lacks residues 81 to 350
  VARIANT 30: note = Ancestral polymorphism is R, Derived polymorphism is W
  VARIANT 12..350: note = Derived polymorphism lacks residues 12 to 350
  VARIANT 4..350: note = Derived polymorphism lacks residues 4 to 350
MCLQCGAAVTPQWRSGPMGQGTLCNAYRVRLKVAGVLRDQVKHRPTPATARTPARPPLDSPASGGKGRSTLCNACGVRYRQGRLLPEYRPLASPTFEPSEHANKHSQVMQLHRQRKSQGQHHPLPAEHPRAMDVLQFPQRWQAYTALRSAGKSVEIIFVSLDRDEASFRDHFQGMSWLAVPFDAAGLLRQKLCARFAIERIPALIPLSASATPSSGLGCGEDAVRLVGEYGVDAYPFSAQRRRELESMDDARRGGGRLQELLGCEERDYVISADDIKIPIADLAGKTVGLYFGAHWCPPCHVFTKQLKEVYNELKILRPGIPGLLILGLDGKALKTDVHRPELLPTYEGS

SEQ ID NO: 1768 - protein, 181 aa, Zea mays
  VARIANT 160: note = Ancestral polymorphism is T, Derived polymorphism is N
  VARIANT 157: note = Ancestral polymorphism is T, Derived polymorphism is I
  VARIANT 143: note = Ancestral polymorphism is D, Derived polymorphism is G
  VARIANT 116: note = Ancestral polymorphism is T, Derived polymorphism is M
  VARIANT 106..181: note = Derived polymorphism lacks residues 106 to 181
  VARIANT 60..181: note = Derived polymorphism lacks residues 60 to 181
  VARIANT 47: note = Ancestral polymorphism is T, Derived polymorphism is M
  VARIANT 7: note = Ancestral polymorphism is S, Derived polymorphism is L
MPATVYLELLDRSAVGGIANISYSPRAQQGQPMTPTQIIPSDPVFLTKIPEDGKPTLLVQTPPVKYVADYGNPVMMHDKSKRVESSETTWPARRQVVACAAVCWSWREVTKEVVKTLKECGRITFPMSLKQVFTFAEAYDFEDLESMVEEIAKAFKTKKTLQKPFLTLYGIESEKAYWSSS

SEQ ID NO: 1769 - protein, 110 aa, Zea mays
  VARIANT 55: note = Ancestral polymorphism is S, Derived polymorphism is A
  VARIANT 21: note = Ancestral polymorphism is G, Derived polymorphism is E
  VARIANT 2: note = Ancestral polymorphism is A, Derived polymorphism is S
MSAKIRVVMKSFMSQSNQVSGLMPFTKKIGLPESRALYTVLRSPHIDKKSREQFSMHVKKQFVEQTAKPHELHRKFFWLKRLRIPGAQYEIQISFKTRLDMASLRSQAPC

SEQ ID NO: 1770 - protein, 134 aa, Zea mays
  VARIANT 129: note = Ancestral polymorphism is A, Derived polymorphism is T
MAGAAAERKVIRVLLVEDEEIHRVLARALLRSACGGVELHEAGTGAEAVRRVRDGGAAAAYDLIITDWKMPVMDGHEATRQIRAMGVTTPIVGLSSDTLPPDVDAFIKAGADDFTPKPLSKEKLVRILTKFHLA

SEQ ID NO: 1771 - protein, 235 aa, Zea mays
  VARIANT 59: note = Ancestral polymorphism is P, Derived polymorphism is T
MASPSPAVSSLETEAPQATVTRERRLNPDLQEHLPKPYLARAMVAVDPDHPTGTEGRDPRGMSVLQQHVAFFDRNGDGVVYPWETFKGMRAIGCGFFTSLVISFLINLVMSYPTQPGWLPSLLLSVHVKNIHKAKHGSDSETYDTEGRFDPSKFDAIFSKYGRTHPDALTKDEMNSMLKANRNIYDFLGWIAAIGEWHLLYSVAKDKDGLLQREIVRGLFDASLFERLQDSKKSS

SEQ ID NO: 1772 - protein, 784 aa, Zea mays
  VARIANT 193..784: note = Derived polymorphism lacks residues 193 to 784
  VARIANT 228..784: note = Derived polymorphism lacks residues 228 to 784
  VARIANT 500: note = Ancestral polymorphism is P, Derived polymorphism is L
MDFAELEAVEGLRWPWHSWPPTTPAAASLVVPTSVLCSPLQHPTAPDLLPLLPYAPLRCASPGCGAALNPFSRVHHGSARWSCAFCGAAANPFPRLLAPDALPAELFPTHSSVEYLLPPDPAEPGGPGPPALVFVIDAATAAEELTVLKDEVRRLMQGLPEGIRVALVTFAASVWVHDLGFEGCARVVVLNGERELESDKHSSFTSIHNLFLPQSALKFEYLPLAQYQWQLIQKLLGIHRSQYKNLAMPRSTEVQRFLLPVSECEFNITSAIEDLSSMPACPRGHRPLRATGAAISTAIALLEGCCSPSTGGRIMIFTSGPATVGPGCVVETDLGKTIRSHRDIFNSNAPLTDKARDFYKKVAKRLTDHALVLDLFACSLDQVGAAELRNPIEVTGGLMVHTESFEYEQFKSCFRHMFRREGTNYLNMNFNATIEIVTSKEVKICGALGPCISLRRKNNSVSDKEIGEGGSNYWKTSSLSSKTSIAFLFRVDCNHKADPPTVFFIQFMTRYRHGDGSYRLRVTTVARRWAAPRSPEIAAGFDQEAAAAVMARLAVYRAETYHVRDVIRWLDKMLIRFTAKFGNYVPEDPSTFRLSTNFSLYPQFMYYLRRSQFIDVFNSSPDETAFFRLMLNREGVVGSLIMIQPTLFQYSFDGPPIPVLLDVSSISPDVILLFDSYFYIVIHYGSKIAQWRKLGYHKDPNHENLRKLLEAPEVDAEALLVDRFPVPKLIKCDHHGSQARFLLARLNPSVTQKTQFSKGSEVIFTDDVSLQVFIEHLQELAVQG

SEQ ID NO: 1773 - protein, 601 aa, Zea mays
  VARIANT 14: note = Ancestral polymorphism is A, Derived polymorphism is V
  VARIANT 20: note = Ancestral polymorphism is G, Derived polymorphism is D
  VARIANT 35: note = Ancestral polymorphism is P, Derived polymorphism is S
  VARIANT 63: note = Ancestral polymorphism is T, Derived polymorphism is I
  VARIANT 69: note = Ancestral polymorphism is R, Derived polymorphism is L
  VARIANT 211: note = Ancestral polymorphism is R, Derived polymorphism is G
MAASAAAGRSWDPAVSLRLGHPALVLLERCRGARPFRAILAHLLRLGLAMETFPMSRLLHYAIVVSSPRLTREAELLFQHFTPRPNLYIYNLMLSAAAARDSSSSTQAAALYRSMLASSVLPDQQTFLALLRSVERLSAGRQVHAHVVVSGLHSRVYLRNSLIKMYIDAGDVETAELMFRSALVLDTVSCNIMLSGYVNEGCTLKALWFFRDMASRGIVVDQYTAVALLTCCGRLKNELIGRSVHGVIVRRMDAGDHGLILVNALLDMYAKCGRMNAAKTIFGETGEKDAISWNTMVSGFVNAGMLDLASRFFSEAPSRDLISWNALLAGYARYKSFNEVMKLFHDMVASCVNLDKVTAVTLISAATGKGSLNHAKSVHGWVVKEFDHQDAFLASALVDMYCKCGNVKTAYYVFEKALDKDVTLWTAMISGLAFNGHGTEALELFCKMQTEVVAPNGVTLLAVLSACSHSGLLDEGCKIFDAMKQRYSIEPGIEHFGCMVDLLARSGRLIDALALARRMPMRPSRSIWGSILNASLAGQNIEVAEIASKELLRLDPAEEGGYVLLSNLHAAGGHWNHSDKVRQIMERKGLRKLAGASNFGS

SEQ ID NO: 1774 - protein, 146 aa, Zea mays
  VARIANT 75: note = Ancestral polymorphism is R, Derived polymorphism is Q
  VARIANT 74: note = Ancestral polymorphism is T, Derived polymorphism is M
  VARIANT 66..146: note = Derived polymorphism lacks residues 66 to 146
  VARIANT 64: note = Ancestral polymorphism is P, Derived polymorphism is L
  VARIANT 57: note = Ancestral polymorphism is T, Derived polymorphism is M
  VARIANT 52: note = Ancestral polymorphism is V, Derived polymorphism is I
  VARIANT 51: note = Ancestral polymorphism is A, Derived polymorphism is T
  VARIANT 48: note = Ancestral polymorphism is G, Derived polymorphism is E
  VARIANT 43: note = Ancestral polymorphism is R, Derived polymorphism is C
  VARIANT 35: note = Ancestral polymorphism is V, Derived polymorphism is M
  VARIANT 28..146: note = Derived polymorphism lacks residues 28 to 146
  VARIANT 26: note = Ancestral polymorphism is V, Derived polymorphism is I
  VARIANT 25: note = Ancestral polymorphism is R, Derived polymorphism is H
  VARIANT 24: note = Ancestral polymorphism is H, Derived polymorphism is D
  VARIANT 10: note = Ancestral polymorphism is P, Derived polymorphism is L
MPARASPVMPMDERREMDPVADAHRVAWLQHGLLVLLHIHPIRLHLHGDVAVHRPTTEDNCYYLGCHLTNIKAMRNLFVDAFTLKKYVAKGVDVMVVRELNGGVDDERARQGRADGERDAQGAHDRTSQIAHVAYCASEKKVHMSI

SEQ ID NO: 1775 - protein, 137 aa, Zea mays
  VARIANT 93: note = Ancestral polymorphism is R, Derived polymorphism is S
  VARIANT 97: note = Ancestral polymorphism is R, Derived polymorphism is S
MAGKGGKGLLAAKTTAAKSAEKDKGKKAPISRSSRAGLQFPVGRIHRQLKQRTQANGRVGATAAVYSAAILEYLTAEVLELAGNASKDLKVKRITPRHLQLAIRGDEELDTLIKGTIAGGGVIPHIHKSLINKSSKE

SEQ ID NO: 1776 - protein, 157 aa, Zea mays
  VARIANT 10: note = Ancestral polymorphism is S, Derived polymorphism is F
  VARIANT 21: note = Ancestral polymorphism is N, Derived polymorphism is S
  VARIANT 68: note = Ancestral polymorphism is I, Derived polymorphism is V
MEELAAVTRSLGLDPSDQELNDMMSEVDTDGNGIIDFQEFLSLIARKMKASLSLICLSRILPKLTIAVRKLTAHLLRCLQDGDGDEELKEAFEVLDKDQNGFISPVELRTVMTSLGEKMTDEEVEQMIREADTDGDGQVNYDEFVLMMKNAERKISG

SEQ ID NO: 1777 - protein, 1127 aa, Zea mays
  VARIANT 748..1127: note = Derived polymorphism lacks residues 748 to 1127
MAPAFSVPDAEDLPARRSDASDVAGNVWDLATLPTPPAGGGREIYIYRNTFNLVPRSIGGRARGLRSLKFFGNDVEVLPADSGDELDGLESLQVKVSAPRVSGAPLRRMQALKELELSMVPPRPSSCSILAEVARLKCLTKLTICHFSIRHVQNLELNCPCLLKYLPPEIGSLKKLQELDLSFNKLKNFPNCIIELSALKFLKVTNNKLVDVPSGISSLRCLESLDLSNNRLTSLGSVKLISMLTLQYLNLQFNRLSHSYVIPSWICCDMRGNVENTMKGCKLKYTGVATMNSLAEPSTSSHACDSALLCVQSESSPNLKHHAPHKIKKGWRRRDCLQQRARQERLESSRSKLNEKYIDEMAVNMAEDECPSSLHDMENKLGIRTIDEETSVQDSLKETSSISEDLFSIVDDDLDGLTKDCGTMVQDHYDEEKPGFNMRGYNDDNSCISGEPACFSRSRVCSVEKELDDTASSVHDVGEIARDNSSVTPKFALKSKRHPDMDSNPKPSKCPRPIDERSKLSYKYSVESFCSIDDHLPDGFYDAGRDMPFMSLEEYERSLGLYAREVILLDREQDEELDTIASSAQLLLSSLTRPSSCEMEEDAGHDLLRASVLALFVSDCFGGCDRSASLGRTRRAIVSLRKEQPFVCTCSAGNLGDNNEAKQTNILSGHFDFAGLCNRSIHLIKERRNSGIVPIGSLQLGVCRHRAVLMKYLCDRADPPIPCELVRGHLDYTPHAWNIVPVKKRNGWVRMIVDACYPTNIKEETDPEYFCRYIPLSRLQIVLDDEGYTPRCSFPSVSSCKEIEVTPSSSVYHCKIGAVDAAAKIRYLDTRRVSNDEVKLFEYKLLGEVRMLGALRKHRSIVDIYGHQLSSKWVQVDGDKEYRILQSIILMEYVNGGSLKGYLTKLLKEGKKCVPIDLSVYIAREVACALLEMHKKLVIHRDIKSENVLIDLDPKRNAGAPIVKLSDFDRSVPLYSLSHTCCISQLGTHPPDVCVGTPCWMAPEVVKAMHEKHHYGLEIDIWSFGCFLLEMLTLQMPYQGLSDTEIYDLILRKKQRPRLTQELEAFWTMDEPATRLKLGITSDAHADKLRHLIDLFYQCTRGHASRRPKAVQIYNSLCSLPTCYDMR

SEQ ID NO: 1778 - protein, 374 aa, Zea mays
  VARIANT 280..374: note = Derived polymorphism lacks residues 280 to 374
  VARIANT 189: note = Ancestral polymorphism is I, Derived polymorphism is T
  VARIANT 97: note = Ancestral polymorphism is L, Derived polymorphism is R
  VARIANT 95: note = Ancestral polymorphism is R, Derived polymorphism is I
MLAVFDPTVAKCPEGLRSPPVAGAAAGAGGAGAGALMKGFSDSHDGAVTVSLGPSGALAYSAANQSPLVPSLLGIANGLGFDQCCGCFPRRFEEIFLAFCVQKQLGKKKEDSEFSVHLKSHDTVIYTLYTFRMHHHAICAEKVNLWKELSQTGFFMEFLLNKTILTEKNASQHIHTSQIVIDPESSSVILLFGAVNDIFCLFQGHIENIANLKQHYGLSKTANEVTILIEAYRTLRDRGPVPASQVVRDLSGKFAFILYDTLSKSTFVAADADGSIPFFWGVDYENHLVFSDDVGILKTGCGNSYAPFPKGCFYTTSGGLQSFEHPLHEVKAVPRVDSQGQMCGSIFKVDSESKKKQDASIPRVGSAADWSNQF

SEQ ID NO: 1779 - protein, 213 aa, Zea mays
  VARIANT 118: note = Ancestral polymorphism is Y, Derived polymorphism is N
  VARIANT 96: note = Ancestral polymorphism is P, Derived polymorphism is L
  VARIANT 88: note = Ancestral polymorphism is G, Derived polymorphism is S
MARWRPAALLVVALTAVLSAARRADALSVTVTDTECIHEFVPYEGDTVSGNFVVVDHDIFWSSDHPGIDLTVTSPGGNTVHTLKGKSGDKFEFKAPKGGMYKFCFHNPYGAPETVSFYIHVGHIPNEHNLAKDEHLDPINVKIAELKEVLESVTAEQKYLKAREARHRHTNESTRKRVMFYTMAEYIAFVAASTLQVLYIRRMFSKNVGYNRV

SEQ ID NO: 1780 - protein, 181 aa, Zea mays
  VARIANT 176: note = Ancestral polymorphism is S, Derived polymorphism is F
  VARIANT 151..181: note = Derived polymorphism lacks residues 151 to 181
  VARIANT 123: note = Ancestral polymorphism is T, Derived polymorphism is I
  VARIANT 108: note = Ancestral polymorphism is G, Derived polymorphism is S
  VARIANT 106: note = Ancestral polymorphism is D, Derived polymorphism is Y
  VARIANT 87: note = Ancestral polymorphism is V, Derived polymorphism is M
  VARIANT 86: note = Ancestral polymorphism is S, Derived polymorphism is F
  VARIANT 76: note = Ancestral polymorphism is L, Derived polymorphism is I
  VARIANT 48: note = Ancestral polymorphism is T, Derived polymorphism is I
  VARIANT 28: note = Ancestral polymorphism is Q, Derived polymorphism is H
  VARIANT 15: note = Ancestral polymorphism is V, Derived polymorphism is I
MDMAQQHHITKLFIIDLLKHSPVSLKLQIVIPFISWSIQKENPLLRLTVENCELSSIGVIILLECLTNAKQLLDVLSIADNHLGSSVAAALARFLGSHVQALNATYIGLGTVGFQILEETLPTEVALSHINISKNRGGIRAAYFVSKLICQAPNLVSINATGNLLPPESLEVICNSLKQGT

SEQ ID NO: 1781 - protein, 327 aa, Zea mays
  VARIANT 254: note = Ancestral polymorphism is A, Derived polymorphism is S
  VARIANT 195: note = Ancestral polymorphism is E, Derived polymorphism is K
MAAAVDTAAVAGATGRLRVFFLPSFIRGHLIPQTDMACRVAAARPAEVEATVVVTPANAALIAPTVARAAAAGHAVRVLCYPFPDVGLGEGVECLATATARDAWRVYRAMEVVQPSHESLLRDHRPDAIVADVPFWWTTGVAAELGVPRLTFHPVGIFALLAMNSLFTIRPDIIGRASSDAAGTVLSVPGLPGKEITIPVSELPTFLVQDDHLSKAWQRMRACQLTGFGVIVNTFADLEQPYCEEFSRVEARRAYFVGPLGKPSRSTMHRGGSGNADCLSWLSTKPSRSVVFVCFGSWAEFSATQTRELALGLEASNQPFLSKPNTT

SEQ ID NO: 1782 - protein, 278 aa, Zea mays
  VARIANT 137: note = Ancestral polymorphism is P, Derived polymorphism is T
MTLYLQLVSTSLHAGSPRLALLHLRRSCEFNPRVSMSSYSPPPPPPRDQSMDTEAPNAPITRERRLNPDLQEQLPKPYLARALEAVDPSHPQGTKGRDPRGMSVLQQHAAFFDRNGDGVIYPWETFQGLRAIGCGLTVSFAFSILINLFLSYPTQPGWLPSPLLSIRIDNIHKGKHGSDSETYDTEGRFDPSKFDAVFSKYGRTHPNALTKDELSSMLQGNRNTYDFLGWLAAAGEWLLLYSLAKDKDGLLQRETVRGLFDGSLFERLEDDNNKKKSS

SEQ ID NO: 1783 - protein, 456 aa, Zea mays
  VARIANT 84: note = Ancestral polymorphism is A, Derived polymorphism is V
MPSAAMTVAAGLATGPGSRVTRFAKSTAASVTPVRPGKTHALSPLDNAMERHTVHVVVYLRAAPGLDREQLKESLSEVLSLYPAMTGRLTRGEGSADAEPAHRGWVVKCNDAGVRMVDARAAVTLDEWLATATGDEEMDLLYYEPMGAEPYIWSPFYVQLTEFTDKSYALGLSCIHIHNDPTAAALFFHAWAAAHRRTTSTYPPFLHPPALAVSPTSPPPAPPLLAEKASAASPTSTDAAAAMSSATFHFPASAVRALLSSLEPGTTPFAALAALFWLRITGAADGERELTLALDFRKRMYAPLPWGYYGSSVHFTRARADLASGLPAVAAALDRHVAGVPEEELWRALEWLHTRQQQENAPFQMYGPELTCAALDHVPMYGAEFEAGASPARVSCRVGGATGEGLVLVLPAPEGGEARDVVVTLPAGATARVCRDAEVLRHGAEVVFGAKAEKEE

SEQ ID NO: 1784 - protein, 416 aa, Zea mays
  VARIANT 236: note = Ancestral polymorphism is A, Derived polymorphism is S
MSSNAGASVAPIGGGAARARSRSFGSSSSNGRAADGNGAGVFVRAGADNEMYVRADKIDLKNLDVQLEKSRSQVWLEHQRSQRTASPRPETPLLEWEIDLAKLDIQNQIAHGTFGVVYRGTYDGHDVAVKVLDWGHDGQNTAAKHREAFQKEVAVWQKLDHPNVTKFVGASMGTSQLKIPKKGSTTSSSSSSRGGRAAPNECCVVVVEFQHGGTLKTLLYNHRDKKLSYRKVVRLALDLARGLSYLHSKKVMHRDVKAENMLLDRKRTLKIADFGVARVEAQSCEVTGQTGTLGYMAPEVLQGKPYDHKCDVYSFGILLWETYCCAMAYPNYSLADISYHVVKLGIRPDIPRCCPRALVEIMTRCWDGNPDNRPEMSEVVALLEKIDTSSGKGGMTPVDDVAQGCSCFGFNHRSVA

SEQ ID NO: 1785 - protein, 384 aa, Zea mays
  VARIANT 293: note = Ancestral polymorphism is C, Derived polymorphism is Y
  VARIANT 285..384: note = Derived polymorphism lacks residues 285 to 384
  VARIANT 253..384: note = Derived polymorphism lacks residues 253 to 384
  VARIANT 246: note = Ancestral polymorphism is S, Derived polymorphism is N
  VARIANT 213: note = Ancestral polymorphism is I, Derived polymorphism is T
  VARIANT 140..384: note = Derived polymorphism lacks residues 140 to 384
  VARIANT 83: note = Ancestral polymorphism is T, Derived polymorphism is K
MTPPIPRTGGRACTTRRTTGTRTASGPSSRRRPSPRRSRNPGWPSSPRPSRRCSLAPLLMCSQLWRCRGFARFVNVRDDTGATPLHLAARQGWRRCVHVLLENGAIVSASSGAFGFSGSTPLHLAARDGNLDCVRQLLSWGADRLQRDSVGRIPYEVAAKRGHVACAALLNPSSAEPLVWPSALKFISELEPDAKSLLEAALMEANRERERRTLKGAKNALPSPSHPDDGAHGTAIAEASDAEVCSICFEQACSIEVRECGHQMCAACTLALCCHAKPNPATQSQPLPTCPFCRGGIARLVVATRTRAGDDEERGKLESPRHCQSRRSMSLSGDTPTRAAPAPSWAASPPPSARWATGEQRAASRSTTTSRSKIIVSFHASIHA

SEQ ID NO: 1786 - protein, 747 aa, Zea mays
  VARIANT 581: note = Ancestral polymorphism is S, Derived polymorphism is L
MAVAVLLRQRALSSPHAVSCRNGSYCLERLDPWALPVYTSGLFSNSDLHSKVNSTSLRFWRTYHNSGKFDLTDLTHPHMWYPKAREKKRNVFLHVGPTNSGKTYSALKRLEASSSGVYCGPLRLLAREVAQRLNKVNVPCNLITGQERNEIEGAKHSSVTVEMADMTTNYQCAVIDEIQMVGCKSRGYSFTRALLGLCSDELHVCGDPAAVPLIQRILEATGDVVTVQYYERLSPLVPLKSPLGSFSNIKAGDCLVSFSRRGIYKLKKRIEREGKHLCSVVYGSLPPETRTKQVFAYIWATMFNDDTSDLNVLVASDAIGMGLNLNISRIIFSTMMKFDGFCNRELTVAEIKQIAGRAGRYGSKFPVGEVTCLNPQDLPLLHSSLKSASSIIEVSFLHITFQQYECSKKLSNTSYGQKMCVSFHFVGLQERFLEKAKLSPDYFITDCEDMLKVAAIVDDLPLGLYDKYLFCMSPVDVSDDISAQGLVQASISILLFFFTIFCGTRIHVSNFFNMQFAENYARKGIVRLKEIFTPGTLQVPKTDNQLKELESVHKVLELYVWLSFRMDDSFPDREVAASQKSICSMLIEEYLERFGWQPQDRRKVLGGAQKLLQEYDVSQIGRAFNDAGGGDGGKAFNGAGGGDGGKAFNGAGGGDGGKAFNGAGGGDGGKAFNGAGGGGKDFNSAGGVGAADQVPGDGVSLRGTFKVGEAPRPSMVASNRFTAVGWLELNVLFYLSYCVTNSVHMGS

SEQ ID NO: 1787 - protein, 368 aa, Zea mays
  VARIANT 32..368: note = Derived polymorphism lacks residues 32 to 368
MLTGDLASCMIYLRLRVALCSCKKNTDPAVQRTQSLDHLLSLSRRGQDFAAGPAKHWSTANLRASGPGIYRCRAWAPTPEHEPRTVRASCRVLDSWSGAVGVFLRSKIQEMILRRRSRSMNSSAGAQRSHVPGQSARSSTSPCDGDSGGAGDGAAAASSKSATARALFASPRLLHSSSLPAGTVAFAKSPAPDAEPQTAFSMSPTSVLDAAAAFVPGTDGAGKRRPPWRARDNNGLADALDCSDHHHQQQQQERIVLAATPSSCSLARSCSLDRRVEFGVKNRSSWLPLRGREATAPAPADPWEIEPSSEDYTCVISRGPNPRTVHIFGDRVVEGGAGAGADAAAEREDSSPRQINLPARGDRGFFSL

SEQ ID NO: 1788 - protein, 174 aa, Zea mays
  VARIANT 26: note = Ancestral polymorphism is S, Derived polymorphism is R
  VARIANT 127..174: note = Derived polymorphism lacks residues 127 to 174
MTAQALLFLPFPRHPSRRSGGGAGGSRGVRFYCWCGRGGAARVIRLQFVAALVLGVAVLLSALFWLPPFAGQGGGKEGSDPGDEFGAVCVSGCIVEELQMDQSMQLYLLRSPPEKIDGRSNSRMQLQQGEKDRHQVLKDFSKLLDDQEFNSKYYHPSNARIWFYGDDDPKEHTF

SEQ ID NO: 1789 - protein, 558 aa, Zea mays
  VARIANT 192..558: note = Derived polymorphism lacks residues 192 to 558
MPPPSALPAVSGENPATAQLLGLSALFAQLAAYSRVVSSPQFFTAPTPARSRAPNLPARPNAPAPPCAPPPLLPVASTGAARAGAKRRARAEKVVQPERHSTRLAQKASSNFVNMTDKAVQRKEIQNSLQPCSAAVKKEVQKKGLLNKTKAPISVAALRKLTLLGGLLIFVPWCYVCVVMASCGKNLVVMSWNVRGLGDSDKCVLVRDAIVSSSPAIACLQETKLSDVTVFKAASFLPSSLASNFLHIPAAGTRGGILTAWNENSLQLNSYIIRRHALTCCFTLLAVNVVIHITNVYAPSDHRDAPDFLQILQEIHSHIDGPWLILGDFNLIRNASEKNKGAVSRSLCNLFNSCIDRLSLRELPLLDSLFTWSNKRRFPTLARLDRAFTNSNHASAFPSTTLTSRLRPTSDHKPILVTMSTAVPKSTLFRFENAWLQCPSFLPSVLLEWQPDPAILDAAGRLAGCLKRTRSAAKNFGEDRVREGGDLNVTFADKFLKTHKSLSQTRREYVTTGHEMSTGFPRPPSSMPAGSGVRCFHDGGYRPRGNDWMASVLFDSGG

SEQ ID NO: 1790 - protein, 399 aa, Zea mays
  VARIANT 141..399: note = Derived polymorphism lacks residues 141 to 399
MDETREMDPGAGVPRRAATASGTPTASRGSSTASSCSSNSNPSARASASTSTGTPPSAVVLPWAARAAAGDSCYYPGCRKDANCSCEMCLASIDATRDLVRAPEARRFFGGARDRRLFFRDRAAGAGSGSGEGSDATEPPWTPPMRSTAKSRRAPGREAAGGPEARAGVRSHDWLLYAATVIGFLLLMWVDTGLVPEAAARGFGPKLSPEAVARVGADARLAPGGLEHKLHVMERRVRQLVGGEGIANCSSRDSVWRFHQNDQQVFHWRCTVYKSVAEEVSVWGSPLRTSGLLPRALSARHLTLLSGEITEWSDGKVWPTVRASNGSSWAHRRQSAAAVRLEPETWVVEYQRSALFEGTRLLPAAAELIASRCSTMARRARRRMQGRRRLFGGAQANPT

SEQ ID NO: 1791 - protein, 692 aa, Zea mays
  VARIANT 158..692: note = Derived polymorphism lacks residues 158 to 692
MSPNKSGHASGRDAVFWSDRMNEYLIDSLLHQQAIGNRSESKFSSVAYDSIITGVGERFGVVIDRNNIKNRLKHIKESFNECRNLLGEDNRFRWCPESRRFNADPNVWRELIERKPEAKKWMMKTIDHYDSLMDLFGKNREKRQDVENSKGTSKKKARTEPPKEILQRTPLNRKGSALAESSDKTVDKCEIHDEIKTNVELDLSESCRTDNGIVAIPVRAYSYGKGLPYAPENWPRHGDIWHWKVGSRASGAGHWADRYIMPPSRFRGAAPKKLGFASRGFASRLQVEEFVKREFPDVDPSTFFSMFIWKIPAEGYRIQKGTRQVRIHEPEPVVADPGGLCKARNSLCNLQREGFVESSPARVCNICCKEPGFCRECCCLLCNRTVDYSLGSYSCIKCEAVVEENLICGHFAHLECALRCYMAGTVGGSFGLDVQYLCRLCDNKTNLMTHVEKLMETCQSLESRDQIKPMLNLGLCLLRGSKQMRARNLENHMRSAMEKLECGFDFVEVWKLEGDEGRTTLNAGENSPTTNGVTVLGARQVPEAGALTGHPDLIDPLVDNDFETVIENLPVFITGDQNAASAKFEDEIDLALQELKKSQEAEYSVAEQKLYAQKDHILCLYRQLDAERAELADPMPLSDASNYGAMLANVLSRVDQVKREEEKFRSMLKVAGGFAKAPQSVTREMFGLPADK

SEQ ID NO: 1792 - protein, 297 aa, Zea mays
  VARIANT 51: note = Ancestral polymorphism is T, Derived polymorphism is A
  VARIANT 163: note = Ancestral polymorphism is M, Derived polymorphism is I
  VARIANT 227..297: note = Derived polymorphism lacks residues 227 to 297
  VARIANT 236: note = Ancestral polymorphism is L, Derived polymorphism is F
MAAPFFSTPFQPYVYQSQQGSVTAFQISGGDVQVLQVMLKSQEKLTAKPGAMCYMSGNMQMDNNYLPENDGGVWQWIFGKRVSSTIFFNSGSDDGYVGIAAPFPGRILPVDLTNFSGELLCQADAFLCSVNDVSVSSTVEPRPRNIEIGAEMILKQKLRGQGMAFLVGGGSVMQKILAPREVITVDAACIVAMSATINFQLKSPNQLRRAVFGLFMPTISKKHGLMQGDNQLTASLTGPGVVFIQSLPFHRLSQRIASSRSVAGPSLRDNPKFFIQIVMFFFLAYVMIVSSIILTDV

SEQ ID NO: 1793 - protein, 538 aa, Zea mays
  VARIANT 95: note = Ancestral polymorphism is R, Derived polymorphism is H
MSATVFFLPANPSSTASPANTLRQLTPASTSGKLHFAAFPLRLPRHACARTYRSAAFGRGSPVAGRREKDYYATLNIRRDSTLQEIKSAYRILARKYHPDMNKSPEAEEKFKEISAAYEVLSDQDKRSLYDRFGEEGLSGDYRNGDIGTHGIDPYELFNAFFGSSDKLFGDSMGSGGFHYSAEAKDNRALNISYNLLLSFEESILGGKREINVFRHETCGTCHGTGAKCSNDITECTRCRGQGRLMKTQRTPFGIVSQISSCLNCEGSGKVITEHCTECYGSGRVQIERIIKVDIPGGIDDGSTIRISGGGNVDKQRGASGDLYIFVRVNKKQGIHRDGLNLYSDASVDYTDVILGTTVKVETIEGLKDLHIPPGTQPGENLKFSQLGVPDIKKPNVRGDHYFMIKVKIPKSISGQERLLVEELAALKKAQNISVPEPTKIENFRERNHHPSAKRRSFWGRVWNFFRDDKGDKRFASISVQPIIPGWNSCRGTDTAVPLLLKGFLMTAIFLFVIRSKLRYTGKRIDRPTQAEIPVEPE

SEQ ID NO: 1794 - protein, 228 aa, Zea mays
  VARIANT 2: note = Ancestral polymorphism is E, Derived polymorphism is D
  VARIANT 24: note = Ancestral polymorphism is R, Derived polymorphism is C
  VARIANT 195: note = Ancestral polymorphism is Q, Derived polymorphism is R
METVKSLLKPKPTPQQQLREWQRRLRNEGRNIDRQIRDVQREEKKVEKAIREAAKRNDMGSAKALAMEVVRSRKAVNRLYENKAQLNSISMHLGEIVATARTVGHLSKSTEVMKLVNGLMKAPEVAATMQEFSKEMTKAGVMEEMVNDALDSTLDSEDMEEEIEEEVDKVLTAIAGETASELPDAVRKEKEKMKQPSTSVPEERTAIAEAVDDGELDQIRERLARVRS

SEQ ID NO: 1795 - protein, 140 aa, Zea mays
  VARIANT 137: note = Ancestral polymorphism is G, Derived polymorphism is C
MSSRRPSHPSHRNPRRFPSACYLLVLTLALLVVSAAAKSSRRPISDNEIRQKKEACYTDVENGLWGWVCRYSPTEKENCVLRCLSPECYDLIYGGDPVSGGIRILRKGSWTMFEARSTSIVCTSKNDQNISNMFVWGFKC

SEQ ID NO: 1796 - protein, 385 aa, Zea mays
  VARIANT 88: note = Ancestral polymorphism is A, Derived polymorphism is S
MAGFCTPAATAAAHAALTPLTSSRKHIAMCLSPRPSGGGGIGGGQRARLASTGAAPQVRALAPTTAAEEAAGPSPAPLNVEYLAAEFAGHGVSFEPVGVSCAVKMSLRNGSVAHVLLPSGLVTSYKPAMWHGTVTEVLHTNVAEVPGGRAVIRGGVFVDLRCDGCDGVWSPSASGAWSLRDVRGSPATSIEVELASAAPGNAAAARCVVTLHPEALATELTVTNNASAASSPPMALTCSVPSHLRVSTPDATYALGLQGSDYRSVEPALSEFSIIPPGYGAARQAAAGTTARNQWANKGLDMILSGGQQDRGAADEPDGEEDDDYKHMTDAMKGFEELYVFSPGSQYQWYGKYAYVVVGPAMLEPVMLEPGDTWRGAQYLRNPNL

SEQ ID NO: 1797 - protein, 249 aa, Zea mays
  VARIANT 149..249: note = Derived polymorphism lacks residues 149 to 249
  VARIANT 192: note = Ancestral polymorphism is Y, Derived polymorphism is C
  VARIANT 196: note = Ancestral polymorphism is G, Derived polymorphism is C
  VARIANT 213: note = Ancestral polymorphism is A, Derived polymorphism is V
  VARIANT 229: note = Ancestral polymorphism is R, Derived polymorphism is W
  VARIANT 235: note = Ancestral polymorphism is A, Derived polymorphism is T
  VARIANT 245: note = Ancestral polymorphism is A, Derived polymorphism is V
MEHPVNTVSSPKLNLYTVDIKVEGFLSVHSYEKRFMLLASVFEMEKNTPMHVVPPHNDNAPPCILIAEEVHLTPPCTLIAEEDHPTFVCKEVDCEQPSDVDADGDEPNLPDVFDSVEEYVGVNDEYLYGVITNPSTEPNDPNETFEAIENETTSHPYNETIPATTRRHVLEAELNDADPEAVVVLHDPLKPYIRKGALFFDIITFRKAIRHFAITNGFEFAGLNTDKTRFIAHYAAKGCPWRIHASRLQ

SEQ ID NO: 1798 - protein, 72 aa, Zea mays
  VARIANT 1: note = Ancestral polymorphism is M, Derived polymorphism is I
  VARIANT 8: note = Ancestral polymorphism is N, Derived polymorphism is I
  VARIANT 35..72: note = Derived polymorphism lacks residues 35 to 72
MMNSKLFNDLSKMKAATKHYLQDYEERKARVVVEEVCDELAKEITEYKAKVEALRSESMKIKDELEEEMMML

SEQ ID NO: 1799 - protein, 1199 aa, Zea mays
  VARIANT 34..1199: note = Derived polymorphism lacks residues 34 to 1199
MRRGLRRGLGILLVPLPHAPSRLPPISLAALLPRRFNGFSRHSFCSFPVGERAVEQFSDDEYDHEYEDLRVRATSSSAGTRMIPRCDLHRNSFVFFVCSAPRNDFLLHVQPSSSVANIDEWRWKLSMLQRNAEEQEIISRDRRDRRDYDQIANLAKRMGLYSEMYGRVVVASKVPLPNYRPDLDDKRPQREVVIPLGLQRRVEGLVQEHLDRAFLPLNKCGGNTKNGSDMTENANLDEQHDSLLDRSVMEKILQRKSIRMRNFQRSWQESPEGAKMLEFRRSLPADKEKERLLAAIARNQVIVISGETGCGKTTQLPQFVLESEIESGRGAFCNIICTQPRRISAMAVAERVSTERGENLGESVGYKVRLEGIKGKDTHLLFCTSGILLRRLLSDRNLNGVTHVFVDEIHERGMNEDFLLIVLKELLSRRRDLRLILMSATLNAELFSSYFGGAPTIHIPGFTHPVRAHFLEDILERSGYKLTSSNQLDDYGQDKVWKTQRQLLPRKRKNQITTLVEEALKNSSFEIYGSRTRDSLVNWNPDCIGFNLIEAVLCHICRKERPGAVLVFMTGWDDISCLKDQLKAHPLLGDPNRVFLLACHGSMATSEQRLIFEKPPPNVRKVVLATNMAEASITINDIVFVVDCGKAKETTYDALNNTPCLLPSWISKASARQRRGRAGRVQPGECYHLYPRCVYDAFADYQLPELLRTPLNSLCLQIKSLQVGSIGEFLSAALQPPEPRAVENAVEFLKMIGALDGNENLTDLGRYLSMLPVDPKLGKMLIMGAVFRCIDPILTVVAGLSVRDPFLLPQEKKDVSLLISAISLAGTAKARFSAKDYSDHMALVRAYEGWKDAEREGSAYEYCWRNFLSSQTLQAIHSLRKQFSYILKDSGLIDSDGNTNNSLSHNQSLVRGIICSGLFPGIASVVHRESSMSFKTMDDGQVLLYANSVNAKYQTIPYPWLVFGEKVKVNAVFIRDSTGVSDSILILFGGAVAKGGMAGHLKMLDGYIDFFMDPSLSECYLQLKEELDKLIQQKLEDPNFDIHKEGKYILFAVQELAAGDLCEGRFVFGRETSRARLRSPEDDGKSNLIKDGMNPKSLLQTLLMRAGHTPPRYKTKHLKTNEFRAVVEFKGMQFVGKPKRNKQLAERDAAIEALGWLTQTSGVKAPDENDDDSPLDLTDSMLKLLTRPRRHSKNSSRKR

SEQ ID NO: 1800 - protein, 657 aa, Zea mays
  VARIANT 342..657: note = Derived polymorphism lacks residues 342 to 657
MLHRPPFCLFRLSSVNRGLYIYRWFEVIGRTTQAKMASVHKATTLVLMFCLLALGRAEYLKYKDPKQPVAVRIKDLLGRMTLAEKIGQMTQIERENATADALAKYFIGSVLSGGGSVPAPQASAQAWAAMVTEMQKGALSTRLGIPIIYGIDAVHGHNNVYKATIFPHNVGLGATRDPDLVKRIGEATALEVRATGIPYAFAPCIAVCRDPRWGRCYESYSEDPKVVQSLTSLISGLQGDAPADSAGRPYVGGSKKVAACAKHYVGDGGTHNGINENNTIIDTHGLLSIHMPPYYNSIIRGVSTVMVSYSSWNGVKMHANHFLVTDFLKNKLKFRGFVISDWEGIDRITTPPHANYSYSIEAGVGAGIDMIMVPFRYTEFIDDLTTQVQNKVIPMSRIDDAVYRILRVKFTMGLFENPYPDSSLAGELGKQEHRELAREAVRKSLVLLKNGKSSYAPLLPLPKKAGKILVAGSHANDLGNQCGGWTITWQGSSGNTTAGTTILSGIEATVDPSTQVVYSESPDSGVLADKYDYAIVVVGEPPYAETFGDNLNLTIPAPGPSVIQSVCGAAKCVVVLISGRPLVVEPYLGDMDALVAAWLPGSEGQGVADVLFGDYGFTGKLPRTWFKSVDQLPMNVGDAHYDPLFPFGFGLTTKGTK

SEQ ID NO: 1801 - protein, 186 aa, Zea mays
  VARIANT 151..186: note = Derived polymorphism lacks residues 151 to 186
  VARIANT 119: note = Ancestral polymorphism is G, Derived polymorphism is R
  VARIANT 108..186: note = Ancestral polymorphism lacks residues 108 to 186
  VARIANT 30: note = Ancestral polymorphism is G, Derived polymorphism is R
MEAGRESSKAKRARAAMSNEDDTTSQGNAGGGAAASAAETEGDEMAVVAAEAEAEADEQVGSAETEEHIQRILLAIDNYTRQVSDMLDAGRALFKDLAADFEDRLCSYDPQGEGGAVGGGDPGAARPRRRQRAGPRPPPQRPAAPPPHRPRLTDRPIHPDLSSNNLPAHHCCLSRMIVLYYACVHI

SEQ ID NO: 1802 - protein, 248 aa, Zea mays
  VARIANT 46: note = Ancestral polymorphism is P, Derived polymorphism is L
  VARIANT 47: note = Ancestral polymorphism is E, Derived polymorphism is K
  VARIANT 53: note = Ancestral polymorphism is G, Derived polymorphism is R
  VARIANT 58: note = Ancestral polymorphism is G, Derived polymorphism is R
  VARIANT 74: note = Ancestral polymorphism is D, Derived polymorphism is N
  VARIANT 75: note = Ancestral polymorphism is E, Derived polymorphism is G
  VARIANT 78: note = Ancestral polymorphism is A, Derived polymorphism is T
  VARIANT 94: note = Ancestral polymorphism is S, Derived polymorphism is L
  VARIANT 103: note = Ancestral polymorphism is C, Derived polymorphism is Y
  VARIANT 130: note = Ancestral polymorphism is R, Derived polymorphism is W
  VARIANT 133..248: note = Derived polymorphism lacks residues 133 to 248
  VARIANT 162: note = Ancestral polymorphism is A, Derived polymorphism is V
  VARIANT 167: note = Ancestral polymorphism is L, Derived polymorphism is P
  VARIANT 178: note = Ancestral polymorphism is T, Derived polymorphism is I
  VARIANT 205: note = Ancestral polymorphism is L, Derived polymorphism is P
MAASGMEDERVSGEVREQEDDDDNVPQLSAAAMEALREFLAEQHRPEEQNEAGGGEDGVELVPEDWRLSQFWYDERTARELVEEVVRLVSPSGSGSAAGAVACIACPTLYAYLKKTDPGVPAQLLEYDERFGQYGGDFTFYDYNRPEELPAAMKHAYRVIVADPPYLSKECLEKVAKTVSFLARPEGSFLLLLTGEVQMDRALELLNVRPCGFRPRHSNKLGNEFRLFTNYDPADRLGGWEQSDGAPI

SEQ ID NO: 1803 - protein, 262 aa, Zea mays
  VARIANT 191..262: note = Derived polymorphism lacks residues 191 to 262
  VARIANT 174: note = Ancestral polymorphism is K, Derived polymorphism is N
  VARIANT 166: note = Ancestral polymorphism is T, Derived polymorphism is I
  VARIANT 146: note = Ancestral polymorphism is G, Derived polymorphism is S
  VARIANT 144: note = Ancestral polymorphism is G, Derived polymorphism is R
  VARIANT 142: note = Ancestral polymorphism is G, Derived polymorphism is S
  VARIANT 129: note = Ancestral polymorphism is C, Derived polymorphism is R
  VARIANT 124: note = Ancestral polymorphism is A, Derived polymorphism is P
  VARIANT 83..262: note = Derived polymorphism lacks residues 83 to 262
  VARIANT 75: note = Ancestral polymorphism is S, Derived polymorphism is F
  VARIANT 71: note = Ancestral polymorphism is G, Derived polymorphism is R
  VARIANT 69: note = Ancestral polymorphism is E, Derived polymorphism is K
  VARIANT 61: note = Ancestral polymorphism is P, Derived polymorphism is L
  VARIANT 57: note = Ancestral polymorphism is G, Derived polymorphism is C
  VARIANT 33: note = Ancestral polymorphism is T, Derived polymorphism is A
  VARIANT 25: note = Ancestral polymorphism is C, Derived polymorphism is Y
MREILHIQGGQCGNQIGAKFWEVICDEHGIDATGRYAGDSDLQLERVNVYYNEASGGRFVPRAVLMDLEPGTMDSLRSGPFGQIFRPDNFVFGQSGAGNNWAKGHYTEGAELIDSVLDVVRKEAENCDCLQGFQVCHSLGGGTGSGMGTLLISKIREEYPDRMMLTFSVFPSPKVSDTVVEPYNATLSVHQLVENADQCMVLDNEALRKAFLHWYTGEGMDEMEFTEAESNMNDLVAEYQQYQDATADEEYEDEDEEEAVSE

SEQ ID NO: 1804 - protein, 501 aa, Zea mays
  VARIANT 401..501: note = Derived polymorphism lacks residues 401 to 501
  VARIANT 300..501: note = Derived polymorphism lacks residues 300 to 501
  VARIANT 95..501: note = Derived polymorphism lacks residues 95 to 501
  VARIANT 34: note = Ancestral polymorphism is P, Derived polymorphism is L
  VARIANT 25..501: note = Derived polymorphism lacks residues 25 to 501
  VARIANT 22: note = Ancestral polymorphism is G, Derived polymorphism is S
MASSSPDLADDGFAAPRLFSQGVSYTYDDVIFLPGYIGFPADAVDLSTRLSRRVPLSIPCVASPMDTVSEAAMAAAMASLGAAAVVHCNTEPHSQAAIVRAAKSRRLPFVSSVPFFSPSSSPTLNDFAGSEYALVTERGDSLSRLVGIAVAADAASREVPISVSEYMRPTPRSASSAFDFEEAATFLADEGLDYAPLVSDDGEVVDLITAKDVERIRSYPKLGKPSLGANGKFVVAASIGTREDDKGRLEQLVKAGANAIVIDSSQGNSIYQLDMIKFAKKMYPEVDLIGGNVVTIAQAQNLIQAGVDGLRVGMGSGSICTTQEVCAVGRGQATAVYKVSSYAKDHNVPVIADGGISNSGHIVKALSLGASTVMMGSFLAGSHEAPGTYEYKDGRRVKKYRGMGSLEAMTKGSDARYLGDTLKLKVAQGVVGAVADKGSVLRFIPYTMQAVKQGLQDLGADSVQSAHDLLRSETLRLEVRTGAAQAEGGIHGLVSYVKKAF

SEQ ID NO: 1805 - protein, 154 aa, Zea mays
  VARIANT 19: note = Ancestral polymorphism is E, Derived polymorphism is D
  VARIANT 64: note = Ancestral polymorphism is A, Derived polymorphism is D
  VARIANT 69: note = Ancestral polymorphism is L, Derived polymorphism is P
  VARIANT 81: note = Ancestral polymorphism is C, Derived polymorphism is R
  VARIANT 84: note = Ancestral polymorphism is R, Derived polymorphism is M
  VARIANT 90: note = Ancestral polymorphism is R, Derived polymorphism is G
  VARIANT 92: note = Ancestral polymorphism is R, Derived polymorphism is C
  VARIANT 108: note = Ancestral polymorphism is L, Derived polymorphism is F
  VARIANT 117: note = Ancestral polymorphism is A, Derived polymorphism is V
MAMVSNASSGMGVAPNIRETFVELQMKKAFRYVIFKIEEKQKQILRLYMYPCGASYSFMLNAYALAFPLVSVHQTFYLIYRYPRSPLTSRIRAKMLYSTSKDRIKYELDGFHYEIQATDPSEVARWTLRFCGSGLTEAGSPLKKGPMEGHEPFG

SEQ ID NO: 1806 - protein, 73 aa, Zea mays
  VARIANT 29: note = Ancestral polymorphism is R, Derived polymorphism is M
MGFVLVVSLPFIFFSILLGFGCYFLGKHRGREEMRTGIGVQIYGTPLPPPGVVGASSPPPEPFHSKKQWSEAV

SEQ ID NO: 1807 - protein, 210 aa, Zea mays
  VARIANT 183..210: note = Derived polymorphism lacks residues 183 to 210
  VARIANT 171: note = Ancestral polymorphism is A, Derived polymorphism is T
  VARIANT 170: note = Ancestral polymorphism is R, Derived polymorphism is C
  VARIANT 153: note = Ancestral polymorphism is R, Derived polymorphism is S
  VARIANT 152: note = Ancestral polymorphism is L, Derived polymorphism is P
  VARIANT 126: note = Ancestral polymorphism is L, Derived polymorphism is Q
  VARIANT 105: note = Ancestral polymorphism is S, Derived polymorphism is L
  VARIANT 101: note = Ancestral polymorphism is P, Derived polymorphism is L
  VARIANT 97: note = Ancestral polymorphism is R, Derived polymorphism is W
  VARIANT 95: note = Ancestral polymorphism is C, Derived polymorphism is S
  VARIANT 93: note = Ancestral polymorphism is T, Derived polymorphism is I
  VARIANT 90: note = Ancestral polymorphism is A, Derived polymorphism is V
  VARIANT 71: note = Ancestral polymorphism is A, Derived polymorphism is T
  VARIANT 56: note = Ancestral polymorphism is R, Derived polymorphism is C
  VARIANT 45: note = Ancestral polymorphism is V, Derived polymorphism is M
  VARIANT 39: note = Ancestral polymorphism is D, Derived polymorphism is N
  VARIANT 30: note = Ancestral polymorphism is L, Derived polymorphism is Q
  VARIANT 26: note = Ancestral polymorphism is T, Derived polymorphism is M
  VARIANT 24: note = Ancestral polymorphism is S, Derived polymorphism is R
  VARIANT 14..210: note = Derived polymorphism lacks residues 14 to 210
  VARIANT 11: note = Ancestral polymorphism is E, Derived polymorphism is K
MADSGALVVTEARQQHPLSQIAASGTHRLLLKQWVKEEDLLARRVALREARLDGARKEIAFLYCAFFAFHAASVLLLFLSSSSSVAASAAATTACRRSWIPCLVSLLSSLAMLWALRYKSDTEAVLERVLAREREDALLLARCVTELKRKGLRFDLLKEVDALRRAKNLRAEAKGAADRPRRWQARDLAVFALFAAACGVLVLTRFLLCN

SEQ ID NO: 1808 - protein, 186 aa, Zea mays
  VARIANT 65..186: note = Derived polymorphism lacks residues 65 to 186
  VARIANT 12: note = Ancestral polymorphism is P, Derived polymorphism is L
  VARIANT 9: note = Ancestral polymorphism is S, Derived polymorphism is R
MEQTEAAVSGALGAGVEGGDKTARKALKVVAAVDASEESLHALSWALDNVVRCHPDATLVVVHAQHAADHFAYPVAAHGIGTEGIVYAPSSAVESVRAAQEESSRRVVARALDICKERQVDATGAVVEGDAKEAIRQAVERMQAGLLVLGSRGLGAIKRAFLGSVSDYLIHHACCPVLVVRPRPTK

SEQ ID NO: 1809 - protein, 373 aa, Zea mays
  VARIANT 16..373: note = Derived polymorphism lacks residues 16 to 373
MALLMEPGAEPLTESEQADLAGIAAIKESAAREYKEQGNQFVRMGRRHYAAAVSCYTKAIAQMEPLSSLDASAAADASVLFANRAHVNILLGNHRRALDDAEQAIRLSPSSVKAYYRAVKAALALDLLTDAASFCRKGLEQDPPNEEFKKLLSEVDSKLREQDRQRAKVAQAIAKAKDLAAAMGKRGVKLGKAAYQELTGVKKPVLDEQGVLHWPVLLLYPEVMSSDFIEDFPDTDTFSPHLDVMFSETSPPLPWDDNHVYTRDSIELYYQGGFGKPLSRSEVLRYLLEGNVDSKALPDSLLDGEDEEHDSTKCTTVTSTDSSSKWIKVKEGKTLQEVLQDKGYIVPAIPVFFVVSRKSTFYKDFKAGNWSLP

SEQ ID NO: 1810 - protein, 77 aa, Zea mays
  VARIANT 66: note = Ancestral polymorphism is H, Derived polymorphism is N
  VARIANT 48: note = Ancestral polymorphism is L, Derived polymorphism is F
  VARIANT 44: note = Ancestral polymorphism is R, Derived polymorphism is C
  VARIANT 33..77: note = Derived polymorphism lacks residues 33 to 77
  VARIANT 31: note = Ancestral polymorphism is V, Derived polymorphism is F
  VARIANT 19: note = Ancestral polymorphism is P, Derived polymorphism is L
  VARIANT 16: note = Ancestral polymorphism is D, Derived polymorphism is N
MFVLHNFSLIYIPGNDERPICILCNQFANYVVQKVLEICDDQNCELILSRIKVYLNALKRYDYGKHIVARVDKVIAT

SEQ ID NO: 1811 - protein, 1251 aa, Zea mays
  VARIANT 478..1251: note = Derived polymorphism lacks residues 478 to 1251
  VARIANT 482..1251: note = Derived polymorphism lacks residues 482 to 1251
MHLDGVDDELGGGSCAPSPARFELQEDPSFWKDNNVQVAIRIRPLSGSEVSMQGQKRCVRQDSSQSLTWIGHPESRFTFDLVADEHVTQEGMFNVAGVPMVENCIAGYNSCMFAYGQTGSGKTHTMLGDIENGTRRNNVNCGITPRVFEHLFVRIQKEKELRRDEKLMFTCKCSFLEIYNEQILDLLNPNSVNLQIREDARKGIHVENLTEHEISNAREALQQLIEGAANRKVAATNMNRASSRSHSVFTCLIESKWESQGIKHHRFSRLNLVDLAGSERQKSSGAEGERLKEATNINKSLSTLGLVITNLIAVSNKKSQHVPYRDSKLTFLLQDSLGGNSKTTIIANISPSSCCAAETLSTLKFAQRAKYIRNNAIINEDASGDVLSMRLQIQNLKKVISRLQGQLGSDKTESIASHGFVCESPSTFKWDQGHGMFTPLTFDKRATQRNDCDAALVAAFRREQEKEAQLKAVIDAKQTAEQLVAQKTEEVRSFKMRLKFREERIKRLEQVASGKLSAEAHLLQEKENLVKELEVLRGQLDRNPEITKFAMENLQLKEELRRLQSFVDEGEREMMHEQIIVLQDKLLEALDWKLMNEKEPINKGLSLFGESAGDEENEFLRLQAIQNEREIESLRKKMTFCLEAKDNLERHVNELTTELELTKKHNNTYKEFKAAQLQEQGEADLHNLSDAQMELKTLVDAIASASQREAEAHETAIGLAKENEELRLQLKVLIEDNKRLVELYEHTVVNVEANQDGNPVDDLLNAQPAATSDFHAHNSSSVAQESKIVDEKCTNEDNFSRVTSVELRLQLEEMHEENDRLMGLYEKAMQERDEFKRKILEQSDSEAVKHIQLDEKDVEMSEAAENPEVKHIHDSTIAALKEVLQIVRSKLELVQDKVVSAQDAVKYFKALEIASGKAEELSARIELQRLGAQRGQEEITFLKSVLSESQKKKNAFEGKYFLPAASCWNLVLKTKSLAESKFDASFGSMNQKKEQLNHLQTRKIELSAARTRARESETELKSKIDGLKAKLRAHEAQRKEEEKVLFAIDNLDTSTTLMHKPKNYGKATDLLKSEEDRMKLLCELQKAREQRSMVHKEIRSMNECDYIDREIGVLEAEIEDSCISILETDIEKFVRDNTLAEIWEGSAKDLEALLVDYQDCVFQVNLKEEEIKVCSESLQYQARDMDKLQSKLNQAIRELGELLQDRRSLTACSLDEPTLPVGEKVAADLEAVRIHVDEAKQLLILDNQANS

SEQ ID NO: 1812 - protein, 151 aa, Zea mays
  VARIANT 68: note = Ancestral polymorphism is R, Derived polymorphism is S
MREHWHGDGDGDGEDEHEPQPGCGEGAGQAAANCAAVCCCCPLALLDVLLLVTVRLPAGVMRRVRRRRRRRRGHGGAGANRKRPAPASPSGSSGKAMIGAATLDIDEEARGEVESAAAAELEREIMSSHFYGAGFWRSVSSNSSSSSRRYQ

SEQ ID NO: 1813 - protein, 539 aa, Zea mays
  VARIANT 521..539: note = Derived polymorphism lacks residues 521 to 539
  VARIANT 311..539: note = Derived polymorphism lacks residues 311 to 539
  VARIANT 244..539: note = Derived polymorphism lacks residues 244 to 539
  VARIANT 212..539: note = Derived polymorphism lacks residues 212 to 539
MASPGVVAAALLVAVLAAFCGTDPLRMGSMAGFPGFEAHFVDLPDPAEMPPHADERERLRGAEVRFRGDVQGPESVAFDPQGRGPYTGVADGRVVFWDGERWVPFATASPRWTQELCGGPKASPVEYLPNEHICGRPLGLRFDKKTGDLYIADAYFGLLKVGPEGGLATPLATEAEGVRLNFTNDLDLDDEGNVYFTDSSIHYQRRSRLRHSGRLRRPADAPTPNTTLAHALVRDQPAGASDGWHAEAANLARTRFQPSARGAAPCPGGDRQHRLRACDPLPATCPLAARAPSQDPHPPDVPYKRLALCRQDAAEALASPAALAKGRRPTRAVATSWNFMQLVFSGDPSGRLLKYNPQTKETTVLHRNLQFPNGVSMSKDGSFFVFCEGSRGRHSIFVFFGDRLSRYWLKGEKAGTVDLFAILPGFPDNVRTNEKGEFWVAIHCRRSLYARLMSRHVKLRKFLLSLPIPAKYHYLMQIGGRLHAVIIKYSPEGQVLDILEDTKGEVVRAVSEVEEKDGKLWIGSVLMPFIAVFDLAKAS

SEQ ID NO: 1814 - protein, 391 aa, Zea mays
  VARIANT 76: note = Ancestral polymorphism is A, Derived polymorphism is T
MASLTDLVNLDLSDCTDRIIAEYIWIGGTGIDLRSKARTVKGPITDPSQLPKWNYDGSSTGQAPGEDSEVILYPQAIFKDPFRKGNHILVMCDCYTPQGEPIPTNKRYSAAKVFSHPDVAAEVPCFLPYLVPHQDDLRLDWNRYGIEQEYTLLQKDGPYYCAAGADKAFGRDVVDAHYKACLYAGINISGINGEVMPGQWEFQVGPSVGISAGDEIWVARYILERITEMAGIVLSLDPKPIKGDWNGAGAHTNYSTKSMREAGGYEVIKAAIDKLGKRHKEHIAAYGEGNERRLTGRHETADINTFKWVGCFFLMRCEMVSVPLADSLTFVGVRYGVVLQGVANRGASIRVGRDTEREGKGYFEDRRPASNMDPYVVTGMIAETTILWNGN

SEQ ID NO: 1815 - protein, 1384 aa, Zea mays
  VARIANT 511: note = Ancestral polymorphism is V, Derived polymorphism is G
  VARIANT 942..1384: note = Derived polymorphism lacks residues 942 to 1384
  VARIANT 1230..1384: note = Derived polymorphism lacks residues 1230 to 1384
MSDRIIMITSPSKRDDARDIGDIDLQSYMDLENIAFYQVPANLESALSMESERSLGIHVCMDNSGVNFLHRFLRHLVEYKENYMNLRNILFHGIEWQVQGLQLLCSLLGPGSSVKQVEFKKNVFSTKPGHAFVPLSEMLHQNNTIKAVVFSECRIGSTGATLLASALANNRSVEDFQIWEDSIGSKGAEELSKMIEVNFMLKKLIILDNSSITVAPLISAVLARNRRVEVHIWGHGCGTKGGTNSCKIVEFLPETGSMKIYSSISSTGLQRVACALPWNTTVTTLDMSSVPLKSKWTKELRGVLERNRSLKTVKLSKCSLGDKAVVYIAAGLFKNSYLENLTLDGNRFGGVGVEHLLCPLSTFSPLQRQANTTLKVLSFGGERANISKFGVPAILQMLETNQSLIQLAICNDASLKPNDVVKIFTSLERNATLRSLSLRGCKGVEGEAILQTIMSTLEVNPWIEEIDLHGTPLHVAGKTDQIYEKLCQNESLVLPNDFLDLPLSAPTCCRVFLCGQESAGKSTLHNSINQSMNPLKSPHINITSTLMNPVLQMEYTNENKSSVFFDGNTKMTMYNLDGQEEGFPSHDFMFLVHGGPCFFMIVSSLVLKPANRYPKSIEQIELELIYWLKFLVSNSKRVSQLFLPSVTIVLTHYDKVAHLPEGLQPIATLVQRLREEFHSYAEIYPTVFAVDARSLVSVSRLTHHLRMTIKTILQQVPQVYEVCNDLVRVLHDWRLKNNKAVIKWSEFREICQLNIPELRLRSRRDNVEKVDTRRRTVAKSLHNLGEIIFFEDLGVLILDCDWFCRYVLNQLATLKSIKTERSGFIRKQELEKILQEKLCNQIQGSNWRAGASFQGNDVINLLLKLELCYEQEPGNPDTLLLVPSILEESKEGAQQWHLAMPECRYVGRCLKCTDIHMFLTGDFFPRLQVRLQNKIMCMGQQQGALYILEKNLIYTVVNSIHVRVVLGSTLESSVDVLACSSKSVTDMVRIFHKLIIPTILNLSSSLMFEESIIRPDCVKYLIPHRFLQTQQLPLKRMKQILLSLPAESMYDYEHTWSAIESNKRIILQSGSDHARELLSDDDFHEVLHRRYYDLQHLATELAVNPDNQQQHEIIPETDVVDPSILGIAKGVEMVLQRLKRVEQGIRDLKEEIASLRYYEYHLLTELHRKMDYMMNYNTQLEERKVPQMFYLVSLDNRSKQLVTRILPGMRSLRVHMLCEFRREMHVVEDQLGCDLIQVDNQTVKSLLPYMSKFMKLLTFALKIGAHFIVGMGEMIPDLSREVVRLLDSSALYGTTASAMSVGALGAAALYGKSRNGSTSDMGEDMTAARQWLVDFLKGQGVLTGMDIAQRFGLWRVRYRDDGHIAWICRKHIAAREEEIFELPL

SEQ ID NO: 1816 - protein, 740 aa, Zea mays
  VARIANT 83..740: note = Derived polymorphism lacks residues 83 to 740
MASRKSPVAAEERAGTGTGEGKGERCAVEEVALVVPETDDPSMPVMTFRAWALGLGSCVVLIFLNTFFTYRTQPLTISGILAQILVLPAGRFLAAVLPDREVRILGGRLGSFNLNPGPFNVKEHVIITIFANCGVSYGGGDAYSIGAITVMKAYYKQTLSFACALLIVLTTQILGYGWAGLLRRYLVDPAEMWWPSNLAQVSLFRALHEKEEEGGKSRGPSRMRFFLIVFFASFAYYALPGYLLPILTFFSWACWAWPHSITAQQVGSGYHGLGVGAFTLDWAGISAYHGSPLVAPWASIANTAVGFVMFIYVIVPLCYWQFNTFDARRFPIFSNQLFTASGQKYDTTKVLTKDFDLNVAAYDSYGKLYLSPLFAISIGSGFLRFTATIVHVLLFHGSDMWKQSKSAMNAVKLDVHAKLMQRYRQVPQWWFLMLLLGSVVVSLLMSFVWKEEMQLPWWGMLFAFALAFVVTLPIGQPGYDIIAQFMIGYALPGKPIANLLFKIYGRISTVHALSFLADLKLGHYMKIPPRCMYTAQLVGTVVAGVVNLAVAWWMLDNIENICDVEALHPDSPWTCPKYRVTFDASVIWGLIGPGRLFGQHGLYRNLVWLFLVGAVLPVPVWLLSRAFPEKKWIALINVPVISYGFAGMPPATPTNIATWLVTGTIFNYFVFRYRKGWWQKYNYVLSAALDAGTAFMGVLIFFALQNAHHELKWWGTEVDHCPLASCPTAPGIAVKGCPVF

SEQ ID NO: 1817 - protein, 609 aa, Zea mays
  VARIANT 16..609: note = Derived polymorphism lacks residues 16 to 609
  VARIANT 65..609: note = Derived polymorphism lacks residues 65 to 609
  VARIANT 79..609: note = Derived polymorphism lacks residues 79 to 609
MSNLLQKKVLPCIASQLNCTILSRGELLKICYEIPIIIILYIWQPPFVQRSLLYKIQARRKKRIQITVSLSASTNTQAQNIFPLYVLLARPTSNISLEGHSPIYRFSRACLLTNFSEFGNKDKTEATFIIPDVKNLSTSRACNLNIIFISRGQVGQIIGEDSCSGNDVEGSSLQKLEGKCSWGKMPTNLLAPSLEKCVTLSTGNAVDLTSTVTMNPSFLEPKFLEQDSCLTFCSHKVDATGSYQLQVCISAEEAGARELLLSPYYCNYSYNNVPPSLLPEIISNFVLHRLRAGNVLFNYKYYNNTMQKTEVTEDFSCPFCLVPCGSFKGLGCHLNSSHDLFHYELWISEECQAVNVSLKADAWKTEFVAEGVDPRHQTFSYCSRFKKRRRLETTAEKFRHVHPHIMESGSHEDAQAGSEDDYVQRENGLSVANTSVDPSQPVHGSNLSPPTVLQFGKSRKLSAERSDPRNRQLLQKRQFFHSHRAQPMPLEQVLSDHDSEDEVDDDIADFEDRRMLDDFVDVTKDEKLIMHMWNSFVRKQRVLADGHIPWACEAFSRCHGQQLVQNPALLWGWRFFMIKLWNHSLLDARAMNACNTILQGYQDGSADPK

SEQ ID NO: 1818 - protein, 1135 aa, Zea mays
  VARIANT 991..1135: note = Derived polymorphism lacks residues 991 to 1135
MSLPSNNRRTCSRSSSARSKHSARVVAQTPVDAQLHAEFEGSQRHFDYSSSVGAANRPSASTSTVSTYLQNMQRGRYIQPFGCLLAVHPDTFALLAYSENAPEMLDLTPHAVPTIDQRDALGIGVDVRTLFRSQSSVALHKAAAFGEVNLLNPILVHARTSGKPFYAILHRIDVGLVIDLEPVNPADVPVTAAGALKSYKLAAKAISRLQSLPSGNLSLLCDVLVREVSELTGYDRVMAYKFYEDEHGEVISECRRSDLEPYLGLHYPATDIPQASRFLFMKNKVRMICDCCATPVKVIQDDSLAQPLSLCGSTLRASHGCHAQYMANMGSVASLAMSVTINEDEEEDGDTGSDQQPKGRKLWGLVVCHHTSPRFVPFPLRYACEFLLQVFGIQLNKEVELAAQAKERHILRTQTLLCDMLLRDAPVGIFTRSPNVMDLVKCDGAALYYQNQLLVLGSTPSESEIKSIATWLQDNHDGSTGLSTDSLVEAGYPGAVALREVVCGMAAIKISSKDFIFWFRSHTTKEIKWGGAKHEPVDADDDGRRMHPRSSFKAFLEVVKWRSVPWEDVEMDAIHSLQLILRGSLPDEDANRNNVRSIVKAPSDDMKKIQGLLELRTVTNEMVRLIETATAPVLAVDIAGNINGWNNKAAELTGLPVMEAIGRPLIDLVVTDSIEVVKQILDSALQGIEEQNMEIKLKTFHEHECNGPVILKVNSCCSRDLSEKVIGVCFVAQDLTRQKMIMDKYTRIQGDYVAIVKNPTELIPPIFMINDLGSCLEWNKAMQKITGIKREDAINKLLIGEVFTLHDYGCRVKDHATLTKLSILMNAVISGQDPEKLFFGFFDTDGKYIESLLTVNKRTDAEGKITGALCFLHVASPELQHALQVQKMSEQAATNSFKELTYIRQELRNPLNGMQFTCNLLKPSELTEEQRQLLSSNVLCQDQLKKILHDTDLESIEQCYMEMNTVEFNLEQALNTVLMQGIPLGKEKQISIERNWPVEVSCMYLYGDNLRLQQILADYLACALQFTQTAEGPIVLQVMSKKENIGSGMQIAHLEFRIVHPAPGVPEALIQEMFQHNPGVSREGLGLYISQKLVKTMSGTVQYLREADTSSFIILMEFPVAQLSSKRSKPSTSKF

SEQ ID NO: 1819 - protein, 165 aa, Zea mays
  VARIANT 139: note = Ancestral polymorphism is R, Derived polymorphism is H
  VARIANT 97: note = Ancestral polymorphism is D, Derived polymorphism is Y
  VARIANT 87: note = Ancestral polymorphism is A, Derived polymorphism is T
  VARIANT 74..165: note = Derived polymorphism lacks residues 74 to 165
  VARIANT 64..165: note = Derived polymorphism lacks residues 64 to 165
  VARIANT 54: note = Ancestral polymorphism is L, Derived polymorphism is S
  VARIANT 52: note = Ancestral polymorphism is T, Derived polymorphism is I
  VARIANT 46..165: note = Derived polymorphism lacks residues 46 to 165
  VARIANT 36: note = Ancestral polymorphism is T, Derived polymorphism is M
  VARIANT 15..165: note = Derived polymorphism lacks residues 15 to 165
  VARIANT 13..165: note = Derived polymorphism lacks residues 13 to 165
  VARIANT 11: note = Ancestral polymorphism is V, Derived polymorphism is L
  VARIANT 9: note = Ancestral polymorphism is G, Derived polymorphism is V
MKSDNFLFGKVFWAQNRMALSNEQIEAMRHRENRGTIINYIYEKYGMHITVTELKMTPLCIFVQLVERCRLLLQSDDLGMFPEERQAWVHALGGGMDGRAEAVLDLPPRLAATVTARLGGPHPGGGPLVEPAWARRRQRRGPLSGLQVTVISSDEGDEGSLYIFR

SEQ ID NO: 1820 - protein, 62 aa, Zea mays
  VARIANT 12: note = Ancestral polymorphism is P, Derived polymorphism is L
  VARIANT 16: note = Ancestral polymorphism is A, Derived polymorphism is G
  VARIANT 19: note = Ancestral polymorphism is S, Derived polymorphism is I
  VARIANT 23: note = Ancestral polymorphism is E, Derived polymorphism is D
  VARIANT 39: note = Ancestral polymorphism is R, Derived polymorphism is H
  VARIANT 49: note = Ancestral polymorphism is K, Derived polymorphism is E
  VARIANT 54..62: note = Derived polymorphism lacks residues 54 to 62
  VARIANT 60: note = Ancestral polymorphism is K, Derived polymorphism is T
MRLTFVCDDGYPEQLALLSNDFEFSEVMIEEISADNSGRSFLIRISESKVFYYWCAEKSKED

SEQ ID NO: 1821 - protein, 85 aa, Zea mays
  VARIANT 62: note = Ancestral polymorphism is D, Derived polymorphism is G
  VARIANT 52: note = Ancestral polymorphism is G, Derived polymorphism is R
  VARIANT 45: note = Ancestral polymorphism is A, Derived polymorphism is V
  VARIANT 43: note = Ancestral polymorphism is L, Derived polymorphism is P
  VARIANT 38: note = Ancestral polymorphism is V, Derived polymorphism is I
  VARIANT 30: note = Ancestral polymorphism is A, Derived polymorphism is V
  VARIANT 24: note = Ancestral polymorphism is T, Derived polymorphism is I
MFRPKNPAYKEVWHTASMYHLVHTAALLEAPITKRPNVFGGLLTAGIVLFSGTCYTVAYLEGRKFSSPAPLGGFAFIAAWASLLF

SEQ ID NO: 1822 - protein, 853 aa, Zea mays
  VARIANT 60..853: note = Derived polymorphism lacks residues 60 to 853
  VARIANT 77..853: note = Derived polymorphism lacks residues 77 to 853
MAAAVAMRGGSSDSGGFDKVPGMDSGKYVRYTPEQVEVLERLYIDCPKPSSSRRQQLLRECPILSNIEPKQIKVWFQNRRCRDKQRKESSRLQAVNRKLTAMNKLLMEENERLQKQVSQLVHENAHMRQQLQNTSLANDTSCESNVTAPPNAIRDASNPSGLLAIAEETFTEFLSKATGTAIDWVQMPGMKVISQLSILVLSLKPGPDSVGIVAISHGCRGVAARACGLVNLEPTKVIEILKDRPSWFRDCRSLEVFTMFPAGNGGTIELIYMQMYAPTTLVPARDFWTLRYTTTMEDGSLVVCERSLTGSGGGPNAASAQQFVRAEMLPSGYLVRPCEGGGSIVHIVDHLDLEAWSVPEVLRPLYESSRVVAQKMTTVALRHLRQIAQETSGEVVYALGRQPAVLRTFSQRLSRGFNDAISGFNDDGWSVMGGDGIEDVVVACNSTKKIRNNSNAGITFGAPGGIICAKASMLLQSVPPAVLVRFLREHRSEWADYNIDAYLASSLKTSACSLPGLRPMRFSGGQMIMPLAHTVENEEILEVVRLEGQPLTHDEALLSRDIHLLQLCTGIDEKSVGSSFQLVFAPIDEHFPDDAPLISSGFRVIPLDMKTDGVSSGRTLDLASSLDVGSAAPQASGDAPPDDCNLRSVLTIAFQFPYEMHLQDSVATMARQYVRSVVSAVQRVSMAISPSQSGLNAGQRMLSGFPEAATLARWVCQSYHYHLGVELLNQSDEAGEALLKMLWHHPDAVLCCSFKEKPMFTFANKAGLDMLETSLIALQDLTLDKIFDESGRKAIFSDISKLMEQGYAYLPSGVCMSGMGRHVSFDQAVAWKVLGEDSSVHCLAFCFVNWSFV

SEQ ID NO: 1823 - protein, 184 aa, Zea mays
  VARIANT 168: note = Ancestral polymorphism is S, Derived polymorphism is L
  VARIANT 160: note = Ancestral polymorphism is G, Derived polymorphism is R
  VARIANT 153: note = Ancestral polymorphism is E, Derived polymorphism is K
  VARIANT 147: note = Ancestral polymorphism is S, Derived polymorphism is L
  VARIANT 115: note = Ancestral polymorphism is L, Derived polymorphism is F
  VARIANT 107: note = Ancestral polymorphism is R, Derived polymorphism is S
  VARIANT 96: note = Ancestral polymorphism is P, Derived polymorphism is L
  VARIANT 93: note = Ancestral polymorphism is N, Derived polymorphism is K
  VARIANT 85: note = Ancestral polymorphism is R, Derived polymorphism is I
  VARIANT 80: note = Ancestral polymorphism is G, Derived polymorphism is C
  VARIANT 74: note = Ancestral polymorphism is A, Derived polymorphism is P
  VARIANT 57: note = Ancestral polymorphism is P, Derived polymorphism is L
  VARIANT 50..184: note = Derived polymorphism lacks residues 50 to 184
  VARIANT 43: note = Ancestral polymorphism is G, Derived polymorphism is D
  VARIANT 16: note = Ancestral polymorphism is S, Derived polymorphism is N
MCHLKLLCSNNMVKTSVYWDLFFILQMIFLKETAFVPFITADDRDLETRQRPSTLSPPSPCWFHQWSTARMWPAKTSRNGGSEARAIRFRAQNTLPNKKLSLFILDRLQKGKLNLVLLPSSSMRLTFVCDDGYPEQLALLSNDFEFSEVMIEEISADNSRRSFLIRISESKVFYYWCAEKSKED

SEQ ID NO: 1824 - protein, 136 aa, Zea mays
  VARIANT 56: note = Ancestral polymorphism is A, Derived polymorphism is T
  VARIANT 83: note = Ancestral polymorphism is A, Derived polymorphism is V
  VARIANT 84: note = Ancestral polymorphism is P, Derived polymorphism is S
MEFFSNFSSVRFFSWIRPPRPPPPSRSRAPPLFHRKLLVHALHSSRRFSSLRRRRAHLRTRLWGPPPPATAVGVVFLAINCAAPVISSCCVWVSRQLLDGGGYLILVLVVLFFLNGKDKAAADLGSCLPNSIPPRI

SEQ ID NO: 1825 - protein, 189 aa, Zea mays
  VARIANT 177: note = Ancestral polymorphism is C, Derived polymorphism is Y
  VARIANT 154: note = Ancestral polymorphism is P, Derived polymorphism is L
  VARIANT 133: note = Ancestral polymorphism is G, Derived polymorphism is D
  VARIANT 44: note = Ancestral polymorphism is P, Derived polymorphism is S
MAAGESSSSMRRRAWVVEVEKTLDEADASVEVSWWQLHSIYHVPACIKDLNRKAYKPQPTGGVAGPLHRRHSELLPMEEHKEHALRYLLRRSKRPLEEFATAVADIAEQLESVYLDLGAEWRGADGRERFLDGCFLLEVIKATEMLLYATGVVLGKVIKNVVAARKQGTVLRNIRRCIGVLVMKMIASR

SEQ ID NO: 1826 - protein, 755 aa, Zea mays
  VARIANT 378: note = Ancestral polymorphism is L, Derived polymorphism is Q
  VARIANT 374: note = Ancestral polymorphism is F, Derived polymorphism is S
  VARIANT 342..755: note = Derived polymorphism lacks residues 342 to 755
  VARIANT 314..755: note = Derived polymorphism lacks residues 314 to 755
  VARIANT 150..755: note = Derived polymorphism lacks residues 150 to 755
  VARIANT 134: note = Ancestral polymorphism is I, Derived polymorphism is N
  VARIANT 39: note = Ancestral polymorphism is L, Derived polymorphism is P
MAADALSIIPGAVLRNLSDKLYEKRKNAALEIEGIVKQLAMAGEHERISAVISLLTNDFTYSPQTNHRKGGLIGLAAVTVGLTSEAAQHLEQIVPPVLNSFLDQDSRVRYYACEALYNIAKVVRGDFIIYFNKIFDALCKLSADSDANVQSAAHLLDRLVKDIVTESDQFSIEEFIPLLRERMNVLNPYVRQFLVGWITVLDSVPDIDMLGFLPDFLDGLFNMLSDSSHEIRQQADAALSEFLQEIKNSPNVDYGRMAEILVRRAGSTDEFTRLTSITWINEFVKLGGEQLVPYYADILGAILPCISDEEEKIRVVARETNEELRAIKADPTEGFDIGAILSIAKRELNSEHEATRTEALHWFFTLLDQYRAEFLAYLNDIFDPLLNALSDPSDVVVLLVLEVHARIAEESHHFHHLVSYLICTFHNNHFLLEKRGALIVRRLCVLLGAEKVYREFSTILESEVDLDFASVMVQALNLILLTSTELGELRSLLKKSLVDSCGKDLFQSLYASWRHSPMATISLCLLAQAYSHASCVIQSLGEEDINVKFLVQLDKLIRLLETPVFAYLRLQLLEPGKHTWLLKTLYGLLMLLPQILSGEITHRGVYMFMQQSAAFKILRTRLKTVPFSENIKRTSSANPYSQILQVTEDGNRNQDTQNYSAINFPSLLQQFEHMQLQHRNHLKDQLQSRKSASALTLSQLRAPVPHVQKYLVFLILPAKRYKDTKQHIPLRYQRLTGPLQEHPKAFYDAFDYCDV

SEQ ID NO: 1827 - protein, 140 aa, Zea mays
  VARIANT 28: note = Ancestral polymorphism is G, Derived polymorphism is S
  VARIANT 29: note = Ancestral polymorphism is K, Derived polymorphism is E
  VARIANT 112: note = Ancestral polymorphism is M, Derived polymorphism is K
MPTLTKLYSMEEAALHNTPDDCWVIVDGKIYDVTKYLEDHPGGADVLLEATGTACPGKDATEEFDDAGHSKSAKDLMQDYFIGEVDLDPTPDIPEMEVFRKEQDTGFASKLKDNVVQYWAIPAAVIGISAVVAILYARRK

SEQ ID NO: 1828 - protein, 353 aa, Zea mays
  VARIANT 86: note = Ancestral polymorphism is A, Derived polymorphism is P
  VARIANT 135: note = Ancestral polymorphism is S, Derived polymorphism is L
MDTTSRAAKIPSLHQTEINWDNLDKTKLYVVGAGMFSGVTVALYPVSVVKTRMQVASGDAMGRNALATFKNILKVDGVPGLYRGFPTVIIGAVPTRIIFLTALETTKAASLKLVEPFKLSEPVQAAFANGLAGLSASTCSQAIFVPIDVISQKLMVQGYSGNVRYKGGIDVARKVIKADGIRGLYRGFGLSVMTYAPSSAVWWASYGSSQRIIWSALGHLHNKEEAPSQLKIVGVQASGGIFAGAVTSFVTTPIDTIKTRLQVMDNENKPKAGEVVKRLIAEDGWKGLYRGLGPRFFSSSAWGTSMIVNFKYSGTSHLEFSLYGVIQSACVLKLKRSDFCSYYPGSFVLAEVK

SEQ ID NO: 1829 - protein, 447 aa, Zea mays
  VARIANT 40: note = Ancestral polymorphism is T, Derived polymorphism is I
MNEAVQEAKLLRQVNALIVAHLRSQNLGQAAAAVAAATMTPISAAESVPANHLLRLVAKGLAAEHGGGDAASAFDSAGFGVAVQPPGSSAVDFSIQDVKGSSKSFPKHEVKHVSDHKNAARCVKFSPDGKYFATGSADTSIKFFEVAKIKQTMVGDSKDGPARPVVRTFYDHTQAINDLDFHPESPILISAAKDSTIRFFDFSKTNARKAFRVIQVVNSSKPIYLYIMLNSSFVNAGQDTHNVRSVCFHPCGDYLLAGTDHPVAHLYDINTFTCYLSANAQDSSSPINQVRYSCTGSLYVTASKDGSLRIWDGVSAECVRPIIGAHGSSEAISAIFTKDERYVLSCGKDSRVKLWEVGTGRLVKQYAGAIRRQFRCQAVFNETEEFVLSVDEQNNEVVVWDALTAEKVTRLPSGSTGAPRWLDHSPVEPVFVSCGNDRSIKFWKQTV

SEQ ID NO: 1830 - protein, 853 aa, Zea mays
  VARIANT 545..853: note = Derived polymorphism lacks residues 545 to 853
MAFSPRSPWSRAKKTDVYSTFVVHGDDDEDDARGGRGPSTRAEEDEEEDPSSLPPLLQRLPKDFGGASFDDDEDPYSSDPDDASLSATAAFKSGVPASGRSPFLDLRRSSPRATDDDPYSTFVVHSTTRSGRTSSSPRGSASGTFIRRSGGSSSPRESVSGTFIRRTGSPSSPGKSASGTFIRRPGSPSSPRGSFSGTFIRHTSGGSSSHESASGGGGGFGSSFWTPAVEQSEELRQPSPLMQQQQQQHSRRKPSVSSVPDSVTREDPSTKYELLHELGKGSYGAVYKARDLRTQELVAVKIISLTEGEEGYEDIRGEIEMLQQCSHPNVVRYFGSYQGEEYLWIIMEYCGGGSVADLIGITEEPLDESQIAYICREALKGLAYLHSIFKVHRDIKGGNILLTEQGEVKLGDFGVAAQLTRTMSKRNTFIGTPHWMAPEVIQESRYDGKVDVWALGVSAIEMAEGMPPRSTVHPMRVIFMISSEPAPMLEDKEKWSLLFHDFIAKCLTKDPRLRPAAIEMLKHKFIEKCNSGASKMLAKIKVAKKIRATLAVQNELSDPDNTTQDVPFRINEDYGETVPTSSQQHMKHGTYNDCQAGDFGTMIVHTEDGDEVTESPIFPRTEFIPGLGSINSFTHDPKRAELISSFWAENIGDSDANKDRDTDYGPDMQESKVISPLTGTVKKNIGAEGTIRCHDNQINLSPGLANTTTKLNNSPSRKAFSVQDKLWSIYAAGNTVPIPFLKAIDISPLALVSENESGNGLAGSSTNDALEAVRELFSGDGQAKKGRKGQNEVPLPPGVHHRLTTSPTLMNLAQALAYHKTCYEDMPLQDSQATQEQQTIQNLCDTLRTILRL

SEQ ID NO: 1831 - protein, 229 aa, Zea mays
  VARIANT 1: note = Ancestral polymorphism is M, Derived polymorphism is K
  VARIANT 123: note = Ancestral polymorphism is A, Derived polymorphism is S
MGFFQGKTSKQTARVKKLLGLALSRLAIARRPRLARRSIYRSDVGQLLSLGYLHRALLRAERVIEEDNMLQAFDIIELCCKRLVEHAAHLDKPRECGEEIREAAAGIMFAARWCGDLPELQVARTILEDKFGSDMAVIAKEGTSIVDPMLVWKLSGDKTNMELKKKVTKEIAVENSFMVDFSELQLQKCHTRISGHKDPGANIINRCAGTKSHTCDESWYRIECHIFTI

SEQ ID NO: 1832 - protein, 238 aa, Zea mays
  VARIANT 89: note = Ancestral polymorphism is I, Derived polymorphism is V
  VARIANT 134: note = Ancestral polymorphism is P, Derived polymorphism is L
  VARIANT 143: note = Ancestral polymorphism is A, Derived polymorphism is S
MVSGSGVCAKRIVVDARHHMLGRLSSIIAKELLNGQKVVVVRCEEICMSGGLVRQKMKYLRFLRKRMNTKPSHGPIHFRAPAKILWRTIRGMIPHKTKRGEAALARLKTYEGVPPPYDKTKRMVIPDALKYVFPSVFGIYLIAGRSCFVTFVSDAILVVVLRVLRLQPGHKYCLLGELSKEVGWNYHDTIRELEEKRKEKAKVAYERKKQLAKLRVKAEKAAEEKLGSQLEILAPIKY

SEQ ID NO: 1833 - protein, 28 aa, Zea mays
  VARIANT 14..28: note = Derived polymorphism lacks residues 14 to 28
MVQGGPVRRPALRRGCVDGLVPRAGCHI

SEQ ID NO: 1834 - protein, 244 aa, Zea mays
  VARIANT 51: note = Ancestral polymorphism is C, Derived polymorphism is Y
MLRDTPPTELGAVQAAAFKSSSSSLEFKASREARLRERERELYKARRRPHCRGTLSLFTAVACRLTSTASMADTARLFMLVAVATAALAGRSDGAWCVCRSDLADSALQKTLDYACGGGADCKPILQSGACFAPDTVKAHCSYAANSFYQRNGQNPQACVFSGTAALSNVDPSANGCTYPATPSAAATTSSSSGSAGVYSPPAMGPSALNDNSAAAGVVLPMAGAGRLLILACCSLVALYYLGA

SEQ ID NO: 1835 - protein, 169 aa, Zea mays
  VARIANT 19: note = Ancestral polymorphism is G, Derived polymorphism is V
  VARIANT 11: note = Ancestral polymorphism is G, Derived polymorphism is V
  VARIANT 4: note = Ancestral polymorphism is E, Derived polymorphism is D
MNVEKLKKMAGAVRTGGKGSMRRKKKAVHKTATTDDKRLQSTLKRIGVNTIPGIEEVNIFKDDIVIQFQNPKVQASIPANTWVVSGVPQTKSLQDLLPTIINQLGPDNLENLKRLAEHFQKQVPGAEASASAAAQDDDDVPELVPGETFEEAAEVKEVPEAEPEEKKES

SEQ ID NO: 1836 - protein, 460 aa, Zea mays
  VARIANT 115: note = Ancestral polymorphism is L, Derived polymorphism is I
  VARIANT 124: note = Ancestral polymorphism is S, Derived polymorphism is L
MAPKAHVLVLPMPCQGHVTPLMELSHLLVDQGFEVTFVNTDVDRAAVVAALEASGGVAALGGGIHLASIPDGLADDEDRKDISKLVDAYTRHMPGYLERLLADMEAAGRPRAKWLVADTNMGWSFEVAKKLGIRVVSFWPAATACLAFMLKIPKLIQDGLLDDKGLPVRQETFQLAPGMPPLHSSQLSWNNAGEPEGQHIIFELVTRNNKLNDELAEMVVSNSFYEAEAGAFKLFPGILPIGPLSADGAFRKPVGHYLPEDERCVKWLDAHPDASSVVYVAFGSITIFSARQFEELAEGLELTGRPFLWVVRPDFTPGLSKAWLHEFQRRVAGRGMIVSWCSQQQVLAHRAVACFVSHCGWNSTMEGLRNGVPFLCWPYFCDQYLNRSYIVNVWRTGLAVTPDADGIVGREELRSKVEQVVGDADIKDRARVLKDEAHRCVAEGGSSNDNFKKLVNLLSE

SEQ ID NO: 1837 - protein, 459 aa, Zea mays
  VARIANT 8: note = Ancestral polymorphism is V, Derived polymorphism is A
  VARIANT 16..459: note = Derived polymorphism lacks residues 16 to 459
  VARIANT 50: note = Ancestral polymorphism is G, Derived polymorphism is A
  VARIANT 77: note = Ancestral polymorphism is R, Derived polymorphism is L
  VARIANT 132: note = Ancestral polymorphism is G, Derived polymorphism is V
  VARIANT 202: note = Ancestral polymorphism is F, Derived polymorphism is I
MVMAAPRVLVLPYPAQGHVIPMMELSHCLIEHGVKVTFVNTEVNHRLILGALATGDKELGGVDMVSIPDGLGTGEDRKDLGRLTDSFSKVMPGELEKLITSINADGREREKVSWLIADVNMAWAFPVAKKHGLRTAGFCPSSAAMFAMRIRIPEMISDGVLDERGWPKRRGAFQLAPAMPAIDTSEFSWNRAADAKGKPIIFQLILRNNAATHLAETIVCNSIQELEPGALALVPDVFPVGPLSSDKPVGCFWAEDASCPAWLDAQPASSVVYVAFGSLAAYGAAQLVELAEGLLLTSRPFLWVVRPGSTGEQHLEQLRRRAAPRGRVVSWCPQQNVLAHHAVACFLTHCGWNSTMEAVRNGVPLLCWPYFTDQFLNQSYICDVWRTGLKVPLPPGAAHGTGLVGRDVVRDKIEELLRDSETKARALALRDLASRAVGDGGSSRRNLRQFLGLVRGSES

SEQ ID NO: 1838 - protein, 459 aa, Zea mays
  VARIANT 40: note = Ancestral polymorphism is F, Derived polymorphism is S
  VARIANT 99: note = Ancestral polymorphism is T, Derived polymorphism is M
MAAAPHRPRVMMLPFAAQGHVMPLMELSHRLVEHGFEVVFVNTDFNHARILATMAGATPAGGIHLVSFPDGMDPDGDRTDIGKVLDGLPAAMLGGLEETIRSRDIRWVVADVSMSFALELVHTVGVRVALFSTYSAATFALRMQLPRMLEDGILDETGNVRRNERVQLDSKMPAIDASKLPWTSLGKSPESRRAMIQSTLTTNPTLSLAETIVCNTFQEVESVALARLPVPAVAIGPLEAPKSVSSAAAAGHFWAQDEACLRWLDAQAPGSVVYVAFGSLTVFDAERLQELADGLALTGRPFLWVVRPNFADGVGERWLDGFRRRVGEGRGLVVGWAPQQRVLAHPSVACFVTHCGWNSTMEGVRHGVPFLCWPYFADQFLNQSYICDLWGVGLKVCADADERGVVTKEEIRDKVARLLGDEAIKARTVALKSAACASVADGGSSHQDLLKLVNLLREK

SEQ ID NO: 1839 - protein, 458 aa, Zea mays
  VARIANT 29: note = Ancestral polymorphism is H, Derived polymorphism is N
  VARIANT 105: note = Ancestral polymorphism is L, Derived polymorphism is Q
MAAAPPRPRVMVLPFPAQGHVMPLMELSHRLVDHGFEVDFVNTDFNHARIVTALAAGGGETRAAAHAGIHLVSFPDGMGPDGDRADIVRLAQGLPAAMLGRLEELARAQRTRWVVADVSMNWVLDLAGTVGVRVALFSTYSATVFALRTLIPKMIEDGIIDESADVRRNEKIKLSPNMPVIDAADLPWSKFDGSPEIRRIMVKGIVKSNPTLARADTIVCNTFHAIESEVLALLPTAALAVGPLEAPRSTSASQLWPEDRACLVWLDAQPPGSVVYVAFGSFTVFDTARLQELADGLALTGRPFLWVVRPNFANGVDQGWLDKFRCRVGDTGLVVGWAPQQRVLSHPAVACFISHCGWNSTMEGVRHGVPFLCWPYFADQFLNQKYICDVWGTGLRIRANERGVFTKEEIRDKVNQLLADDTIRARALSLKRAACESITDGGSSHQDLLKLVNLLKEQ

SEQ ID NO: 1840 - protein, 36 aa, Zea mays
  VARIANT 10: note = Ancestral polymorphism is E, Derived polymorphism is D
MSADPVAVVELPNRVPYGFHAFFVTEDQLARQAEGQ

SEQ ID NO: 1841 - protein, 745 aa, Zea mays
  VARIANT 96..745: note = Derived polymorphism lacks residues 96 to 745
MPRLAFLRRSLPARLLARACGGGGGGDQGSPDQVARDEEAGGSGGMSGRSSAGGPSGGECYACTQPGVPAFHSTTCDQVHSPDWDADAGSSLVPVQGQAQAAAAAAAPRQRHAARWLLGPVLDPRSRRVQRWNRWILLGRAAALAVDPLFFYALSIGRAGQPCLYMDAGLASAVTALRTCADVAHLAHVLLQLRLAYVSRESLVVGCGKLVWDARAVAAHYARSVKGLCFDLFVILPIPQVIFWLVIPKLIREEQVKLIMTILLLMFIFQFLPKVYHSIHIMRKMQKVTGYIFGSIWWGFGLNLFAYFIASHIAGGCWYVLAIQRIASCLQEECKRNNSCDLISLACSKEICFHPPWSSNVNGFACDTNMTSFSQQNVSTCLSGKGSFAYGIYLGALPVISSNSLAVKILYPIFWGLMTLSCIFHELIQFLELLGSTFGNDLAPTSNGIEVIFSIINVLSGLMLFTLLIGNIQVFLHAVLARKRKMQLRFRDMEWWMRRRQLPSRLRQRVRKYERERWAAVTGDEEMEMIKDLPEGLRRDIKRYLCLELVKQVPLFHGMDDLILDNICDRLRPLVLSSGEKVIREGDPVQRMVFILQGKLRSTQPLTKGVVATCMLGAGSFLGDELLSWCLRRPFVDRLPASSATFECVEAAQAFCLGAPDLRFITEHFRYNFANEKLKRTARYYSSNWRTWAAVNIQLAWRRYRARTSADLAAPPLVGGPDDGDRRLRHYAAMFMSLRPHDHLE

SEQ ID NO: 1842 - protein, 191 aa, Zea mays
  VARIANT 166: note = Ancestral polymorphism is P, Derived polymorphism is H
  VARIANT 165: note = Ancestral polymorphism is H, Derived polymorphism is Q
  VARIANT 125: note = Ancestral polymorphism is R, Derived polymorphism is C
  VARIANT 93: note = Ancestral polymorphism is H, Derived polymorphism is Y
  VARIANT 86: note = Ancestral polymorphism is L, Derived polymorphism is F
MMGRTSVAAAAAALLVLAACAALPARTARSVLLHGGAGGRGAGGRGGLQQVRLHQRHLQLQQGAQLRLPAQRDQDLLLHLQLRLLLRRDAPRHQGREVAAAVAAAVRQRPLRRRHRRLRQVPRARHLRRRRRARRAAQDGLAGKNLPAGPFVGSNWDSFFFLFVHPLHLFRSVLGLSRGAVAGAGVLRWVH

SEQ ID NO: 1843 - protein, 343 aa, Zea mays
  VARIANT 2: note = Ancestral polymorphism is S, Derived polymorphism is N
  VARIANT 4: note = Ancestral polymorphism is D, Derived polymorphism is N
  VARIANT 93..343: note = Derived polymorphism lacks residues 93 to 343
MSIDNLHRFFDLNVGKWDGRFYQFDAHGKVLQEISTRLSVSSYGEDKLISLLQSLYIKQGSSAISIVDEEDSEPEWVEYKIKETNMFTVDKYQQIGFFPEQKAFALRYQTAGMLETVLRIGVLGEDDTGEESPKNLKIPSRKPSIVCENCLYSLEGNGRIRAFHIMDPKGVLDTLLVFHEKRQGSKVPQPLTNYSVGTKSASSDRINALLGRWEGHSVTKRSGVYGATLVEADTAIVLKMDSNGQLIQDTLSTKFGTGTTTVNWTGSANDNLLQFDGGYEITLLPGGMYMGYPSDISKSVAQLDSFHLEFCWMESPGKRQRLVRTYDSAGLAVSSTYFSETKV

SEQ ID NO: 1844 - protein, 196 aa, Zea mays
  VARIANT 24: note = Ancestral polymorphism is P, Derived polymorphism is S
  VARIANT 79: note = Ancestral polymorphism is A, Derived polymorphism is V
  VARIANT 80: note = Ancestral polymorphism is P, Derived polymorphism is Q
  VARIANT 83: note = Ancestral polymorphism is P, Derived polymorphism is L
  VARIANT 88: note = Ancestral polymorphism is G, Derived polymorphism is R
  VARIANT 109: note = Ancestral polymorphism is T, Derived polymorphism is A
  VARIANT 113: note = Ancestral polymorphism is R, Derived polymorphism is Q
  VARIANT 118: note = Ancestral polymorphism is A, Derived polymorphism is T
  VARIANT 126: note = Ancestral polymorphism is V, Derived polymorphism is E
MSQPVTPRRVTRSSAADPALRTSPSNNSRPKSTTRRQPVPTDAAKEEGEHERSTVDAILEALPGRRAQAMDLLRLLAPAPALLLLLHGGAATGKTRALPSSLFATVALTPLFRVTRRADELVAALVHWSHYSVAFLASRNPATLDAALFDSTGGSDSHRRKRKSSQVLTNMKDTMAEEMLLKGPGTFPLERLLAIF

SEQ ID NO: 1845 - protein, 281 aa, Zea mays
  VARIANT 240..281: note = Derived polymorphism lacks residues 240 to 281
  VARIANT 149: note = Ancestral polymorphism is R, Derived polymorphism is M
MQYAKLLPLTLIHMLGNVFTNMSLGKVVVSFTHTIKAMEPFFSVLLSILFLGEDFAPTPIKLFKVDHLFRPRAILAPNPHCSRRPPPIYTRTKRLMLQRLDLPLLFLRLKCPGHPKEEISRRNKESSKRVKEFNQSNIVYLILILGENRIGFWSAMTSNLMNQSRNVYSKKILADKEDSLDDINLFSIITVMAFLLSAPLMLCVEGIKFSPSYLQNAGVNVKELFVRAALAGTSFYFYQQEWPMCVTYGAVAGYLFGMAVSLVLSPNSCPQEKGLCKNCLA

SEQ ID NO: 1846 - protein, 841 aa, Zea mays
  VARIANT 30: note = Ancestral polymorphism is A, Derived polymorphism is V
  VARIANT 3: note = Ancestral polymorphism is R, Derived polymorphism is G
MTRSMLEWKRVPMLIILSILGITSIASTNAIASQKDPFVPQDNYLISCGASSSVQLDDGRTFRSDPESVSFLSTPVDIKIKANNSPTAASSLSPLYLSARVFSDVSTYSFFVSQPGRHWIRLYFLPIPDKQYNLTSATFSVFTDNMVLLHDFSFIANPPNPVLKEYLVVTQGDTLKIIFTPKKDSIAFINAIEVVLAPPTLIPNTTIGLPPLEQFDISNNALQVVYRLNMGGALVTAFNDTLGRTWLPDAPFLKLEAAAQVAWVPPRTIKYPDDKTVTPLIAPANIYSTAQQSASTNTSQARFNITWEMEAEPGFKYLIRLHFCDIISKALNSLYFDVYINGMMGVSNLDLSSLTMGLAVAYYQDFIVDSSSIINSTLLVQVGPSTTDSSNTDAILNGLEVMKISNQANSLDGLFSPKTSSQLGKRILTGIGLSLAVIAAALAIVMCCRRNQRPEWQKTDSFHSWFLRLNSRQSSFMSSCSRLSRSRFGSTRTKSGFSSLFASSAYGLGRYFTFAEIQKATKNFEEKDVIGVGGFGKVYLGVLEDGTKLAIKRGNPSSDQGMNEFLTEIQMLSKLRHRHLVSLIGCCDENNEMILVYEFMSNGPLRDHLYGGTNLKPLSWRQRLEISIGAAKGLHYLHTGAAQGIIHRDVKTTNILLDENFVAKVADFGLSKAAPSLEQTHVSTAVKGSFGYLDPEYFRRQQLTDKSDVYSFGVVLFEVLCARPAINPALPRDQVNLAEWALTWYRKGELNKIIDPHIAGQLRPDSLEMFAEAAEKCLADYGVDRPSMGDVLWKLEFALQLQEKGDVVDETGNGIPMKHFNDSVYDDIEKSSSAGPSVEGR

SEQ ID NO: 1847 - protein, 442 aa, Zea mays
  VARIANT 140: note = Ancestral polymorphism is R, Derived polymorphism is W
MNILLELKHLKPFSIPARLVICKGLLIVIALILLRAIVSPFLAIDSSEKKEFYESTAPDLLPRIRRDKFLEVPQIIWGLNNQKIAFARACLTARFLNRSLLMPSLSASLFYKEVDLLQPINFDKVFDFNKFNARCHGFVRLAQYSEVSNRTEPFKLQKGTGRRWTADRDLDQLQQSIGSNADDSEVIEIVGKNPFLWPDHWPVKDYAKIFDCLVLVPEIETEVVNVISKIREAGQRARHEAGSSHSKQRRDSSTNPPVPYVAVHMRIEKDWMIHCKKWEQRSKSHEICSSKEEIIHKVSQITDLHRPVVVYLAVADSLLEDDSITSGWRVGMVAYEKKKLGVTDVYDRQPYLIKSAIDFEVCSRADVFVGNSFSTFSNLVVLSRTERLYNLGKASSCGENIGLSSYAYNVMGGDGGPQRWMTDMSDGSLQRLSYGTNNVSCH

SEQ ID NO: 1848 - protein, 305 aa, Zea mays
  VARIANT 1: note = Ancestral polymorphism is I, Derived polymorphism is M
  VARIANT 42: note = Ancestral polymorphism is S, Derived polymorphism is N
  VARIANT 256: note = Ancestral polymorphism is S, Derived polymorphism is G
MMVKEEEMMAEAGGGRGYMDLLGLGEEDYLLCLSPPSYFTPSVVSATATTTAAASASTCCAASYLDLDLAPAYHHTLSFGGQDQEQQHHGDDGALGFQHYGGDHAIPAAAAAVQQKSSPTTECSSSLSSMSPSPPATAVSAAVSCPKPQAFKKKKAGSRSSASAAAPAATNKRPRVRRERLGERIVALQQLVSPFGKSDTASVLHEALGYIRFLHDQVQVLSTPYMQMQRQPASAHVPESAAGTVVEAQEQPDLRSRGLCLVPVSCTEHIAGNDSHGNGADLWSSVLLPLPLPGGGSHPSQGRLA

SEQ ID NO: 1849 - protein, 260 aa, Zea mays
  VARIANT 162..260: note = Derived polymorphism lacks residues 162 to 260
  VARIANT 94..260: note = Derived polymorphism lacks residues 94 to 260
  VARIANT 74: note = Ancestral polymorphism is R, Derived polymorphism is C
MCMEKKRRQRRGVNGKSSSTRQMTRRHTTYLRSKGSPFGQLRLAASGFGMENIVSEHGEKEPNVVYKGKLDAQRHIVVKLSNHSAWAKRKATAQSHIVLEAMADVGVVAGLPQDLGLASQTALGFAMPSVAHVSLILASYRNKGQKIQNYGAGAGWVGAKRQATAATRPLMKCPSGNRTTIRKKEKKVDTVSLKEDVVHLRTLNQQLMKKLHSHTMLEAEVARLRCLPSTLGTDRGGDWHVSVLEPKGHHLTQSSLTRRG

SEQ ID NO: 1850 - protein, 359 aa, Zea mays
  VARIANT 57: note = Ancestral polymorphism is T, Derived polymorphism is M
METANVVILSFFIFAIHRLFNRLHSRSTKMKPLPPGPLAIPVLGHLYLLLEKNIHHMFTRLAARYGPVLYLRLGSRNAVIVSSVDCARECFTEHDVTFANRPTFPTLHLMTYGGTTVGTCAYGPYWRHIRRVITVHLLSALRVRSMVPAIEAEVRAMARSMYRAAAAAPCGTGAAKVELRGRLFEVALSALMETVAQSKTSRSSMGGAADTGMSPEAQEFKESMDVMVPLLGTANMWDFLPVLQRFDVFGVKNKMAAAVSGRDAFFRRLIDEERRRLDDGVESENKSMMAVLLTLQKSEPENYSDDMIMSLCFCFDWATVGGVPKVDMTEASGLTLPRAVPLEAMCKPRQAMLDVLQKL

SEQ ID NO: 1851 - protein, 398 aa, Zea mays
  VARIANT 34: note = Ancestral polymorphism is L, Derived polymorphism is V
  VARIANT 267: note = Ancestral polymorphism is E, Derived polymorphism is D
METAYVVVLSFFFIVAIHRLLNRGESKNMSKQPLPPGPRAIPVLGHLHLLEKPYHLAFMRLAARYGPVFSLQLGSRAAVVVSTADCARECLAEHDATFANRPTYPTLHLMTYGGATIGHSAYGAHWRHVRRVVSLHLLSPQRVLSSMVPTITAEVRAMARRMYRAAAGGAARIELKGRLLELSLSTLMETIAQTKTYRPADDADTDMSPETQEFKQLLDAIISLLGLTNVLEFLPVLQTFDVLGLKKKIAAAAGRRDAFFQRLIDAERRRLDDGVEGQKKSMLAVLLALQKSEPENYTDEKIMALCFRFEDGGGSAEGRLLIPFGMGRRKCPGETMALQIMGLALGTMIQCFDWGAVGGGGAPKVDMTQGGGLTLPRAVPLEAMCKPRQVMLDVLQKL

SEQ ID NO: 1852 - protein, 370 aa, Zea mays
  VARIANT 46..370: note = Derived polymorphism lacks residues 46 to 370
  VARIANT 113..370: note = Derived polymorphism lacks residues 113 to 370
  VARIANT 166..370: note = Derived polymorphism lacks residues 166 to 370
  VARIANT 184: note = Ancestral polymorphism is G, Derived polymorphism is R
  VARIANT 215..370: note = Derived polymorphism lacks residues 215 to 370
  VARIANT 223: note = Ancestral polymorphism is E, Derived polymorphism is D
  VARIANT 243: note = Ancestral polymorphism is G, Derived polymorphism is D
  VARIANT 265: note = Ancestral polymorphism is L, Derived polymorphism is R
  VARIANT 319..370: note = Derived polymorphism lacks residues 319 to 370
MPRLSLTVTDAVAAMPFALRLGGSPALRLGSQSPSWLRFGGRDGARKALFCSTEDTRRCGSDDDAEAEEGRRRGGSRVPSDRRIRAGMRPPRLFPCACSYHNAGDLQPGDNVQITGPVGKEMLMPKDPNATIIMLATGTGIAPFRSFLWKMFFEKHDEYKFKGLGWLFLGVPTSSSLLYKEEFRKMKERAPENFRVDYAISREQTNAAGERMYIQTRMAEYKEELWELLKKDNTYVYMCGLKGMENGIDDIMVSLAEKDDLEYFLCQSFHLSEACWNATAGQEHGDEQRSIVPLQRSSMVRRKAQDDNKWRRIPTFGDWNLRDDMPVTQYLQAETSSSLCRRQRRTTTRICSRCPSVPCQALQLQEGETK

SEQ ID NO: 1853 - protein, 1477 aa, Zea mays
  VARIANT 1286: note = Ancestral polymorphism is A, Derived polymorphism is P
MAWGEDEAIGPDVASAGLHVSERIGRDAAAQPDLEEALEASRYASHPYSSHPKEWPPLVEVAETRQLPPMLIERYNTAAGEGTALCGIFSDIHRAWATVDNSFFIWRFDKWDGHCQEHNVDEQAICAVGLARAKPGIFIEAIQYLLVLATPVELILVGVCCSASADGTDPYAELSLQPLPEYMIATDGVTMTCITCTDKGQIFVAGRDGHIYELQYTTGSGWRKRCRKVCLTTGIGSLLSRWVLPNAFKFSTVDPIVDMVMDEERNTIYARTEGMKLQLFDLGVNGDGPLTKITEEKNIVDPRDGPYGGRRSNAPRAARSPRPSIVCISPVSSVESKWLHAVAVLSDGKRLFLTTSGGSGSSVGLNSGLQRPTCLKIVATRPSPPLGVGGGLTFGAVSVAGRALPEDLALKVESAFYSAGALVMSDSSATAMSSLLAVQKDSAAQLSLPSTFGTASRTSRALRETVSALPVEGRMLCASDVLPLPDAAYMMQSLYADVECFTCFRKPSEKACIKLWAKGDLPTQHILPRRRVVVFNTMGLMELIFNRPVDILRKLFDGNTLRSQIEEFFNRFGAGEAAAMCLMLAAKLLYAEDSLISNAVSEKAAEAFEDPGLVGMPQINGTTALSNTRTQAGGFSMGQVVQEAEPLFSGAYEGLCLCSSRLLYPIWELPIMSIRGPSGNNKREDGVIVCRLSAGAMKILESKIHSLETFLRSRRNKRRGLYGYVAGLGDSGSILYKTGPIIGPGGHSNGRSPYNSQIRDMNPVDKSASNKKPRLLYTSAELAAMEVRAMECLRRLLRRSGEALFLLQLICQHNVARLAQTLGNDLCKKFVQLTFHQLVCSEDGDQLAMRLISALMEYYIGPEGRGTVEEISTKLREGCPSYFNESDYKYYLAVECLERASMTNNADERDILARDAFNLLTKIPDSADLSAICKRFENLRFYEAVVRLPLQKAQALDSNADIINGQIDPRHHDTIMLQREQCYRIVMDALCTLKGVGHSRMQSADKSSALATAADPASRSKYIKQIIQLSVQWPDTVFHEHLYRTLIELGLENELLEYGGSDLVSFLQSAGRKHQEEVRAVSSVTPGAAKMHDLGAPISTSQTKYLELLARYYVRKGEHIAAARMLLILAERQCSNSEEAPALDKRYEYLRDAVLQAKSAGIAADLSKNPVDSSTVDLLEGKLVVLRFQIQIKEELELMVARLENIPSSSELPNVPFPRDNILANAETAKAAKDKAKELSLNLKSITQLYNDYAVPFDLWEVCLEMLSFANYSGDADSKIVREVWARLLDQALTKGGVAEACSVVKRVGSKLDPADGACLPLDIICLHLEKAAVDRLSSGEELVGDDDVARALLGACKGLPGPVLSVYDHLLSNGAIIPSLNLKLRLLRSVLAILREWGISVIAHRLGTTSAGASFFLDGTFSLNQTGTANQGARDKIISLANRYMTEVRRLNLPQNQTENVYRGFRELEEKLLSSY

SEQ ID NO: 1854 - protein, 123 aa, Zea mays
  VARIANT 29: note = Ancestral polymorphism is S, Derived polymorphism is R
MTALLKKKSLLMYQGIAWRSQSLEDAKHSMARLADGLQRDSPRERDSAPFGHIDLGAADRVPVEALDQRPQDQPQRPQREGLSGAFPPSHPERHHEQPVGTAVLEPLRPERGWVRPYRGVPKF

SEQ ID NO: 1855 - protein, 322 aa, Zea mays
  VARIANT 63: note = Ancestral polymorphism is P, Derived polymorphism is H
  VARIANT 121: note = Ancestral polymorphism is L, Derived polymorphism is F
  VARIANT 123: note = Ancestral polymorphism is T, Derived polymorphism is A
  VARIANT 127: note = Ancestral polymorphism is P, Derived polymorphism is L
  VARIANT 140: note = Ancestral polymorphism is Y, Derived polymorphism is F
  VARIANT 161: note = Ancestral polymorphism is A, Derived polymorphism is T
  VARIANT 166: note = Ancestral polymorphism is H, Derived polymorphism is R
  VARIANT 196: note = Ancestral polymorphism is Y, Derived polymorphism is C
  VARIANT 234: note = Ancestral polymorphism is E, Derived polymorphism is K
  VARIANT 263: note = Ancestral polymorphism is M, Derived polymorphism is I
  VARIANT 264: note = Ancestral polymorphism is P, Derived polymorphism is S
MAINCTGLFLPYECRFLSRENGISICRLVSEQAKKSVATAIVPEEVDTGSPYDVEILDSPTNPKKRKLLHVLDDSEVVFEDEEDPITQADLQRWFVDNWDKRTPVKVSTDGCTNDFLMGGLSTKDMPVTKADLIDVLCDYIMAIQDDTTLECFDMAVRLLTNKEAHRLKGEIIKNIKHYMDIRFWRMVDFGKLPKYHQDPTAEELAKTLDCWPSMNYYITGCRYVSSYAMEIHECHTLFVIDHVKKHVTFIDFTPTQDWYKHMSYRRLNTSYLMLQAMTMWGNNRRIEFIRKAKILRMNFVIDLLSYEDNLCRCIIPANIQQ

SEQ ID NO: 1856 - protein, 447 aa, Zea mays
  VARIANT 7..447: note = Derived polymorphism lacks residues 7 to 447
MCSHAGWCQRHIQTPKQRSIDQSKLVGQNISCSTTTTMDKAYVAVLSFAFLFVIHYLVGRAGRKGNGKGKGTQRLPPSPPAVPFLGHLHLVKTPFHEALAGLAARHGPVFSMRMGSRRALVVSSPECAKECFTEHDVVFANRPRFATQDLVSFGGAALAAASYGPYWRNLRRVATVQLLSAHRVACMSAVVAAEVRAMARRMGRAAAAAPGGAARVQLKRRLFEVSLSVLMETIARTKTSRAEADADSDMSPEAHEFKQIVDEIVPHLGTANLWDYLPVLRWLDVFGVRNKITAAVGRRDAFLRRLIDAERRRLDDGGGDSDSDKKSMIAVLLSLQKSEPEVYTDTMIMALCGDPDEFRPERFEDGKAEGRLLMPFGMGRRKCPGETLALRTISLVLGTLIQCFDWDRVDGLEIDMAAGGGLTLPRAVPLEATCKPRAAVRHLLLEL

SEQ ID NO: 1857 - protein, 498 aa, Zea mays
  VARIANT 213..498: note = Derived polymorphism lacks residues 213 to 498
MASSGNEGRVVVDLGSAAESVAADEEAHATPLHEIESLCMRCGENGITRLLLTLIPHFREVVLMAFECPHCGERNNEIQFAGQLQPKGCCYSLEVPLGQSEMLNRQVVKSDSATIKIPELDFEIPPEAQRGTLSTVEGIIMRAVDELQALQDERKKVDPQKAEAIDQFLLKLRSLGSGEAAFTFILDDPAGNSFIENPHAPLLDPLLSVRFYERTREQQAALGFLAEPPKEQPGEAVLPASAVESNSDGLQSVPHGSVGAVAGRRAIAQGNPDEVAAALCRYSAPEEVDTLPSTCGACGTECVTRFFATKIPYFREVIVMATTCDMCGYRNSELKPGGEIPAKGKKITLRVQNAQDLTRDVIKSDSASVKVPELELELSCGTLGGMVTTVEGLIVKICEALERIHGFQLGDSTLEWKKKKWDDFKERLSKLLSLQEAWTLIIDDGLAASFVAPATDSLEDDSQLTIEEYQRSWEQNEELGLNDMDTSSADAAYNTTNT

SEQ ID NO: 1858 - protein, 376 aa, Zea mays
  VARIANT 184: note = Ancestral polymorphism is R, Derived polymorphism is W
  VARIANT 80: note = Ancestral polymorphism is R, Derived polymorphism is G
MLRAVARCCGHWPPGAAAADGMLWQTELRPHAAGEFSMAAAQANLTMEDQAQVLASPSATLVGVYDGHGGVDASRFLRSGLFPHVQRFAREQGGISAEAIRSAFGAAEEEFHRQVRQEWARRPRLAAVGSCCLLGAISGDTLYVANLGDSRAVLGRRVGGGGGGAAVAERLSAEHNAASEEVRRELAALNPDDAQIVVHARGAWRVKGIIQVSRSIGDFYLKKPEYSLDPLFRQVGPPIALKRPALSAEPSVQVRKLKPNDLFLIFASDGLWEHLSDDAAVQIVFKNPRTGIANRLVKAALKEAARKREVRYRDLRTIDKGVRRHFHDDISVVVVFLDRHRERRHTRVVDSSSNCISAPVDIYSSNTHQSAEPLHG

SEQ ID NO: 1859 - protein, 101 aa, Zea mays
  VARIANT 48..101: note = Derived polymorphism lacks residues 48 to 101
  VARIANT 34: note = Ancestral polymorphism is V, Derived polymorphism is L
  VARIANT 11: note = Ancestral polymorphism is A, Derived polymorphism is T
MNAERKAVVMAWERPLMEANARAVCQGGGKVLNLGFGMGAWGSRTKPYRGTSPRSTPSSRPTRRCTSGCSSSDGARRRTSEIVFGRWQDIMRQLGSYDVIT

SEQ ID NO: 1860 - protein, 489 aa, Zea mays
  VARIANT 9: note = Ancestral polymorphism is T, Derived polymorphism is A
MGGFHFHHTWFKARKVFVRMLSNGGGASMACDISVDASDLSKRLCKLIISCRKASALEHELDHSGVRVTPEIAESVLKHLDNAGMLAYRFFEWARKQKRGVCAHTVRSYHTVVTSLAKIRQYQLMWDVVAIMRKEGVANVETFGIIMRKYARAQKLDEAVYTFNVMEKYGVAHNLAAFNSLLSALCKSKNVRKAQEIFDKMNNRFSPDAKTYSILLEGWGRAPSLPKMREVYSDMLAAGCQPDIVTYGIMVDALCKTGRVEEAVCVVQDMSSRGCQPTTFIYSILVHTYGVDMRIEDAVAAFLDMEKDGIMPDVVVYNALITAFCKVKKFENAFRVMDDMQGHGISPNSRTWNIILNTLISLGKDDEAYRVFRSMIKRCKPDSDTYTMMIKMFCENDKIEMALKVWKYMRLKQFLPSMHTFSVLINGLCDKGEVSQACVLLEDMIEKGIRPPGSTFGKLRQLLLKEGRKDVLDFLVEKMKILAQEPLFD

SEQ ID NO: 1861 - protein, 72 aa, Zea mays
  VARIANT 29..72: note = Derived polymorphism lacks residues 29 to 72
  VARIANT 43: note = Ancestral polymorphism is R, Derived polymorphism is P
MDVLPDCFEAEERSSEFTPNVSINVNKDSISMNPVDMNMQEMRYENDIPAKDAKCLQGHLVADIWEISCYCD

SEQ ID NO: 1862 - protein, 266 aa, Zea mays
  VARIANT 103..266: note = Derived polymorphism lacks residues 103 to 266
  VARIANT 132..266: note = Derived polymorphism lacks residues 132 to 266
  VARIANT 143..266: note = Derived polymorphism lacks residues 143 to 266
  VARIANT 172: note = Ancestral polymorphism is G, Derived polymorphism is R
  VARIANT 198: note = Ancestral polymorphism is Y, Derived polymorphism is S
  VARIANT 207: note = Ancestral polymorphism is W, Derived polymorphism is C
  VARIANT 214: note = Ancestral polymorphism is L, Derived polymorphism is I
MSDSYCPDCKKQTEVAFDHSAGDTVCTECGLVLEAHSVDETSEWRTFTNESNDNDPVRVGGPSNPLLTDGGLSTVIAKPNGAQGDFLSSSLGRWQNRGSNPDRSLILAFRTIANMADSLCCPKDGQWNMIKKQVVDGARVGNWACVNFCQKLRADSVGKFCSDLIKWSRTTGVDMDNLRLPIYTARPEQAETDLRRLYQDARNKLRWQKFDLLLAILPEKNGGLYGNFKRICETEIGIMSQCCLDKNVRRAGPAYFANVAIKINAK

SEQ ID NO: 1863 - protein, 214 aa, Zea mays
  VARIANT 114..214: note = Derived polymorphism lacks residues 114 to 214
  VARIANT 159: note = Ancestral polymorphism is A, Derived polymorphism is V
  VARIANT 168: note = Ancestral polymorphism is K, Derived polymorphism is R
  VARIANT 170: note = Ancestral polymorphism is H, Derived polymorphism is Y
  VARIANT 171: note = Ancestral polymorphism is G, Derived polymorphism is R
MMLVYLKSNVGQRVLGQIEEREREREEMQRLTGRDMWDVEECQSPRMGSVILGVGGTSNTVCVCIPAAMPFNDPLPVLSRTVAGYSNHNSVGEDRARETLERVMSQALLKARRRRSNVCAVCLAVAGVNHPVDQQRMLDWLRDIFPSHVKLFVENDAVAALASGTMGKLHGCVLIAGTGTIAYGFTSDGREARAAGAGPVLGDWARLVKRDCVF

SEQ ID NO: 1864 - protein, 641 aa, Zea mays
  VARIANT 215: note = Ancestral polymorphism is G, Derived polymorphism is R
MHCLVSKKPVFRWVHGLLKDMNTKILCLRFGAVHVVVVACPEIAREVFRTNDAALASRPETDACELFSLGYKGASLSPYGEQWRKMRRVLTSEILSASMEQRQQRRRAQEADYLVRSLYSQCCSSASAAASSASSAVVDIRHVARHFSSNMIRSLVFGKRHFGGGAGPGAEEVAHVDALFALLNYVYIFSVSDYVPAAWRWMVAGLDLGGDREAGRSVMRTLSRLHDPIIRERIHEWDGLRERGEKREVRDFLDALVSLVDSQGRPFLSFDEIKAQTAEMMFATIDNPSNAVEWALAEMMNRPEVMQKAMEELDAVVGKDRLVQESDISGLNYLKACVREAFRLHPYHALNLPHVAMEDTVVSGYLVPKGSHVLLSRLALGRNPDVWDAPLRFRPERHLVNDDDGGDNHHVVLTEPDLRFISFSAGRRGCPGVSLGSSITMMLFARLLQGFADCLHPASSPALVRFAASFFRVAVLQLQESDAHKFAASFHPLTPTLPQLPSRVKEALCARKLSTRQQAQDSDELGGGADTILAMLWDSDSDDEVHVVDHPTEHRAATHAEKGKTMADANASSSGADVVLDRYGGGDDEDGDPSGPSSAARPPTHNGPGQDEQPAALRPRSKRQKKLSIKGLYMLEKVKYI

SEQ ID NO: 1865 - protein, 114 aa, Zea mays
  VARIANT 103: note = Ancestral polymorphism is R, Derived polymorphism is W
  VARIANT 99: note = Ancestral polymorphism is C, Derived polymorphism is Y
  VARIANT 93..114: note = Derived polymorphism lacks residues 93 to 114
  VARIANT 89: note = Ancestral polymorphism is L, Derived polymorphism is S
  VARIANT 85: note = Ancestral polymorphism is A, Derived polymorphism is T
  VARIANT 82: note = Ancestral polymorphism is A, Derived polymorphism is V
  VARIANT 77: note = Ancestral polymorphism is E, Derived polymorphism is K
  VARIANT 74: note = Ancestral polymorphism is G, Derived polymorphism is V
  VARIANT 66: note = Ancestral polymorphism is P, Derived polymorphism is S
  VARIANT 62: note = Ancestral polymorphism is L, Derived polymorphism is I
  VARIANT 59: note = Ancestral polymorphism is T, Derived polymorphism is I
  VARIANT 51: note = Ancestral polymorphism is C, Derived polymorphism is F
  VARIANT 50: note = Ancestral polymorphism is C, Derived polymorphism is Y
  VARIANT 49: note = Ancestral polymorphism is D, Derived polymorphism is G
  VARIANT 48: note = Ancestral polymorphism is L, Derived polymorphism is V
  VARIANT 42..114: note = Derived polymorphism lacks residues 42 to 114
  VARIANT 38: note = Ancestral polymorphism is D, Derived polymorphism is G
  VARIANT 37: note = Ancestral polymorphism is P, Derived polymorphism is R
  VARIANT 32: note = Ancestral polymorphism is P, Derived polymorphism is T
  VARIANT 24: note = Ancestral polymorphism is A, Derived polymorphism is V
  VARIANT 23: note = Ancestral polymorphism is A, Derived polymorphism is T
  VARIANT 21: note = Ancestral polymorphism is A, Derived polymorphism is V
  VARIANT 20: note = Ancestral polymorphism is M, Derived polymorphism is L
  VARIANT 19: note = Ancestral polymorphism is E, Derived polymorphism is G
MAYAFLVVSPPDMSQCFEEMAAAASNKTSSKPGLNYPGLEEQALQFILDCCESNIEKYTKYLESEPIMFQGGAGSLEVSMNAKQANRTLLLKQLARDLCISERRILYRTQYVSQ

SEQ ID NO: 1866 - protein, 398 aa, Zea mays
  VARIANT 122: note = Ancestral polymorphism is N, Derived polymorphism is S
  VARIANT 136..398: note = Derived polymorphism lacks residues 136 to 398
MKGGGVIRAAGGGAGGAGLLRTRLRLPVVLLSCSLFFLAGFFGSLLFTQDPEEADMPVPRERLLEAAWPEMPYGESGEAAPSLIPYQVMSHSDSISAWGGCLFRHTFGVTGIEFAGQLSAYNFHGLLVLRVGNFVWHFKISRHPDSRGKCRRCGCCGTFSQPHQSQLYICFCHHLPNVVQQIIGYIEDNFLILSWQPRALYFPQFATSEQCENIVKTAKERLKPSTLALRKGETAESTKGIRTSSGTFLSANEDPTETLAEIEKKIARATMLPRNHGEPFNVLRYNIGQRYASHYDAFDPAQYGPQKNQRVASFLLYLTDVEEGGETMFPYENSENMDIGYDYEKCIGLKVKPRKGDGLLFYSLMVNGTIDRTSLHGSCPVIKGEKWVATKWIRDNIV

SEQ ID NO: 1867 - protein, 385 aa, Zea mays
  VARIANT 82: note = Ancestral polymorphism is E, Derived polymorphism is K
MIGASPWNRLPSGIAKPAAAAAVVVAALASSFLALPRPRAAPPPAGSGPLMSKAKVYTDVNVLRPKEYWDYEALTVQWGSCEQDDYEVVRKVGRGKYSEVFEGINVNNYEKCIIKILKPVKKKKIKREIKILQNLCGGPNIVKLLDIVRDQHSKTPSLIFEFVNNTDFKVLYPTLTDYDIRYYIYELLKALDYCHSQGIMHRDVKPHNVMIDHELRKLRLIDWGLAEFYHPGKEYNVRVASRYFKGPELLVDLQDYDYSLDMWSLGCMFAGMIFRKEPFFYGHDNHDQLVKIAKVLGTDGLNAYLNKYHIELDPQLEALVGRHSRKPWSKFMNADNQHLVSPEAIDFLDKLLRYDHQDRLTAREAMAHPYFLQVRAVENSRTRPQ

SEQ ID NO: 1868 - protein, 333 aa, Zea mays
  VARIANT 214: note = Ancestral polymorphism is R, Derived polymorphism is W
MALPSAGKALPLVVVLAVAVVASLAQPGAADLRPNYYASSCPNVEAIVRGVVQQRLQATIRTVGSTVRLFFHDCFVEGCDGSVLIESTPRNQAEKDAPDNRSLAPEGFDTVRSAKAAVEAACPDTVSCADVLALATRDAIFMSGGPFFQVELGRLDGLSSTASSVPGQLPEPNQSMDQLLAVFNAHGLGMSDLVALSAAAHSVGLAHCSKFASRLYSFRPGQPTDPTLNPRYASFLASKCPNGGGADSLVLMDQATPSRFDNQYYRNLQDGGGLLASDQLLYADGRTRPAVDSLANSTAAFHRAFADAIVRLGRVGAKSSARGNIRKRCDVFN

SEQ ID NO: 1869 - protein, 94 aa, Zea mays
  VARIANT 16: note = Ancestral polymorphism is G, Derived polymorphism is A
  VARIANT 25: note = Ancestral polymorphism is R, Derived polymorphism is P
  VARIANT 53: note = Ancestral polymorphism is A, Derived polymorphism is G
  VARIANT 57: note = Ancestral polymorphism is P, Derived polymorphism is L
  VARIANT 60: note = Ancestral polymorphism is L, Derived polymorphism is M
  VARIANT 73: note = Ancestral polymorphism is A, Derived polymorphism is V
  VARIANT 75: note = Ancestral polymorphism is A, Derived polymorphism is V
  VARIANT 78: note = Ancestral polymorphism is R, Derived polymorphism is K
MCMDRAAVPVKRVWLGIAARLGLRRKTGLGKLRKEVRTCEYRDVHVMWEMLRATDGLVPLAEKEAAAAAAVAAAVGARKRKNAWRRFVYYCCAF

SEQ ID NO: 1870 - protein, 288 aa, Zea mays
  VARIANT 108..288: note = Derived polymorphism lacks residues 108 to 288
  VARIANT 109..288: note = Derived polymorphism lacks residues 109 to 288
  VARIANT 118: note = Ancestral polymorphism is T, Derived polymorphism is A
  VARIANT 144: note = Ancestral polymorphism is A, Derived polymorphism is G
  VARIANT 148: note = Ancestral polymorphism is A, Derived polymorphism is T
  VARIANT 184: note = Ancestral polymorphism is A, Derived polymorphism is T
  VARIANT 185: note = Ancestral polymorphism is F, Derived polymorphism is S
  VARIANT 206: note = Ancestral polymorphism is E, Derived polymorphism is K
MGTEILAGRTRIDQRPHGTGTDALMEGNRPPAGCCLLSDSTRSAHIQLFYVFSGLLYYVIKIEKVSIRKRSLPLGILKKNEEMLILMSMITILQHDVLYAVNKVSKKLQSPTMCIDSALDLIKGMTEYFETYRIEGFSNSLNIAKAIAKDLAVDASFPVKRHIVRKKQFDESNSQEEILEAERAFKVKYFLVLVDMAITSLKTRFEELLIFKGVFRFLLSSSTLKSLNDSELQECCIKFADTFSHDGSSDVEVYKMLHHIFGTIELFPPYITLYMVHSYYCGTSADLS

SEQ ID NO: 1871 - protein, 392 aa, Zea mays
  VARIANT 93..392: note = Derived polymorphism lacks residues 93 to 392
  VARIANT 98..392: note = Derived polymorphism lacks residues 98 to 392
  VARIANT 99..392: note = Derived polymorphism lacks residues 99 to 392
  VARIANT 108..392: note = Derived polymorphism lacks residues 108 to 392
  VARIANT 115: note = Ancestral polymorphism is E, Derived polymorphism is Q
  VARIANT 126: note = Ancestral polymorphism is S, Derived polymorphism is N
  VARIANT 127: note = Ancestral polymorphism is E, Derived polymorphism is K
  VARIANT 129: note = Ancestral polymorphism is F, Derived polymorphism is L
  VARIANT 138..392: note = Derived polymorphism lacks residues 138 to 392
  VARIANT 185: note = Ancestral polymorphism is S, Derived polymorphism is R
MAWGALRSRVLPLPAPAATAAPHGLFLRFLLSTAVPHHGHHHRRRRLAPTAYAAAAAAAAEAPLPMTPRFGRATRQPGGAASVARVYADANAQRPKEYWDYESLDIQWGKQDGYEVLRKVGRGKYSEVFEGFRAGSDERCVIKILKPVKKKKIKREIKILQNLYGGPNIVKLLDIVRDDESKTPSLIFEHVNNTDFKALDYCHSRGIMHRDVKPHNVMIDHEKRQLRLIDWGLAEFYHPKMEYNARVASRCYKGPELLVDLLDYDYSLDLWSLGCMFAAMIFRVDPFFSGQDNYDQLVKIAEVLGTGDLYNYLEKYGLQLDPQLERLIGRHNRKPWPKFVNARNRHLATPEAIDLVDKLLRYDHQKRPTAKETMAHPYFNPVRSPESKTNSQ

SEQ ID NO: 1872 - protein, 193 aa, Zea mays
  VARIANT 174..193: note = Derived polymorphism lacks residues 174 to 193
  VARIANT 145..193: note = Derived polymorphism lacks residues 145 to 193
  VARIANT 132: note = Ancestral polymorphism is R, Derived polymorphism is C
  VARIANT 82: note = Ancestral polymorphism is E, Derived polymorphism is D
  VARIANT 33: note = Ancestral polymorphism is A, Derived polymorphism is V
  VARIANT 1: note = Ancestral polymorphism is M, Derived polymorphism is I
MAIRPPAALSHCHVILRYLASVFPGVADHWYPVDLFTRAKIESILDWHHSNLRRGAATLVMHTALAPFLGLTTSHEAVKQAEKLVMQSLGVIESVWLKGDAKFLLGSPQPSIADLSLVCEIMQLEIFGDEVRDRFLGAHERILVWMDKVKKATSPHFEEAHELLFQVKKARMVQGSSSKAFEPSTKLKTASKL

SEQ ID NO: 1873 - protein, 169 aa, Zea mays
  VARIANT 148: note = Ancestral polymorphism is T, Derived polymorphism is M
  VARIANT 139: note = Ancestral polymorphism is S, Derived polymorphism is L
  VARIANT 130: note = Ancestral polymorphism is W, Derived polymorphism is C
  VARIANT 92: note = Ancestral polymorphism is L, Derived polymorphism is S
  VARIANT 23: note = Ancestral polymorphism is G, Derived polymorphism is R
  VARIANT 18: note = Ancestral polymorphism is A, Derived polymorphism is G
MIMYANSPSNTPNPYEQGISIIGRTLSKFDEDNLIPCFGFGDASTHDQDVFVSLLTRNLVMDLKKLLDNAGNLINTLCTNVKQSGGQYQVLLIIADGKDAMAALPRSPNSARLPLSLRDARWIGESMAAWQGGLSQRFLKVVSYYGLTTLPYKLDALEPYMRKRTVELH

SEQ ID NO: 1874 - protein, 345 aa, Zea mays
  VARIANT 318: note = Ancestral polymorphism is N, Derived polymorphism is Y
  VARIANT 306: note = Ancestral polymorphism is V, Derived polymorphism is M
  VARIANT 281..345: note = Derived polymorphism lacks residues 281 to 345
  VARIANT 264: note = Ancestral polymorphism is R, Derived polymorphism is Q
  VARIANT 221: note = Ancestral polymorphism is A, Derived polymorphism is T
  VARIANT 220..345: note = Derived polymorphism lacks residues 220 to 345
  VARIANT 197: note = Ancestral polymorphism is V, Derived polymorphism is M
  VARIANT 195: note = Ancestral polymorphism is R, Derived polymorphism is W
  VARIANT 192..345: note = Derived polymorphism lacks residues 192 to 345
  VARIANT 189: note = Ancestral polymorphism is G, Derived polymorphism is A
  VARIANT 180: note = Ancestral polymorphism is V, Derived polymorphism is I
  VARIANT 178: note = Ancestral polymorphism is A, Derived polymorphism is T
  VARIANT 164: note = Ancestral polymorphism is A, Derived polymorphism is V
  VARIANT 153: note = Ancestral polymorphism is T, Derived polymorphism is M
MLASLPSDPPRSPSALPSRALGKRSSSPKLPSEPSRPPLPARRIPAVPTIACVGSHPVRSCLVVQFSHTVCGGVRLAPVSHTVPQRIQSRFLTLRCLLPSPLPSNPRFRVHSGYRELAPASMAPSSARNSPMPVGRGSRILTRFLLHYLRAATRRPPALEREGAVLAGLADTTVHGMALVEGTTFSCRALFWVLRIVSAVGLSKECRHKLERLMGLMLVQATLDDLLVSSDDGGGMCIVNLVMRLVRVFVASKEEADTPSKRMRKVGRLVNKYLDEISQDQGLKVSKFLTVAESLPDSARDCYNGMYRVLDIYLEMAYPKTALLTRMANMLIQMSLQNPLTLAHP

SEQ ID NO: 1875 - protein, 53 aa, Zea mays
  VARIANT 14: note = Ancestral polymorphism is N, Derived polymorphism is K
  VARIANT 15: note = Ancestral polymorphism is C, Derived polymorphism is Y
  VARIANT 24: note = Ancestral polymorphism is L, Derived polymorphism is V
  VARIANT 26..53: note = Derived polymorphism lacks residues 26 to 53
  VARIANT 27: note = Ancestral polymorphism is T, Derived polymorphism is I
  VARIANT 30: note = Ancestral polymorphism is A, Derived polymorphism is D
  VARIANT 38: note = Ancestral polymorphism is I, Derived polymorphism is T
  VARIANT 40: note = Ancestral polymorphism is T, Derived polymorphism is I
MKHIFDGHVVLQYNCTNTIPEQLLEQTFVAFEKPEGVIGTDKFSNLLKFIVKE

SEQ ID NO: 1876 - protein, 256 aa, Zea mays
  VARIANT 21: note = Ancestral polymorphism is R, Derived polymorphism is L
  VARIANT 31..256: note = Derived polymorphism lacks residues 31 to 256
  VARIANT 60: note = Ancestral polymorphism is C, Derived polymorphism is Y
  VARIANT 165..256: note = Derived polymorphism lacks residues 165 to 256
  VARIANT 248: note = Ancestral polymorphism is S, Derived polymorphism is L
MGGTCGSSTSWLSGLAAIRPRKRGTAPLQQQEAVTSPKAGRYLMALDKKPIATKGHHLCCPHPSRGPHLPGNQLPVPLVPIISKGVLEEEVMVSFVATNGEPTTTATSKLVWWNLVEQMTMTPTSCTSAATLPTRTRAPPSRALYKSGSIIVLGKTDFLRPDMLQEALVPWTRSLDRTIVASTPRSCCPLASSSYNSPTSPTLFFKQEMELSLVGLQNARKTSLAAARSDTPASSSWKLYLFQNKQVSYLVNQLVF

SEQ ID NO: 1877 - protein, 338 aa, Zea mays
  VARIANT 46: note = Ancestral polymorphism is S, Derived polymorphism is I
  VARIANT 62: note = Ancestral polymorphism is P, Derived polymorphism is S
  VARIANT 67: note = Ancestral polymorphism is L, Derived polymorphism is I
MGLDVGGIGMGLDLGLDLGLFAARSAGGMAAAAKGAPAEIESCIRSLEEERRKIEVFRRELPLCVRLLADVIDELKDEAAKRGGDAEAKADDGDKRKWMSTAQLWLDSDAKSDESDKEQLSEITSPEPKLLGGAPMPIRAVAAVPPLPPPFFRREDSSAGSGLSLVPPAAKPPIPPMSASDNASGRFCATMPPSGSGANLHSQAQQQARKARRCWSPELHRLFVAALHQLGGPQVATPKQIREVMKVDGLTNDEVKSHLQKYRLHNRRSPGVVAPVSQSVMLAGGLWAPPHQEQSSSQSGSPQGPLQFSGSGVAATVGGDSSSSDEDDKSEGYSRKYV

SEQ ID NO: 1878 - protein, 286 aa, Zea mays
  VARIANT 17: note = Ancestral polymorphism is Y, Derived polymorphism is C
  VARIANT 19: note = Ancestral polymorphism is G, Derived polymorphism is A
  VARIANT 51: note = Ancestral polymorphism is H, Derived polymorphism is R
MPTSEVWSLSDFEISKYIAEGRFGKVYLAREKQSGYVVALKVIFKAKLKKHRFHAHLRREIEIQQSLDHPNVLRLFTWFHDEERVVLVLEYAARGELYKVLRAAGRFTERTSATYVASLAGALAYCHKKQVIHRDIKPENLLIDIEGRLKIADFGWAARSNAKRHTLCGTIDYLAPEMVEKRAHDHAVDNWTLGILCYEFLYGSPPFEADEQDDTLRRIVRVDLAFPSSPCVSSEAKDLISKLLVKDSSKRLCLEDIMKHPWIKKNADPSGSCIKQKDVTRSKVKR

SEQ ID NO: 1879 - protein, 100 aa, Zea mays
  VARIANT 68: note = Ancestral polymorphism is V, Derived polymorphism is I
  VARIANT 58: note = Ancestral polymorphism is D, Derived polymorphism is G
  VARIANT 57: note = Ancestral polymorphism is G, Derived polymorphism is R
  VARIANT 56: note = Ancestral polymorphism is G, Derived polymorphism is D
  VARIANT 39: note = Ancestral polymorphism is A, Derived polymorphism is T
  VARIANT 38..100: note = Derived polymorphism lacks residues 38 to 100
  VARIANT 35: note = Ancestral polymorphism is P, Derived polymorphism is L
  VARIANT 27: note = Ancestral polymorphism is D, Derived polymorphism is V
  VARIANT 13: note = Ancestral polymorphism is A, Derived polymorphism is T
  VARIANT 6: note = Ancestral polymorphism is D, Derived polymorphism is Y
MFPTFDVGDRILAEKVSYIFREPEILDIVIFRAPPVLQTLGYNLGDVFIKRVVAKGGDIVETVPEGYVFVLGDNRNNNFDSHNWSPLPFKNILGRSVLRY

SEQ ID NO: 1880 - protein, 513 aa, Zea mays
  VARIANT 319..513: note = Derived polymorphism lacks residues 319 to 513
  VARIANT 322..513: note = Derived polymorphism lacks residues 322 to 513
MPTSEVWSLSDFEISKYIAEGRFGKVYLAREKQSGYVVALKVIFKAKLKKHRFHAHLRREIEIQQSLDHPNVLRLFTWFHDEERVVLVLEYAARGELYKVLRAAGRFTERTSATYVASLAGALAYCHKKQVIHRDIKPENLLIDIEGRLKIADFGWAARSNAKRHTLCGTIDYLAPEMVEKKAHDHAVDNWTLGILCYEFLYGSPPFEADEQDDTLRRIVRVDLAFPSSPCVSSEAKDLISKLLVKDSSKRLCLEDIMKHPWIKKNADPSGSCIKQKDVTRSKDAAAVYCTMSCSYIVSVILDKYRSTDLPRMFLNGSGPLQKPYNTRPPFSISNCKPVLLFRLLDATRRRLLQLAPRSSPHHLPLPPTMSTSEVWSLSDFEISKYIGEGRFGKVYLAREKQSGYVVALKVIFKAKLQKYHFHAHLRREIEIQQSLDHPNVLRLFTWFHDEERVVLVLEYAARGELYKVLRAAGRFTERTSATVKNPPVFLLLHFYFPVVPTAGLPFLLLLLT

SEQ ID NO: 1881 - protein, 109 aa, Zea mays
  VARIANT 4: note = Ancestral polymorphism is Q, Derived polymorphism is R
  VARIANT 12: note = Ancestral polymorphism is A, Derived polymorphism is T
  VARIANT 48: note = Ancestral polymorphism is T, Derived polymorphism is I
  VARIANT 51..109: note = Ancestral polymorphism lacks residues 51 to 109
  VARIANT 62: note = Ancestral polymorphism is P, Derived polymorphism is L
  VARIANT 69: note = Ancestral polymorphism is A, Derived polymorphism is T
  VARIANT 93: note = Ancestral polymorphism is S, Derived polymorphism is L
MATQVSLVMWRAVFSALGLLVVATLVYTLATDGSLFHPELVTPNGAATFGRSTTCCGPTCKPAPVVSLAIVVFPLVPVEARFSSIASSAVQVSVPVSSPVMISQPMEQD

SEQ ID NO: 1882 - protein, 95 aa, Zea mays
  VARIANT 59: note = Ancestral polymorphism is E, Derived polymorphism is D
  VARIANT 55: note = Ancestral polymorphism is D, Derived polymorphism is G
  VARIANT 39..95: note = Derived polymorphism lacks residues 39 to 95
  VARIANT 21: note = Ancestral polymorphism is M, Derived polymorphism is T
  VARIANT 6: note = Ancestral polymorphism is G, Derived polymorphism is R
  VARIANT 4: note = Ancestral polymorphism is K, Derived polymorphism is T
MSLKAGGVALNLTVASHVFLMDPWWNPAVENQAQDRIHRIGQFKTIKSTRFVIKGTVEERILQLQQKKQLVFEGTVGDSPDAMSKLTEADLKFLF

SEQ ID NO: 1883 - protein, 94 aa, Zea mays
  VARIANT 81: note = Ancestral polymorphism is R, Derived polymorphism is K
  VARIANT 77: note = Ancestral polymorphism is K, Derived polymorphism is R
  VARIANT 65: note = Ancestral polymorphism is V, Derived polymorphism is D
  VARIANT 64..94: note = Derived polymorphism lacks residues 64 to 94
  VARIANT 44: note = Ancestral polymorphism is S, Derived polymorphism is F
  VARIANT 35: note = Ancestral polymorphism is E, Derived polymorphism is K
  VARIANT 24: note = Ancestral polymorphism is T, Derived polymorphism is I
  VARIANT 6: note = Ancestral polymorphism is A, Derived polymorphism is T
  VARIANT 2: note = Ancestral polymorphism is S, Derived polymorphism is F
MSVSPAKFEQKGGHDDKKLMIPATVILRHMFTPAELRADEELLSELEADVREECIKFGLVDNVKVCENNPQGVILVRFKDRKDGAKCIEKMDGR

SEQ ID NO: 1884 - protein, 86 aa, Zea mays
  VARIANT 69: note = Ancestral polymorphism is T, Derived polymorphism is K
  VARIANT 51..86: note = Derived polymorphism lacks residues 51 to 86
  VARIANT 46: note = Ancestral polymorphism is R, Derived polymorphism is C
  VARIANT 42..86: note = Derived polymorphism lacks residues 42 to 86
  VARIANT 39: note = Ancestral polymorphism is R, Derived polymorphism is L
  VARIANT 37: note = Ancestral polymorphism is P, Derived polymorphism is L
  VARIANT 30: note = Ancestral polymorphism is D, Derived polymorphism is V
  VARIANT 29..86: note = Derived polymorphism lacks residues 29 to 86
  VARIANT 27: note = Ancestral polymorphism is I, Derived polymorphism is N
  VARIANT 24: note = Ancestral polymorphism is R, Derived polymorphism is M
  VARIANT 10..86: note = Derived polymorphism lacks residues 10 to 86
MLLPWLLFQQMGLPQLVTLHFKIRGLILQDGNSPLLLHLATRLHLRLSVNWVVDSTSSFWTAFMMTGPTGRGNSNRCMVQQCLIHS

SEQ ID NO: 1885 - protein, 302 aa, Zea mays
  VARIANT 227: note = Ancestral polymorphism is E, Derived polymorphism is K
  VARIANT 199..302: note = Derived polymorphism lacks residues 199 to 302
  VARIANT 191: note = Ancestral polymorphism is S, Derived polymorphism is I
  VARIANT 187..302: note = Derived polymorphism lacks residues 187 to 302
  VARIANT 182..302: note = Derived polymorphism lacks residues 182 to 302
  VARIANT 154..302: note = Derived polymorphism lacks residues 154 to 302
  VARIANT 145..302: note = Derived polymorphism lacks residues 145 to 302
  VARIANT 136..302: note = Derived polymorphism lacks residues 136 to 302
MSSSHTLSTIQRCPPRRPFPVHDPAVPTPMAATLLHAATASLQSSSQPARAGAGAATAFHPLASTPSIRLARSSFSSNRRLEVSLRAVLAGHRFAGRGAPRGRRVVAALAGEPTEGSEVGDDKDNSNGEIKPEEAQEAWKVMLEQFKAEALRMQALSMQAYDVYSKRAREVLLEASEKLKIQADKAQKDLSVIATEVSQEGHEYLVMAARSSPDSIKDITTTFRALERLNWPSEYEDYHVGIPFGTFLTVGGFLNFMLTGSTSALRFGIVLGLALLTLGISSLRSHREGDRRSRLLVKGQAG

SEQ ID NO: 1886 - protein, 441 aa, Zea mays
  VARIANT 192..441: note = Derived polymorphism lacks residues 192 to 441
MVEWLRCPHGPSMVCTHTQGGRIREHRDDSEQLDQCRRFDDLSLCNISFELKASQITQEAVSISTIMNREKNSIECLMTVIREIMRNTEFAIRSYVQLRARFVYPSAESANSGFSNHSGSSGAQTDFHQLLATTPRFRCYSSAARRPSPFVQQTVARFEDDFGYCCKLILELEQLLQMKDGKTFAESLKSLSNVVSNVHDYLIHVASKVEHFHQYVETVKTQYLNDRRRRGDLSNPFLEANNREAVKQATDRIIHPMLHLAPPCQPTTLVVAPMIGSQLQQTSFHTVATFPSSCPTVPLPSVLPPSSIQTSPAPSTNPFNSSGPVLQSMPFDPFSTLALGSMPAASLFGTRIPSSATSLVPVPSGGGTAASGVKFNRVPSMFGGHACPLQRTAYLSHSSARGRSPRETICDLYCGWRGCEEASAHKSATSQPPGAGLCFEV

SEQ ID NO: 1887 - protein, 121 aa, Zea mays
  VARIANT 103: note = Ancestral polymorphism is L, Derived polymorphism is F
  VARIANT 96: note = Ancestral polymorphism is P, Derived polymorphism is L
  VARIANT 87..121: note = Derived polymorphism lacks residues 87 to 121
MPGLGLDLNLPPELQDVCRRLSYGGANSPSSSRTPPLPLIYGSPEELMTPISPRTTSALYPAPGETSTPTQSQQLMLYTVDGRAASYETKWDELHPVSQMLLLQIEYGSLCILACCSTSAA

SEQ ID NO: 1888 - protein, 237 aa, Zea mays
  VARIANT 136..237: note = Derived polymorphism lacks residues 136 to 237
  VARIANT 87..237: note = Derived polymorphism lacks residues 87 to 237
MLSPTTLRPLVPAAAPAHLTACFLPASGRRAPAAAVRAVRNYDSIPKREPFTSNRSTLDEFLRLDKPLVQRTKDQITECSGERAQEENVLVRVLSIVSEAQSICSDYCMTVEGDECCSCWDAYFELNKLERELPKEEISRMVKDSEGDVRYLIESIHHRSDLRKKIAEKSRNSVPSGSQGQTAKPRPFPVPDGIPKTQEELTEEEEALMPESPYTRLLRRMGRYPEWYTPRPDHETD

SEQ ID NO: 1889 - protein, 117 aa, Zea mays
  VARIANT 38: note = Ancestral polymorphism is K, Derived polymorphism is N
  VARIANT 81: note = Ancestral polymorphism is A, Derived polymorphism is D
MASSFAVATVPSLAAPAAKKRSGGVTYVEGMNAYSGLKGLNKVNMLGVRKTADYSFAKVVASLSPAGRKRRGGAFGAQMNDAAEIFRIAATMNGLVLVGVAVGFVLLRVEAAVEESE

SEQ ID NO: 1890 - protein, 227 aa, Zea mays
  VARIANT 144: note = Ancestral polymorphism is A, Derived polymorphism is D
  VARIANT 128: note = Ancestral polymorphism is G, Derived polymorphism is R
  VARIANT 90..227: note = Derived polymorphism lacks residues 90 to 227
  VARIANT 83: note = Ancestral polymorphism is G, Derived polymorphism is R
  VARIANT 69..227: note = Derived polymorphism lacks residues 69 to 227
  VARIANT 67: note = Ancestral polymorphism is P, Derived polymorphism is L
  VARIANT 33: note = Ancestral polymorphism is G, Derived polymorphism is S
MTVFHFLNCAFLTFGPHVVYYSATPLSEYDTIGTSIKAAAVYLGTALVKLVCLATLLKVPENDSFDPYQELMKVFIGFIDVAGLYFALTQLTHRNISQNHKFQAVGLGWAFADSVLHRLAPLWIGARGLEFTWEYIFQGLEANANLVMTLSLAALGSLMWLRKNKPRTLVPIIYACALLLATMPSITSYLRRSLEWQTPKVVGFELFSSLVMAFISWQLFSACQRPM

SEQ ID NO: 1891 - protein, 390 aa, Zea mays
  VARIANT 99: note = Ancestral polymorphism is K, Derived polymorphism is M
MLRRNLPNLSLQISPPAAAASDAPATYSEGSSDEVGLFANPSSGAEPPPPGLSLGLATPARGDNDDATGRRGHLQPPQGCAFKRAAAGSSSLPAGSKSKRSARAPRMRWTTALHARFVHAVGLLGGHERATPKSVLELMNVKDLTLAHVKSHLQMYRTVKSTDRSLHIATGEALPPVKRTTTTATAKDAAAAAAVAAAAGGGGGGGAAVAVPVSACDDMVGICSSPSAGSAPPATATTISAAHFICAPAATAPLAAAGAAAPSPPPPIPPRSRTDHAPAAVPEKGVAIADSLSLHRCQKHNFSPAVLQDTQQAAQDEEANNNNGQLATGRLRGSVDPMATNCSSPASSSSPSLASLEQQTADDMCAPSLEISLGRRHWSAEERPEGVSLK

SEQ ID NO: 1892 - protein, 83 aa, Zea mays
  VARIANT 3: note = Ancestral polymorphism is G, Derived polymorphism is S
  VARIANT 39: note = Ancestral polymorphism is D, Derived polymorphism is G
  VARIANT 41: note = Ancestral polymorphism is D, Derived polymorphism is G
  VARIANT 58: note = Ancestral polymorphism is R, Derived polymorphism is S
MAGAVAVWLLGAFAKSGRLPEAPAQAAADAEDARRHRGDDGVGAVARVSNGRRVQEKRRRDSGALSGSEETVVCMLMDLYAPA

SEQ ID NO: 1893 - protein, 281 aa, Zea mays
  VARIANT 16: note = Ancestral polymorphism is P, Derived polymorphism is R
  VARIANT 80: note = Ancestral polymorphism is T, Derived polymorphism is R
  VARIANT 85: note = Ancestral polymorphism is A, Derived polymorphism is G
  VARIANT 91: note = Ancestral polymorphism is S, Derived polymorphism is C
  VARIANT 110: note = Ancestral polymorphism is S, Derived polymorphism is N
  VARIANT 115: note = Ancestral polymorphism is N, Derived polymorphism is D
  VARIANT 145: note = Ancestral polymorphism is C, Derived polymorphism is W
  VARIANT 174: note = Ancestral polymorphism is Y, Derived polymorphism is C
MEFALVESESFSPSCPTLIMPALSIGNVGQLAVDLLISSSRARRVAYLDEPSVLPCAGNDAFGPDAVGDLALALEAYESTSHKLGFIQQRSPVTTGMMVSFAKNVADFINSIGKNHIVIISSLDSGKRRVIDASSDMQVYYLSSCNEDGSDPEYEKLGWKKLEDYDPSQKRWNCLASLVEGGGLSEDLDDDTDEMTINDYYASLPFAALFSACKAKGLKVSCVLCYCSEGDNMPESFQLAEAICKLLGHGPEKFHGNGSNGWIVPLSWKSVYGPPPDMSIF

SEQ ID NO: 1894 - protein, 519 aa, Zea mays
  VARIANT 51: note = Ancestral polymorphism is R, Derived polymorphism is W
MATATYLPSSFSFSSPPPPPSSRARLRRQTTRAGASAATDRPREVLSPKRRLPLREVPGDYGPPVLGAVRDRFEYFYGPGGRDGFFASRVRAHGSTVVRLNMPPGPFVARDPRVVALLDAASFPVLFDTSLVDKTDLFTGTFMPSTDLTGGYRVLSYLDPAEPSHGPLKALLFYLLSHRRQHVIPKFREVYGDLFGVVENELARVGKADFGHHNDAAAFSFLCQALLGRDPAESALQGDGPKLITKWVLFQLSPLLSLGLPKHLEDSLLHSFRLPPALVRKDYGRLADFFRDAARSVVDEGERLGIAREEAVHNILFATCFNSFGGMKILFPSLVKWLGRAGARAHGRLATEVRDAVRAHAGEVTMKALAEMPLVESAVYEALRIEPPVAMQYGRAKRDMVVESHDYGFEVREGEMLFGYQPMATKDPRVFARAEEYVPDRFLGEDGAQLLRHVVWSNGPETASPTLQDKQCAGKDFVVLIARLLVAELFLRYDSFDVQVGASALGSSVTITSLKKATF

SEQ ID NO: 1895 - protein, 122 aa, Zea mays
  VARIANT 98: note = Ancestral polymorphism is S, Derived polymorphism is P
  VARIANT 84: note = Ancestral polymorphism is A, Derived polymorphism is V
  VARIANT 54: note = Ancestral polymorphism is P, Derived polymorphism is S
MGMTAGSKLLHGRQSQPITSDKALSLDRVNFVMLNVDSTKWEQELDEIGVEGIPHFAFLDKEGNEEGNVVGRLPKQYFLDNVVALASGEMEGYTIVYSIFSVSSMRALERAVRFHRSQKKRA

SEQ ID NO: 1896 - protein, 243 aa, Zea mays
  VARIANT 89: note = Ancestral polymorphism is L, Derived polymorphism is P
MGKGFASYLAMKTGPEGGDAAAAQQALIDADLRELGVAARKLANHAFVLGGGLGFGTSFLKWLAFLAAVSTVNVLLKPEHGQEVMILLLFRNSWTLLGCWYLLILDRTNWKTNMLTALLVPYIFFTLPNVLFSLIRGEVGKWIAIIAVILRLFFPRHFPDWLELPGSIILLTVVAPSLFADSFRGDLVGVFICLVIGCYLLQEHIKASGGFRNAFRKGNGVSNSIGILLLFIYPVWAGVLQVL

SEQ ID NO: 1897 - protein, 159 aa, Zea mays
  VARIANT 128: note = Ancestral polymorphism is G, Derived polymorphism is R
MDNGDRSGAGAGAVGSAGSLGLRVGQAVFSSASLLFMSVGVEFFSYTAFCFLVTIMGLVIPWSCTLAMIDVYSVFVGCPLRVPGVMVIVVVGDCALSIVSFAAACSSAAVIDLLLQLHGSHSSPTFCGRYQLSAMMAFLSWLLMAASATFNLWFVASRW

SEQ ID NO: 1898 - protein, 700 aa, Zea mays
  VARIANT 99..700: note = Derived polymorphism lacks residues 99 to 700
MAAAEARGADFPVGMKVLVVDDDPTCLVVLKRMLLECRYDVTTCPQATRALTMLRENRRGFDVIISDVHMPDMDGFRLLELVGLEMDLPYVNMWCWNTSEIIADEIAVMSADSRTDIVMKGIKHGACDYLIKPVRMEELKNIWQHVVRKKFNGNKDHEHSGSLDDTDRNRPTNNDNEYASSANDGGDGSWKSQKKKREKEDDETDLESGDPSTSKKPRVVWSVELHQQFVNAVNHLGIDKAVPKKILELMNVPGLTRENVASHLQKFRLYLKRIAQHHAGIPHPFVASASSAKVAPLGGLEFQALAASGQIPPQALAALQDELLGRPTSSLALPGRDQSSLRLAAIKGNKPHGEREIAFGQPIYKCQNNTYGAFSQSSPAVGGLPSFAAWPNNKLGMTDSSNTLGNVGNSQNSNMLLHELQQQPDTLLSGTLHNIDVKPSGVVMPSQSLNVFPASEGISHNQNPLVIPSQSPSFLASVPPSMKHESLLGSPSPSTSLLGGLDMVNQASTSQPLISSHGANLPGLMNRSSNAMPSPGISNFQSGNIPYVVTQNAMGVSSRPPGVLKTECTESLTHSYGYIGGSTSVDSSLLSSQAKNPQYGLLQSQNDVSSSWLSSQDFDSFGNSLGQGHPGSTSSSFQSSALGKLPDQGRGRNHGFVGKGTCIPSRFAVDEVGSPTNLSHNIVNSGDIVNPDIFGFSGQM

SEQ ID NO: 1899 - protein, 672 aa, Zea mays
  VARIANT 20: note = Ancestral polymorphism is S, Derived polymorphism is Y
MEVEALEKKGHAAFAKAMKSFGSSERYKRSTSGRYFEDMYATDALRSSDKTIVLPMPCSSILYRSVNAWFPPLATDLCLIFPSQEVVKAKVKCDITKEAQPGRGAQSTLRKEILQLEKHLKDQQAVRGALEKALGPNAGPVSLSPENPMPQAANELIREIATLELEVKNMEQYLLTLYRKAFEQQQAPAFSPPDRREASKPSVSSRSGQLRETPMATKSSCKSRGDAALRSSYPPAHKKLNDPLADCCTSARFDRVVDSDVLRCQSALSYRGVCSSRILPSEDDSLARALRSCHSQPFSFVEEGDTGASGMISLAEYLGTNVADHIPETPNNLSEEMVRCMAGIYCRLADPPLVHHGSSSSPSSSFSSTSAISPQYVGDMWSPKYRREATLDSRLINPFHVDGLKEFSGPYNTMVEVPMISRDSRRLKEAEDLLQTYKLILYRLEAVDLRRMTDEEKIAFWVNIHNALLMHAYLKNGVPQNNLKKTSLLVKAACKIAGRNINAAVIQSIVLGCNTHCPGQWLRTLLYPRIKSKVSKAGHEWRAFAVAQPEPLLRFALCSGSHSDPAVRVYTPKRLFHQLESAKEEFIRATAGVWKEQKLLLPKLVEAYAKDVKLSPQGLVDMVQRYLPESMRMAVQRCQHGGRSSGKVVEWVSYNPAFRYLLARDLAFPHLS

SEQ ID NO: 1900 - protein, 224 aa, Zea mays
  VARIANT 119: note = Ancestral polymorphism is G, Derived polymorphism is S
  VARIANT 104: note = Ancestral polymorphism is R, Derived polymorphism is H
  VARIANT 100: note = Ancestral polymorphism is T, Derived polymorphism is I
  VARIANT 83..224: note = Derived polymorphism lacks residues 83 to 224
  VARIANT 78: note = Ancestral polymorphism is S, Derived polymorphism is L
MALSVSSLAAALSHLSLPSTSTPKPHPAPLLRLRSTYRRAVSLALRASAAEAAESFEADLPAEEVMAVEEEAEEDALSGIALRKYVKQRLPGGFAAQRITATGRRKTAIARVVLQEGTGKVFINFRDAKEYLQGNPMWMEYCKVPLMTLGFEKNYDVFVKVHGGGLSGQAQAICLGVARALVKISNANRVPLKSEGLLTRDTRIVERKKAGLKKARKRPQFSKR

SEQ ID NO: 1901 - protein, 185 aa, Zea mays
  VARIANT 31: note = Ancestral polymorphism is T, Derived polymorphism is K
MAKRPSSKRSFRLPFMCGQSDVASPRGAAVKRPSSSSSSSLGRGSRSGSSSASSSSSRHGELQRIFQHFDRDNDGKISGAELRAFFVSMGDDMPPSYGDGGYMLDFAGFVALMEREGGQEEDLRRAFDVFNAVESAGRITARGLQRVLAQLGDKRSVADCEAMIRAYDVDGDGGLDFHEFQRMMS

SEQ ID NO: 1902 - protein, 151 aa, Zea mays
  VARIANT 143: note = Ancestral polymorphism is G, Derived polymorphism is R
MSRGSKLRWLWRAPARALGRARDLYVRGLTGCARHVPSDAAFGYPVFVPAPLSRSHSAVGWGAGSSEADEDLREVVRAASQRRVEQRRAELQAVARSQSMAASLSMARIDEDAPCDFGAPGALCPRSQSCVGDAAGRRPHRRGHGKVAALL

SEQ ID NO: 1903 - protein, 878 aa, Zea mays
  VARIANT 217: note = Ancestral polymorphism is R, Derived polymorphism is S
MASRSYSNLLDLATGAADQAPAVAALGALRRRLPRVVTTPGLIDDSPASPSTPPRPRTIIVANQLPIRSHRPESPEEPWTFEWDEDSLLRHLHHSSSPLMEFIYIGCLRDDIPQAEQDAVAQALLETHNCVPAFLPTDIAERYYHGFCKQHLWPLFHYMLPLSPDLGGRFDRALWQAYVSANKIFADKVLEVINPDDDFVWVHDYHLMVLPTFLRKRFNRIKLGFFLHSPFPSSEIYKTLPVREELLRALLNSDLIGFHTFDYARHFLSCCGRMLGLSYESKRGHICLEYYGRTVSIKILPVGVHMEQLKTVLGLPETEAKVSELMEMYSGKGRVVMLGVDDMDIFKGISLKLLAMEELLRQHPEWRGKLVLVQVANPARGRGKDVAEVQTETYAMVRRINEVYGEPGYEPVVLIDEPLQFYERVAYYVIAEVCLVTAVRDGMNLIPYEYIVSRQGNEKLDRMLRQGKPEEKKSMLVVSEFIGCSPSLSGAIRVNPWNIEAVADAMETALVLPENEKRLRHDKHFRYVSTHDVGYWANSFLLDLERTCKYHSQKRCWGIGFGLRFRVVSLDLTFRKLSLENILMAYRRAKTRAILLDYDGTLMPQAINKSPSTESVRILNSLCRDKDNVVYLCSGYDRRTLHEWFPCENLGIAAEHGYFLRCKRDAEWKTCVAATDCSWKQIAEPVMCLYRETTDGSTIEDRETVLVWNYEDADPDFGSCQAKELVDHLESVLANEPVSVKTTPHSVEVKPQAHELTAWRRDCSLLQGVSKGLVARRMLVSMKERGQCPDFVLCIGDDKSDEDMFQLIATAACGDSLASKAEVFACTVGRKPSKAKYYLDDAAEVVRLMQGLSYVSEELALANQRDEDEDSSLDDVWE

SEQ ID NO: 1904 - protein, 350 aa, Zea mays
  VARIANT 179: note = Ancestral polymorphism is P, Derived polymorphism is L
  VARIANT 302: note = Ancestral polymorphism is V, Derived polymorphism is M
MDRLVLFSRRRRRWILLTAAGAAAAVGAYKIYHHPVVAERRHRLVRLAAAVAAIADAATSSADAAALVVSDLADFVRSDADEVPRSVKQLAKLAASPEVSATVSTLSEAVTSGMFRGAGSSSSGPGSGGTVALSDRFVDKLFSDSGERLASAVAGSFARHLVLAYYSAPSPQGEASSSPTVWVNVVATGKCRKAISTWVEVFVGTAVREFIDKTIHINTYEQIFEGLTNPKHDAKVKELLVSVCNSAVETLVKTTHHALYNTNDNLDANDSCSGSGNGNGVGEGWVERVSSTLAVPSNRKFVLDVTGRVTFETVRSFLEFVLWKLQDGARKGGDSMVDSGLRVVRLLVAA

SEQ ID NO: 1905 - protein, 185 aa, Zea mays
  VARIANT 125: note = Ancestral polymorphism is A, Derived polymorphism is G
MLSVQEALDLASSSCGTMDITTCGFTPWGPESCPSLEQVMASRPAASSTAALAEAEAEAARDADPEDEERLRRQRRKVSNRLSAQRSRARKQQRLEELREAAARLRAEKQQLEARLQALARHDLAVRCQNARLGAEASALARRFREARRLLALRRLAFAALQPRPGVAPAPAPPAPLLGLASLMT

SEQ ID NO: 1906 - protein, 546 aa, Zea mays
  VARIANT 47..546: note = Derived polymorphism lacks residues 47 to 546
MKIPSRLPDHEEEEEYDDALFYEDIQAPKFVDLTAPDAGRPDDDPAWFCLRVGCDQSHEQVDPEALDRSFFMRVMAARSPNVRLQKAISKKNQSSMLKCPHSAPPKRPRARFARLSAETETAGKAPAEPKPRVERICAMQASPIRTKTARVECPSERKKALTTPRSKAVRPRQELFHSVKHQKEPLAAAARKGTVVKSLFMSTTPKKEPVQTPAADKSKGAVSKVCSKLRKLNLACREVPSRYMSQPQPKIMKTAKKAEETTVAKSEKRGLESKTNAKKKILGRSVKRANAGPDGENRNGCSTAADENSLAETAGSHQERKVVLQELRIEVDASRYGNSDDNKENVSSAPSEEALDNSHYGSENRLLENNENIPLKENVALKVAKLQKKVHQEQAGKLKKTTNPRPFRLRTDERGVLKEAKPEKRQPFAENNSMAVLKDANREVTQMDKHTHGKGRDKPPTCGKKQKKQSAQIAVTAQQLGEPTRPAFNNGIQRKAVEPERVCRAASSTRTTKPARGLPAPPPPSRTGKDRKAAVKLSSRFQTAAA

SEQ ID NO: 1907 - protein, 586 aa, Zea mays
  VARIANT 333..586: note = Derived polymorphism lacks residues 333 to 586
  VARIANT 330..586: note = Derived polymorphism lacks residues 330 to 586
  VARIANT 300..586: note = Derived polymorphism lacks residues 300 to 586
  VARIANT 286..586: note = Derived polymorphism lacks residues 286 to 586
  VARIANT 281..586: note = Derived polymorphism lacks residues 281 to 586
  VARIANT 178..586: note = Derived polymorphism lacks residues 178 to 586
  VARIANT 69..586: note = Derived polymorphism lacks residues 69 to 586
  VARIANT 17: note = Ancestral polymorphism is G, Derived polymorphism is D
  VARIANT 13..586: note = Derived polymorphism lacks residues 13 to 586
MAVKDADAAVTVQLDLGFMVFNRPKKRAIVESGDGGLGLGIATFIANGEDLGPIIRHSFESGKPEALMQNLRSIVKKKESTRDELKGMLYGENSHLQEASADQLLKLDELLELYSVKKNVGEAITTLKICVELVKKVVPRQIPLIKLHIEKKVCSEFNDWLVHIRRMAKQIGQASISQASLAYQKGEEMCARQREAEAHSHAGPDEHLYALDLENTEEESTLYFDLTPVYRAHHMHTCLGMEDKFRDYYYKNRLMQLNLDMQISTSQPFLESHQPFLAQSQVETTWETSIGKITSILEEQFSRMRTANHFLLIKDYVTLLGAAVNKYGYRITQLIEVLEKSRDKYHQLLLLEEVNWIAEEAPDNVNDYMNEVLIYLETLVSTAQEILPLEALYKVVSGAMSHISDSIMTTLLNDGVKRFTVNAVLGIDIDLKTLEAFADDKFDSTGCQIWGRKRLSGTVCSQPENFMNPVIRQRNYGSLDYKKLAIICEKYKDSADSLFGSLSNRNTPQQSAHLCLDDENSATRCVKSTNTIVQIKSKIGALEEIVDSPIFLVNDAYQQMFERKNGRLSTLFLAMEEGFLALVSSL

SEQ ID NO: 1908 - protein, 69 aa, Zea mays
  VARIANT 32: note = Ancestral polymorphism is N, Derived polymorphism is D
  VARIANT 29: note = Ancestral polymorphism is E, Derived polymorphism is D
MPARSVSRSTHTEWPVFKVVLILSSWLNETINVWMFIDLLGFMMFFDLTLVHLGQYFTKVSGMIGHLSW

SEQ ID NO: 1909 - protein, 153 aa, Zea mays
  VARIANT 112..153: note = Derived polymorphism lacks residues 112 to 153
MAVARAIFGAAFGGWMNDKFARRPFIILADALFFGGAVIMAFSPTPRVIVVGRVFVGLGVGMASMTAPLYISEASPARIRGALVSTNGLLITGGQFLAYLINLAFTKVPGTWRWMLGIAGVPALVQFVLMLMLPESPKWLYRKVDSSICFYKK

SEQ ID NO: 1910 - protein, 174 aa, Zea mays
  VARIANT 29..174: note = Derived polymorphism lacks residues 29 to 174
  VARIANT 84: note = Ancestral polymorphism is D, Derived polymorphism is Y
  VARIANT 86: note = Ancestral polymorphism is C, Derived polymorphism is Y
  VARIANT 120: note = Ancestral polymorphism is G, Derived polymorphism is R
MMLLRLSGVKVEALQGSWTRQIFLCLNDQNQRTLMKCRNGSTSIKKAKKTNRELHAERCDTKLKLSVARKMREEDEFYYPHNLDFCGRAYPMHPHLSHLGLGLCRGVLEYAEGRPLGKSGLCWLKIHLANKYGGGIEKLSHEGTLAFVENQLFDIFDSSANPVDGNYWWTNAED

SEQ ID NO: 1911 - protein, 72 aa, Zea mays
  VARIANT 1: note = Ancestral polymorphism is M, Derived polymorphism is I
  VARIANT 27: note = Ancestral polymorphism is R, Derived polymorphism is C
  VARIANT 30: note = Ancestral polymorphism is R, Derived polymorphism is H
  VARIANT 36: note = Ancestral polymorphism is P, Derived polymorphism is S
  VARIANT 47: note = Ancestral polymorphism is R, Derived polymorphism is H
  VARIANT 57: note = Ancestral polymorphism is A, Derived polymorphism is E
MSLATAVADLSWGWRTGVAKKAFSVKRFMREDWRLPPMTPEMIEYARTDAHYLLYIANCLASELHAKACGMF

SEQ ID NO: 1912 - protein, 435 aa, Zea mays
  VARIANT 332: note = Ancestral polymorphism is A, Derived polymorphism is V
  VARIANT 312: note = Ancestral polymorphism is A, Derived polymorphism is G
MDPCPFVRVLVGNLALRMPVAPPAAGAGAGVHPSTSPCYCKIRLGKMPVQSVPAPLVVSDGGEQTPASGALAAAFHLSKADLEWFNGKPSLFSSRGEASLKVSVYAGRKGSACGVSSGRLLGKATIALDLKGAEAKPAVLHSGWISIGKRSGKGSTAATELSLTVRAEPDPRFVFEFDGEPECSPQVLQVRGSMKQPMFTCKFGCRSNSDLRRPGMQPERDAASAKERKGWSVTVHDLKGSAVAMASMVTPFVPSPGTDRVSRSNPGAWLILRPAGDGAWEPWARLECWRERGGAGASDSLGYHFALLVPGADHAVALADSSIPSSNGGKFVIDLTAAQPLSRGGTPGCSPRGSGDLSNWPLGNYRGFVMSAAVQGEGRCSKPTVEVGVAHIGCAEDAAAFVALAAAVDLSMDACRLFSHRLRKELSHLQADLLR

SEQ ID NO: 1913 - protein, 225 aa, Zea mays
  VARIANT 71: note = Ancestral polymorphism is A, Derived polymorphism is T
  VARIANT 73: note = Ancestral polymorphism is G, Derived polymorphism is D
MRAREMTARSALDEVTDTGAFGRSPSTFRSFVSRDRRFPAVAGRYHLYVSYACPWASRCLAFLKLKGLDHAIGVTVVKPIFERTKKSDEHLGWVFPAAADEEPGAEPDLLNGARSVRELYEIARSNYAGKPTVPVLWDKQLKTVVNNESSEIIRMLNDEFNGITRNPGLDLYPAHLQASIDEANELVYDAINNSVYKCGFAKKKDDRVLVPDLGSLNSIHDRLVL

SEQ ID NO: 1914 - protein, 356 aa, Zea mays
  VARIANT 96..356: note = Derived polymorphism lacks residues 96 to 356
MMHKYIGSDVTSLVTLPVIIFEPMTMLQKMAELMEYCELLDKADECEDPYMRMVYASTWAVSVYFAYQRTWKPFNPILGETYEMVNHQGITFLAEQVSHHPPMGVAHCENEHFTYDITSKVKSKFLGNSLEIYPVGRTRVTLKKSGVVLDLVPPLTKVNNPIFGRTWVDSPGEMVMTNLTFRDKVVLYFQPCGWFGCRYLNEGSDSDNAPETSSDVSNESDNDNGRSIGRTTQCLAQNICTDQERLSSDDCDSSNQEPLSVFQYMEHDAPYGRQPLADMKKQSAQIDVTTQQLGEPRPAFNNGIQRKAVEPERVSRAASSTRTTKPARGVPAPPPSQTGKERKVAVKLSRFQTAAA

SEQ ID NO: 1915 - protein, 107 aa, Zea mays
  VARIANT 67..107: note = Derived polymorphism lacks residues 67 to 107
  VARIANT 29: note = Ancestral polymorphism is R, Derived polymorphism is S
  VARIANT 7: note = Ancestral polymorphism is A, Derived polymorphism is V
MWLQSMVGIGYLFGAISSVMKAALGYNQRQVAALGVAKDLGDYVGFLAGSLSAVLPSWAMLLIGSAQNFLVYGWLWLIVTRQAPALPLWMTTPSSARIAVGRYMFFY

SEQ ID NO: 1916 - protein, 365 aa, Zea mays
  VARIANT 322..365: note = Ancestral polymorphism lacks residues 322 to 365
  VARIANT 216: note = Ancestral polymorphism is A, Derived polymorphism is D
  VARIANT 182..365: note = Derived polymorphism lacks residues 182 to 365
  VARIANT 181..365: note = Derived polymorphism lacks residues 181 to 365
  VARIANT 171..365: note = Derived polymorphism lacks residues 171 to 365
  VARIANT 92..365: note = Derived polymorphism lacks residues 92 to 365
MASPDLLFNLWNLFYLGAYQAAINNIDIPGLDADAAAERDAIVFCSYIALGSYQLVISEIDSSAATSLQAVKLLALYLTGDKDWMRFSVAFWHTFCGTSADPFGAPTMTWPWEDGTNSLAMAKRRMRAHFEFMEKLGVNKWCFHDRDIAPDGKTLEETNSNLDEIVQLAKQLQGETNIKPLWGTAQLFMHPRYMHGAATSPEVKVYAYAAAQVKKALEVTHYLGGENYVFWGGREGYQTLLNTDMKRELDHLANFLQAAVDYKKKIGFNGTLLIEPKPQEPTKHQYDWDVATTFAFLQKYGPTGEFKINVECNHATLSGHRKGWDTDQFMTDIAEATLVMSSVVKNGGLAPGGFNFDAKLSVPFV

SEQ ID NO: 1917 - protein, 59 aa, Zea mays
  VARIANT 36..59: note = Derived polymorphism lacks residues 36 to 59
MPTSGQALARKNTAKSQGTEGSDEDEENSFSFKRASRDDFPDPIEFEGGVVVKEYPQTS

SEQ ID NO: 1918 - protein, 283 aa, Zea mays
  VARIANT 25: note = Ancestral polymorphism is A, Derived polymorphism is V
  VARIANT 46: note = Ancestral polymorphism is W, Derived polymorphism is L
  VARIANT 72: note = Ancestral polymorphism is R, Derived polymorphism is M
  VARIANT 114: note = Ancestral polymorphism is T, Derived polymorphism is I
  VARIANT 124: note = Ancestral polymorphism is G, Derived polymorphism is R
  VARIANT 188: note = Ancestral polymorphism is D, Derived polymorphism is Y
MGAADVVRRVATKGTFVEDNRQTEAVAQAMNGTILSRCTDGSIIVWDGNGNRLREFHYHSSSVRCIKTLGDRVWVSYASGTIEVVDVEGWPLNSPSSLDDILCYELASRELLYTRLENLKILVGTWNVAQEKASPEALRSWLGGAFFDVGLVVVGLQEVEMGAGVLGMTAAQESVGLEGSANGKWWIDSIGKTLDEGISFHRVGSRQLAGLLIAAWATNDLGPHVGDVDAAAVPCGLGRAIGNKVSNYLDIFTFFVFDEGTRYHLFDLCTTTMHRLASLFCTI

SEQ ID NO: 1919 - protein, 712 aa, Zea mays
  VARIANT 276..712: note = Derived polymorphism lacks residues 276 to 712
MPSIRAPASKQTATLQVAVKCRPLTDTEQRRSRHIIQVIDDKTVVVLDPDLSKDYLDLIQNRTKERSYTFDHVYAPGCSNSDVYKNISSTIAGVVQGLNATVFAYGSTGSGKTYTMVGTHSDPGLMVLSFRTIFELIKKDDSKDTFEVSCSYLEVYNEVIYDLLERSSGHLELREDPEHGIIVAGLRSIKVHSADRILELLNIGNSRRKTESTEANATSSRSHAVLEITVKRKQKGQYGNQVLRGKLALVDLAGSERASETNNFGQKLRDGANINRSLLALANCINALGKQNKKGLAYVPYRNSKLTRILKDGLSGNSRTVMVATISPADDQYHHTTNTLKYADRAKEIKTHVHKNIGTLDTHVEDYQRMIDNLQVEVSQLKKELAEKEHQLSVKPTEKTADSELSWLNVLSQETGENVQERINLQKALFELEETNKRNRMELQHLDDSIARHQVKEMDSTILQALTSRRQVILDNIRDNDEAGSGYRKDIEMNESRRRQLQDMIEEAISNNGNKTYLHILSQYRLLGMTNAELQIEMAMRDQVIHNQREALRSLWNILYGTGLNQKQILKLAAKQGLTVEGCPLPSSSPDVTTPPSCQPHRFPSFMPFPGPQSEPYSPSACFFQHGFSTMSLLKNQHETPTICRQEHLSSYYMMSGCSPYSGDGKQWSSGRPTAFFSTPEKPKEAQSQHNKEHSGSHDFSLHRKGSSEYTY

SEQ ID NO: 1920 - protein, 323 aa, Zea mays
  VARIANT 195: note = Ancestral polymorphism is I, Derived polymorphism is F
  VARIANT 239: note = Ancestral polymorphism is S, Derived polymorphism is G
  VARIANT 259: note = Ancestral polymorphism is C, Derived polymorphism is W
  VARIANT 287: note = Ancestral polymorphism is S, Derived polymorphism is R
  VARIANT 291: note = Ancestral polymorphism is G, Derived polymorphism is R
MFHRLLRRAMPLPPPQSPLPAPRMPGVTGGRLFASLPSPPPLQSRREVHVWYLLPDELKDASQLKMYTELLSPSERKTALSMNGEKLQKGAVLSRALLRTTLSRYTDCKVDPRSFEFKKNKFGKPEVLWRSDDSRMEWPLHFNISHTSSLIVCGITMDTPIGIDVEEKTRKTAKNILSLARRYFTPSEIDYLAKIPDPDAQQKEFVKLWTLKEAYVKALGRGFSGAPFNKFSIILAANGRIQISVAPKVSNGSDSIHDCLSENWQFALAELNSSHYMAICIEDDSTSSDSGNGRLPLGLKVWKTTPFVEDILVSGTEAVKLVS

SEQ ID NO: 1921 - protein, 358 aa, Zea mays
  VARIANT 61: note = Ancestral polymorphism is P, Derived polymorphism is S
  VARIANT 51: note = Ancestral polymorphism is I, Derived polymorphism is V
  VARIANT 35: note = Ancestral polymorphism is P, Derived polymorphism is L
MQPDANAPSHRLARVAAHLNPQRPQMEEGASALRLVVCRAKGGAPGFKVAILGAAGGIGQPLSLLMKMNPLVSVLHLYDVVNTPGVTADVSHMDTSAVVRGFLGAQQLDAALTGMDLVIIPAGLPRKPGMTRDDLFNKNAGIVRTLCEGVARCCPNAIVNLISNPVNSTVPIAAEVFKKAGTYDPKRLLGVTTLDVARANTFVAEVLGVDPRDVSVPVVGGHAGITILPLLSQVTPPSSFTQDETRYLTDRIQNGGTEVVEAKAGSGSATLSMAFAASKFADACLRAMRGEAGIVECSYVASEVTELPFFATKVRLGRGGAEEILPLGPLNDFERAGLEAAKKELGESIQKGIAFMSK

SEQ ID NO: 1922 - protein, 189 aa, Zea mays
  VARIANT 75: note = Ancestral polymorphism is T, Derived polymorphism is I
MEDGVLDQRDRVHGTVSGAALELEKGCVATAEGTTPVSGGGVPLHNPPTPPLPSNHVGAKVYYLPYVTDVEYYTIGEIAQKITRLENEDTLLDSSGETRSRHIQPRWKQVLLAVMGPEQHQRPVDGIAARSRRRCPIGGGPKSTCNRWMGSPHRPSPLLPHLWSTSWPGMPPMATNQLTLSFHGEFHSR

SEQ ID NO: 1923 - protein, 297 aa, Zea mays
  VARIANT 262: note = Ancestral polymorphism is H, Derived polymorphism is D
MSAIHSPAAPPARPPFRRSTTGVASPLREPSQPQPTPPAPPSLTSRRAGLVALLVAAVAPERPAAAAAFSLGIRTTASSASPTSFLGSAVTGHLTCILPCSLFVLPRAAGPKELLREQKKKSASFLLAPIAASRDTLVKAHALLASPSASTEDAEEVKGRILAAGRDCVPRQRNSIVALQSRTGVEVCTFSLILKNAASLLANKDSLKVEADTRLEELIKSFSELGTLVENSNFELADDRRPILSLVDFVNKGVVYLISSSHHRSLNKLLEKIKDGLLSSVSALDKFEQSVKDCLGV

SEQ ID NO: 1924 - protein, 380 aa, Zea mays
  VARIANT 203: note = Ancestral polymorphism is N, Derived polymorphism is S
MSSSSNSKQEKKEEEEEGDVPPCMNGDVGRDDDNNGGGGGEEEEEEREGEFAAAMAQLAPEGVRALHARVEAEWGPVLQSACQTAAARALWGRAVRDPAAGLLAGERYLRGLRDKMRRDEQAGASEVHGVMIAVRTLWFDARVEAAVAALGGDPQVVILGAGMDARAYRLSCLKGCTVFELDFPELLELKSDLLREAAASSASRQKLTVAAKSLARVPANIRDGDWIAKLQSCGYVPGRNTVWVLEGIIYYLHHADAMQVLESIAASRSSASAVLLVDFMNKNATLLSPTMYHFYHDSPDLLLPSMGFSRVTLTQIGDPEAHFGLLSHPENLFDKLRKLPRSVEKNPDDGTPCCRLYFVEASASPDDQIMCPLNRYLEME

SEQ ID NO: 1925 - protein, 113 aa, Zea mays
  VARIANT 4: note = Ancestral polymorphism is C, Derived polymorphism is F
  VARIANT 20: note = Ancestral polymorphism is A, Derived polymorphism is T
MPLCFAFHLVIFFLFYDSKTPHPQMKHIFKIAAILVAISAIWIALLETSTVPRSYTWLLPIYLVVALGCYGLFMVGFGLMFFPTCPREAVLLQQDIVEAKEFLGKRGVDVGSE

SEQ ID NO: 1926 - protein, 987 aa, Zea mays
  VARIANT 501..987: note = Derived polymorphism lacks residues 501 to 987
  VARIANT 90..987: note = Derived polymorphism lacks residues 90 to 987
  VARIANT 56..987: note = Derived polymorphism lacks residues 56 to 987
  VARIANT 40: note = Ancestral polymorphism is S, Derived polymorphism is Y
  VARIANT 39..987: note = Derived polymorphism lacks residues 39 to 987
MSRTVSDAPHHESPPIHQLSKSGREGTERDGLTRRGLKYSTKDIERVEHIGGVGVRGALRPLVHHRVCVDHAHSHLPPPPIGSGAGGSEWIWEGRRAELRNVGRGPTTTSRVSIIGALSRVAATGEDSSSGLKVHVAAHESFPNESTRLEFGGPWTLSSKLVAFHGIDNHKGQRSSSRPCKMPPWPMAAGTAAARPATMATTAAAATATDHYARLLQLCRTAVNPSAGRAIHAHAVKAGLLVSTYLCNNLLAYYASVGVSRGCFREARCLFDDIPYARRNAFTWNSLLSLYAKSGRLPDAHVVFAEMPDRDAVSWTIMIVGLNRSGRFWDAVKTFLDMVSEGFAPSQFTLTNVLSSCAAMEACGVGRKVHPFVVKLGLSSCVPVANSVLYMYGKCGDAETARAVFERMQVRSVSSWNVMVSLYTHQGRMELAVSMFENMVERSIVSWNTIIAGYNQNGLDGMALKFFSRMLSASSMEPDAFTVTSVLSACANLRMLKMGKQMHSYILRTGMPCSSQIMNALISTYAKSGSVETARRIMDQAVVADLNVISFTALLEGYVKLGDTKQAREIFDIMNNRDVIAWTAMIVGYHQNGQNDEAMELFRSMILIGPEPNSHTLAAVLSACASLAYLDYGKQIHCKAIRSLQEQSVSVSNAIITVYARSGSVPLARRVFDQICWRKETITWTSMIVAMAQHGLGEQAVVLFEEMVRVGVKPDHITYVGVLSACAHAGFVDKGKRYYEQMQNEHGIVPQMSHYACMVDLHARAGLLTEAHEFIQRMPVAPDTVVWGSLLAACRVRKNADLAELAAGKLLSIDPHNSGAYSALANVYSACGRWNDAARIWKLRKDKGVKKETGFSWTHVRGKVHVFGADDVLHPQRDSIYRKAAEMWEEIKKAGFVPDLNSVLHDVDDELKEELLSRHSEKLAIAFGLISTPEKTTLRIMKNLRVCNDCHTAIKFISKFVDREIIVRDATRFHHFRDGYCSCKDYW

SEQ ID NO: 1927 - protein, 168 aa, Zea mays
  VARIANT 36: note = Ancestral polymorphism is R, Derived polymorphism is I
  VARIANT 37: note = Ancestral polymorphism is V, Derived polymorphism is L
  VARIANT 75: note = Ancestral polymorphism is G, Derived polymorphism is E
MTVGMINANPVVHERPERASHPHAADVLDPLDVFGRVLQSSPHTVRDIKDPEHPYSLEQLSVLSEESVSVDETLGRIQCVCCILSSYPRRHSFLCTCWGMSTGVTRITFTPTVQHCSMATVIGLCLRLKLMQNFPPHFKVDIKVAPGSLANEESGVYSDKFLRLISKK

SEQ ID NO: 1928 - protein, 303 aa, Zea mays
  VARIANT 17: note = Ancestral polymorphism is P, Derived polymorphism is L
  VARIANT 134..303: note = Derived polymorphism lacks residues 134 to 303
  VARIANT 194..303: note = Derived polymorphism lacks residues 194 to 303
MGDGVAFEAARKIIMHPLYTPRSSPWLDLKVFYVRVSNCVVDESTPDHLTLNHIPLSPDTVIEVNGQRSSLHTEFISSSLRRDRVDKKTEEATFVSTDNIRMTGSARFQVFDKNDLLLTGDLDLCNANGVVGESKNSSKKWNMKCQSSTSCNGFLKGKLSNGSEYVQPMIEVYVAGTSSGTPIILTKTIQLISRRKSEMKLKLDSIPENETTEQQKEESAEDTLKVSEFQDSKSETDVDVDYNSLYSRQDFLEGEDGELSWFNAGVRVGVGIGLGVCVGIGLGVGLLVRTYQSTSRNFRRRLP

SEQ ID NO: 1929 - protein, 401 aa, Zea mays
  VARIANT 125: note = Ancestral polymorphism is H, Derived polymorphism is N
MPDEKPRPRAGECGYATDSPSGAATELHTHPPLGHGSPRPYIEAPSRVIACLPPFFSRQLLTPEATTANKPMALVRQRRQLPHLTLPLDHFALRVPPQPQPTAAPSTSTSDARLSDYERLSVLGHGNGGTVYKARHRRSAQPVALKLFADGDTSAAREAEILMLAADAPHVVRLHAVIPSAAGEAPAALALELMPGGSLSGLLRRLDRPMGERPIAAVARQALLGLAAVHALRVVHRDLKPSNLLVGADGEVKIADFGAGKVLRRRLDPCASYVGTAAYMSPERFDPEAYSGDYDPYAADVWSLGVAILELYRGHFPLLPAGQRPDWAALMCAICFGEAPEPPAAASEEFRDFVARCLEKKAGRRASVAELLEHPFVAEREAAGAQEALAALVKEAEQLDL

SEQ ID NO: 1930 - protein, 147 aa, Zea mays
  VARIANT 12: note = Ancestral polymorphism is P, Derived polymorphism is L
MRVREWYGWHFPELTKIVIDNIQYAKVVKMMGNRVNAVNLDFSEILSDEELETQLKEAAVISMGTEVSDLDLSNIRELCDQVLALSEYRAQLYDYLRSRMNTIAPNLTALVGELVGARLIAHGGSLLNLAKQPGSTIQILGAEKVCL

SEQ ID NO: 1931 - protein, 209 aa, Zea mays
  VARIANT 89: note = Ancestral polymorphism is T, Derived polymorphism is I
  VARIANT 94: note = Ancestral polymorphism is T, Derived polymorphism is S
  VARIANT 122: note = Ancestral polymorphism is S, Derived polymorphism is P
  VARIANT 191..209: note = Derived polymorphism lacks residues 191 to 209
MPDRKSEHGVSRLHFLEKRDEETLPRRLIKLSQNNKVRSATELFDSMRASGLQPSAHACNSLLPCYVRRSPLADAMRIFEFMKAKGMATEHTYSMILKAVASNQGYVSALEMFNKIEEEEEPKKIIDVIVYNTMIYVCGRAKEWMLVERLWRRLEQHSLNGTLLTYDLLVSIFVQCGQSELAIAAYQEMLQKGLDPSEDIMKAIIASCT

SEQ ID NO: 1932 - protein, 464 aa, Zea mays
  VARIANT 334: note = Ancestral polymorphism is T, Derived polymorphism is I
  VARIANT 264: note = Ancestral polymorphism is V, Derived polymorphism is F
MPPAMLAPVPTRPRSNPFRRRRGAAPRLLDQTATAAAKRPAESSTSASSCFYSEVISNSTSLAAFQHPEKRRRRQDADADEARPAGSECSEVIGGARVRPAEVEASESSCLGSVLESDLACPEQLADNAEAIEYSSACDELTPSEPDEEEVLSGSSGCALYSLSPLISSPLTEDDNDDAPSATFSLFLDFAKQFVPCVHPKTCAVTSTALDLLTGRRFEDLDDEETYERFRRRERREAVARDYTEVYRSIPDSYGPLVVEQRVFMVDWIIEHSRLMKLQPVTMFMGIGLMDRFLTQGYMKGLENLQLLAIACITLATRIEENQPYNCLRLEVSISVLQKTFKFGTINTYSQSEVVAMEWLVQEVLNFKCFVTTPHHFLWFYLKAANADDSVADLANHLAFLSLENPKQLSFWPSTVAAAVVALACLATGKEPSCHLVMETHMRTQDDDLPECLMSLEWLIECVP

SEQ ID NO: 1933 - protein, 368 aa, Zea mays
  VARIANT 26: note = Ancestral polymorphism is A, Derived polymorphism is D
MVVKEFGREVVMSMDKVKRGGEALMAAGAGAGDEEKDDAVLPGFRFHPTDEELVTFYLRRKVARKPLSMEIIKEMDIYKHDPWDLPKASTAAGGEKEWYFFCLRGRKYRNSIRPNRVTGSGFWKATGIDRHIYPATANPVESVSVGLKKSLVYYRGSAGKGTKTDWMMHEFRLPPAAASPSPTPTSMQEAEVWTICRIFKRNIAYKRQPQLPAWRQQQQSSSNTGSFESDGGGGGDEYMNRCLPVPATATATAHQIGGMLNGGGVVSATGSSSSSFFRDRESVHGGQQFHFHEQWLSRFPAAPAVEQKPQLLDPSAMAIAFHQNDDQSVATAAAAAASECCKDGYYWDEIARFMEVNDPTVLHDCRYA

SEQ ID NO: 1934 - protein, 180 aa, Zea mays
  VARIANT 135..180: note = Derived polymorphism lacks residues 135 to 180
  VARIANT 125..180: note = Derived polymorphism lacks residues 125 to 180
  VARIANT 9: note = Ancestral polymorphism is A, Derived polymorphism is G
MAGGGAPSAWGPSPALVTALVALLGLGLAAYIVGPQLYWHAAEVLTAAAACPACDCNCDARPLLDLPEDCAKHFKGVKSRASGEETEKSFTELLVEELKQREEEATQAQQEADVKLLEAKKLASQYQKEADKCSSGMDTCEETRENSAEALVQQKKLTSLWERRARELGWRPENAKARLK

SEQ ID NO: 1935 - protein, 225 aa, Zea mays
  VARIANT 168: note = Ancestral polymorphism is R, Derived polymorphism is S
MAALAAASTAAFAAKPRARLSVACSAATGDSSSVSLASSVKTFSAALALSSVLLSSAATSPPPAAADIAGLTPCKESKAFAKREKNSIKKLTASLKKYAPDSAPALAINATIEKTKRRFENYGKFGLLCGADGLPHLIVSGDQRHWGEFVTPGLLFLYIAGWIGWVGRSYLIAISGEKKPAMREIIIDVELATRLLPRGFIWPVAAYRELINGDLVVDDKDIGYY

SEQ ID NO: 1936 - protein, 385 aa, Zea mays
  VARIANT 62: note = Ancestral polymorphism is P, Derived polymorphism is S
  VARIANT 52..385: note = Derived polymorphism lacks residues 52 to 385
  VARIANT 28: note = Ancestral polymorphism is P, Derived polymorphism is T
MGGGNGETTQLGEPLLAKKAKAYRPRCPGCREDRLNAEREGVFPLKDVFLIWLVTITCNKVPPATASTQTHKPNPSLPFPSYYLLRPHRFLLLWSTYCFDMVAGFLEEQLYRWLRAAELTCDRAALLVVQDPKIKSFLSAYTLFHLGFMVGYMRVAFAYNVCGQRTTRAINPHAYTNETVFVQIWSSACWAARASTTPSARCSTKCRSRLDVHAYTIVLHALSRAGRYERTLELFAELRRQGVAPTLVTYNVVLDVYGRMGRSWPRIVALLDEMRAAGVETDDFTTSTVIAACCRDGLVDEAVASTIELYIEYQKERVHMVDDARLAFELSTVLSKEGIEVCMVPSADRPDDAKFAVPLLESDFDFAIAKLTIRLSSLNDFISCY

SEQ ID NO: 1937 - protein, 274 aa, Zea mays
  VARIANT 243: note = Ancestral polymorphism is P, Derived polymorphism is T
  VARIANT 242..274: note = Derived polymorphism lacks residues 242 to 274
  VARIANT 238: note = Ancestral polymorphism is I, Derived polymorphism is T
  VARIANT 235: note = Ancestral polymorphism is C, Derived polymorphism is F
  VARIANT 218: note = Ancestral polymorphism is S, Derived polymorphism is C
  VARIANT 183: note = Ancestral polymorphism is G, Derived polymorphism is R
  VARIANT 179: note = Ancestral polymorphism is K, Derived polymorphism is N
  VARIANT 162: note = Ancestral polymorphism is G, Derived polymorphism is R
  VARIANT 151: note = Ancestral polymorphism is Q, Derived polymorphism is K
  VARIANT 140: note = Ancestral polymorphism is R, Derived polymorphism is I
  VARIANT 137: note = Ancestral polymorphism is R, Derived polymorphism is I
  VARIANT 132..274: note = Derived polymorphism lacks residues 132 to 274
  VARIANT 115: note = Ancestral polymorphism is P, Derived polymorphism is S
  VARIANT 111: note = Ancestral polymorphism is S, Derived polymorphism is F
  VARIANT 109: note = Ancestral polymorphism is R, Derived polymorphism is H
  VARIANT 103: note = Ancestral polymorphism is T, Derived polymorphism is A
  VARIANT 95: note = Ancestral polymorphism is P, Derived polymorphism is L
  VARIANT 88: note = Ancestral polymorphism is G, Derived polymorphism is R
MDLQERNEWLFYKLLIDNVEELLPIMYTPTVGEAYQKYGSIFSKPQGLYISLKEKGKILEVLKNRPERSIQVIVVTDGERILGLGDPRCQGMGIPVGKLSIYTALGEVRPSACLPITLDVGTNNEELINDKLYIGLRQRRATGQEFTNFLQEFMTAVKHNAGYKHKEQQTQGVIDQIIKEHLGQVAAFQAGAQFNQHLLLAFLGAVGCGPPSLSNSASSWHVFQCCLHIHLYQHCLHIEIYWPNQSSKYLQKHKVSSSRILDNLRRLHLVVIML

SEQ ID NO: 1938 - protein, 80 aa, Zea mays
  VARIANT 14: note = Ancestral polymorphism is L, Derived polymorphism is F
  VARIANT 18: note = Ancestral polymorphism is M, Derived polymorphism is I
MTIAKLFLLAKGLLARVMQGLIQSVFELHDSSCIVVTVGKYVTPNHKDINGNGIEPDYNHLLDFNEARDYLSRCEIKELS

SEQ ID NO: 1939 - protein, 221 aa, Zea mays
  VARIANT 95: note = Ancestral polymorphism is G, Derived polymorphism is D
  VARIANT 88: note = Ancestral polymorphism is R, Derived polymorphism is C
  VARIANT 33: note = Ancestral polymorphism is R, Derived polymorphism is C
MACLAPELWSTTTSTRFRAAAAASSVLQNPSPRGVPAPCPSCVGEGVAGFVGAHCSLALRKHGDGIVGIVGIDSFNSYYDPSLKKARRALLGSHGVFVMEGDINDGRLLAKLFDVVPFTHVLHLAAQAGLRYAMENPAVYVHSNIVGLVSLLEAARTPTRSRPSSGPPPPSTASTTASPSLGSRGGGIAGGRRRGHGAGDPGPPHPPPSLIRHQRRSRRWK

SEQ ID NO: 1940 - protein, 158 aa, Zea mays
  VARIANT 147: note = Ancestral polymorphism is V, Derived polymorphism is I
  VARIANT 138: note = Ancestral polymorphism is R, Derived polymorphism is I
  VARIANT 124: note = Ancestral polymorphism is P, Derived polymorphism is L
  VARIANT 121: note = Ancestral polymorphism is A, Derived polymorphism is V
  VARIANT 83: note = Ancestral polymorphism is G, Derived polymorphism is R
  VARIANT 57..158: note = Derived polymorphism lacks residues 57 to 158
  VARIANT 45: note = Ancestral polymorphism is C, Derived polymorphism is R
  VARIANT 42: note = Ancestral polymorphism is A, Derived polymorphism is T
  VARIANT 38: note = Ancestral polymorphism is L, Derived polymorphism is F
MEILLRDGGIQLLLGPSGMGEGELKKYIMDWRSRQQFLLEAAHRCQEVGLYDKHSREDLISEQQTVLRHLEAILHIYRLARAGQTVDALRETIRLPFLHLDPKAPNVTVDIFRNLSPHVQACVPDLLMVALNCIDNVRDTDGTLRAVKTKVVQLMSFS

SEQ ID NO: 1941 - protein, 328 aa, Zea mays
  VARIANT 106: note = Ancestral polymorphism is A, Derived polymorphism is T
  VARIANT 107: note = Ancestral polymorphism is T, Derived polymorphism is A
  VARIANT 117: note = Ancestral polymorphism is L, Derived polymorphism is F
  VARIANT 122: note = Ancestral polymorphism is I, Derived polymorphism is V
MLGIWPVQYKVPFFFCQLKQNLHTTRVLLERKKGNASTDRVRGGIHKNSIFEQHILVILIDSTSENLNDALIPDDLRRIIGYLLRQAGLPAPVPTSTILRRATTAATAGPVLPRPLLGVERVLLGLAQLNNGLGLPPPLLELGLLRQLLVGPNLLQQLVVLPEPGQALLVVVPVREEGPPPRPLPLAEPPPREDRHVPAPRPPTAAPVGTQSEQPAPARADASAEGPALGGEAQRNAVGDGRGTPHEGHETRRTIYAPSQASLLSPSGRRRPVERPAAGRDPVVGARPGGDEGSPVARDASWFWFWAGEEEEAEKRENSGRQLQPSAC

SEQ ID NO: 1942 - protein, 118 aa, Zea mays
  VARIANT 51: note = Ancestral polymorphism is Q, Derived polymorphism is R
  VARIANT 44: note = Ancestral polymorphism is C, Derived polymorphism is Y
MVSRLLLGRIGIQSASRLFGGHRGFSGGEALRRYIPPAGDRSVCGNAYVPRTKTDDIGRTEHEPQHLVRFLDPQVARQHQEFVQSLDRMLDAIRNPQSLAQMERRRLASGVKVLDDDL

SEQ ID NO: 1943 - protein, 994 aa, Zea mays
  VARIANT 50..994: note = Derived polymorphism lacks residues 50 to 994
  VARIANT 33..994: note = Derived polymorphism lacks residues 33 to 994
MGWGCSYCKTKQTLVLQIVRFAMVRKPLVRIRESKIEHLFQIQENRRASRSNSRRSAVTETANIPVSLLLLGSWQEPEPGSIASHRRALVAARTCTDDRVSAGRWPFYRSSPSAGAKQASLRGSIYGPPRFMTFMRCSAAVSDGIALRFPAEGRALRGGVCARGRGLLALGSHRSSSRRARRRHVAVFARRRLGKWQRPWWRTFFADWNDDEESLAGFREDDELLEEIGADQELSEKAKFEEWRRKAEAIVELREAQQDAFNAEERSWEDWTGGGGGGGAPENGGGGDWGGEASLSEQITDDPAEIVWDKGVVEVFRGTIDEDYEDMLFEDRVFMYASTNSAKFLALLIVVPWVIDFLVHDYAMMPFLERYVQKVPLAAELLDVRRSQKLQMVKDLNIEKARYRLEVEIGKSPPLSDEEVWFELREKALELRDDWRLENRQAFANVWSDMVYGVVLFLLICFNQSKVAMLKFTGYKLLNNISDTGKAFLIILVSDILLGYHSESGWHTMVEVILEHYGLESDEAAVTFFVCLVPVALDVYIKFWCLNSWETGYNLQLAWAYGPRFMTFMSCSAAISDGIPLRFPIEGSRTLCGGLGGVCARGVLALGSHRSNRSRRARHRHATVFARRRRRRRPSKWQRPWWKTFFSDWNEDDESLDGWREEDELLQEIGSDKGLSEDEKFKTWTRKAEAIVDLREAQQDAVNAEERSWENWIGGGGGTSGTGGGGEASLLDQITDDPAEIVRDKSVFEVFRGSIDEDYEDMLFEDRVFMYASTNSAKFLALLIVVPWVIDFIVHDYVMMPFLERYVQKVPLAAELLDVRRTQKLQMVKALKIEKARYRLEVEIGKSPPLSDEEVWIELRDDWRLENRNAFANIWSDTVYGIVLFLLMCFNQSKVAMLKFTGYKLLNNISDSGKAFLIILVSDILLGYHSESGWHTLVEVILEHYGFEADEAAVTFFVCLVPVALDVYIKFWVYKYLPRLSPSVGNVLDEIKRH

SEQ ID NO: 1944 - protein, 118 aa, Zea mays
  VARIANT 44: note = Ancestral polymorphism is C, Derived polymorphism is Y
  VARIANT 9: note = Ancestral polymorphism is R, Derived polymorphism is K
MVSRLLLGRIGIQSACRLSGGHRGFSGGEALRRSIPPAGDRSVCGNAYVPRTKTDDIGRTEHEPQHLVRFLDPQVARQRQEFVQSLDRMLHAIRNPQSLAQMERRRLGSGVKVLDDDL

SEQ ID NO: 1945 - protein, 232 aa, Zea mays
  VARIANT 35: note = Ancestral polymorphism is A, Derived polymorphism is T
  VARIANT 110: note = Ancestral polymorphism is A, Derived polymorphism is V
MQIQRLLSSPYLSNTIAALVSAEDHAETTHFRLPASAYEALNEIVRVSNIPETSGIIAQLLEDIMRTLNLTFDLHILSSVTSFVVILAQLTIRRSGGSQSALENHKYEIADWDLGAGIYIDFYVLKNSMQERNAMDDSGSLEEMSESCRSFFGRLNESLLVWGSKLPVESRACYSKMAEELCALLVDTPSETLNLLMGCLLTMLNAPVPDESRSSYLQDTLSVFTEILCSDP

SEQ ID NO: 1946 - protein, 157 aa, Zea mays
  VARIANT 65: note = Ancestral polymorphism is A, Derived polymorphism is D
  VARIANT 70: note = Ancestral polymorphism is Y, Derived polymorphism is N
  VARIANT 72: note = Ancestral polymorphism is T, Derived polymorphism is I
  VARIANT 76: note = Ancestral polymorphism is S, Derived polymorphism is Y
  VARIANT 82: note = Ancestral polymorphism is A, Derived polymorphism is T
  VARIANT 91: note = Ancestral polymorphism is R, Derived polymorphism is T
MEEQFILRVPPSVAEWIERLMNESVASSSNPDEASLDLSFLEDGRNGTFMIGNESFPSSLLDLPAVVESYKTYDDYVLIKTADVGQMIMVREENDPAPEGVEYKHGLTPPMRDARRRRFRREPDLNAELVNQVEKHLISIMHGVYVSILLFSSLATC

SEQ ID NO: 1947 - protein, 257 aa, Zea mays
  VARIANT 126: note = Ancestral polymorphism is A, Derived polymorphism is V
  VARIANT 123: note = Ancestral polymorphism is A, Derived polymorphism is S
  VARIANT 70..257: note = Derived polymorphism lacks residues 70 to 257
MAPLPAPVHARPWWSELANASCSSTHTSCSPRHGMDDRCICSCAQVVTGSEFRLEYQEFKTQATTLASLQHPNLCKLIGYYAKEDSNERMLVYERLYHGSLDKLLFGRSDGRFMDWSKRLKVALGAARGLAFLHDEGPFQAIYNEFSTLNIQIDKGFTAKLSGYGCVGFNTEEISNAHVVCSSNHSVETLEKGLLTQFVYCCNKSGLDRSKVNVNGGAIALGHPLGATGARCVATLLNEMKCRGRDCRFGVVTICIG

SEQ ID NO: 1948 - protein, 303 aa, Zea mays
  VARIANT 253: note = Ancestral polymorphism is C, Derived polymorphism is S
MDSRGFDSAGRIFSSATEMWTEELGSSITASTAGEAEAAPAPAAAAEASEEVGGDGKRKEWYSKAIAYWQGVEASTEGVLGGYGCVNDADVKGSDAFLRPLLADRFGTAKRHLVALDCGSGIGRVTKNFLLTHFNEVDLVEPVSHFLEAARENLTGCMDQGEDSHKAANFYCVPLQDFTPEEGRYDVIWIQWCIGQLPDDDFISFFNRAKAGLKPDGFFVLKENIARNGFVLDKVDNSVTRSDAYFRDLFKRSGLYILSVKDQKELPKELFAVKMYALVTSQPKIQNSGKRRRPRNSPRMIRS

SEQ ID NO: 1949 - protein, 431 aa, Zea mays
  VARIANT 23..431: note = Derived polymorphism lacks residues 23 to 431
MTTVSRALGSAFAGFTRAPAVAQTATTLPSPYGSSALHQHWRWSRACRTRRFSSGRAARISMSLRAGIVGLPNVGKSTLFNAIVENGKAQAANFPFCTISPNVGVVAIPDPRLQVLSKLSKSQQTVPTSIELVDIAGLVKGASKGEGLGNQFLSNIREVDSILQVVRCFEDDDIVHVNGKVDPRSDIDVINLELIFSDLEQIEKRLDKLNKSKTKDTQVKVKEQAEKSGLEKIQQALMEGKPARSVDLAEHEKEAIKHLYLLTMKPVIYVANVTESDLAEPDSNSHVKEVAKAASDLQSGMVTISAQVEAELAELPLEERVEYLKSLGVAESGLGNLVKATYNLLGLRTYFTTGDKETKAWTILSGMTAPQAAGVIHSDFQKGFIRAETVSYDDFVAAGSLGVAREKGLLRLEGKDYVVQEGDVMLFRFNV

SEQ ID NO: 1950 - protein, 501 aa, Zea mays
  VARIANT 464..501: note = Derived polymorphism lacks residues 464 to 501
  VARIANT 95..501: note = Derived polymorphism lacks residues 95 to 501
  VARIANT 52: note = Ancestral polymorphism is R, Derived polymorphism is C
  VARIANT 34: note = Ancestral polymorphism is P, Derived polymorphism is L
  VARIANT 25..501: note = Derived polymorphism lacks residues 25 to 501
MASSSTDLADDGFAAPRLFSQGVSYTYDDVIFLPGYIGFPADAVDLSTRLSRRIPLSIPCVASPMDTVSEAAMAAAMASLGAAAVVHCNTDPHAQAAIVRAAKSRRLPFVSSVPFFSPSSAPTLNDFAGTEYALVTERGDSLSRLVGVAVAADAASREVPVSVSEYMRPTPRSASAAFDFEEAATFLADEGLDYAPLVSDDGEVVDLITAKDVERIRSYPKLGKPSLGANGKFVVAASIGTREDDKGRLEQLVKAGANAIVIDSSQGNSIYQLDMIKFAKKMYPEVDLIGGNVVTIAQAQNLIQAGVDGLRVGMGSGSICTTQEVCAVGRGQATAVYKVSSYAKDHNVPVIADGGISNSGHIVKALSLGASTVMMGSFLAGSHEAPGTYEYKDGRRVKKYRGMGSLEAMTKGSDARYLGDTLKLKVAQGVVGAVADKGSVLRFIPYTMQAVKQGLQDLGADSLQSAHDLLRSETLRLEVRTGAAQAEGGIHGLVSYEKKAF

SEQ ID NO: 1951 - protein, 325 aa, Zea mays
  VARIANT 178..325: note = Derived polymorphism lacks residues 178 to 325
  VARIANT 183..325: note = Derived polymorphism lacks residues 183 to 325
  VARIANT 261..325: note = Derived polymorphism lacks residues 261 to 325
  VARIANT 276: note = Ancestral polymorphism is R, Derived polymorphism is M
MAINFFQPLANVLRRMDSDVPAMGFFHGCMLEAKTEIVTRFDNNESKYRAAWDIIDKRWDNKSKTPLHLAGYYLNPYFYYPNKSSIELDGSFRAAVISCITKMFDDEDTQDSIIEELNIYQDQQGAFGHDIAVRQRRNKTFNPAKRWMNHGTTTPHLRILATRILNLTCSSSGCERAWSVFEQIHTKKRNKLLHDRMRDLVFVKFNSKLREKRDNKSKDPIEKELNDILEDGENEFITGVVPDENVDPDEDHEGAHDEPSQEPSISKAQLPAKRKRHGHPRKKKLRSLKSLLSGDLERATCVSSSESEDNESMQIEASNSDSRDE

SEQ ID NO: 1952 - protein, 706 aa, Zea mays
  VARIANT 492..706: note = Derived polymorphism lacks residues 492 to 706
  VARIANT 476: note = Ancestral polymorphism is P, Derived polymorphism is T
  VARIANT 310..706: note = Derived polymorphism lacks residues 310 to 706
MMYRKGRDSNGDKSQEGGGDVPPSIKLDTTDHPASDGKAASFSESWTPTLGSGSCCGSSSSSSGSGRSDPPEKQLTLLALRVAILEKAASGLGKLDFVWATVVLLGGFVSTLNITDFWCITVILVSEGARVFSRSHELEWQHHATETSTAGGGLLRSSSRFFRRILHAFVDHTGGGGRNEEEPHQHATPTTDAGGVLPPLRSCCWFFRRAVHALAHPGAGSGRCRCRRRRDHDAGNVPEPDRGRRALGVRLRRALADAPLEARIRQRRQHVACAPALLHPGVAGGAALPSGTGLLDMEVLLLQAAPSCERGLPAGRVQPRLPHALFYDAYSRCVTGSIFDDIKMDLVTFAEDLILSHFLDEQLIGVRILEQFAMKVNSAGDTLRKVGTSPWSVERLVEMLNWKRPDEVEVRQLAAEVVCKLAGDGECQNALRLSAISGAIESVMSLLYTGRSAAVSGMHPQPNHAAGEGRDYDYLTLNLLGLSILEKLAKDQDNCGKISNARGLLAKIIDFTQTSKDLLGSQHVSDSAVSAVKCALQVVRMLVSTTGNTGHALRRGVAENVFAVYNMCGILRYGQRHKELQMLTIDVLTALALDDSGKEAIMGTGGLVKLLLSIFISAEERELGHGADEALAMLALESETGCAAILKRADVLQLVSALLDGDDARRLHAARVLWSLCACSGPEYRERLRVVTKLLPVVLGITQCLK

SEQ ID NO: 1953 - protein, 458 aa, Zea mays
  VARIANT 408: note = Ancestral polymorphism is A, Derived polymorphism is D
  VARIANT 403..458: note = Derived polymorphism lacks residues 403 to 458
  VARIANT 353: note = Ancestral polymorphism is D, Derived polymorphism is Y
  VARIANT 303: note = Ancestral polymorphism is L, Derived polymorphism is V
MQVLSALACVVLSVMRLWKQDFGGRDSRNMRPALLLFYTLALVEASLFLFEKAYWTWKVSVCKLLHQVSAECELGPYGLVSLKRFFYDAYSRCIAGSIFDGIKMDLVTFAEDLILSDFLDEQIIGVRILQQFANSERSASDTLRKVGTTPRSIDRLVEMLNWKRTEEDEVRLCAAEIVSKLASKRQNALRVSGIPGAIESVTSLLYTATSPPVSGTHPQLPCAPAEHGASPPAASRGYDHLQFNLLGLLILKRLARDHDNCGGKIGNARGLLAKVINFTQASRALLQNPHVTDSQVRAMKRALKVVKMLVSTTGSTGKALRESVAENVFTVSNLRGILRYGQQHRELQKLAADVLTGLAMHDSGKEAIVATGGVVKLLLSIFFNAQDTELVARPAKRWRCWLWRARPDARRYSGRPTCWTSSCRRCRTATHGGASTRRGSCGTCARTRGDSRGSGCAW

SEQ ID NO: 1954 - protein, 132 aa, Zea mays
  VARIANT 21..132: note = Derived polymorphism lacks residues 21 to 132
  VARIANT 54: note = Ancestral polymorphism is P, Derived polymorphism is L
  VARIANT 56: note = Ancestral polymorphism is N, Derived polymorphism is I
  VARIANT 61: note = Ancestral polymorphism is A, Derived polymorphism is V
  VARIANT 116: note = Ancestral polymorphism is A, Derived polymorphism is V
MGVALKIRETFVELQMKKAFRYVIFKIEEKQKQVVVEKTGATTKNYDDFLASLLENDCRYALYDFDFVTRENVQKSKIFFIAWSPSTSRIRAKMLYSTSKDRIKYELDGFHYEIQATDPSEVDIEVLRERAH

SEQ ID NO: 1955 - protein, 211 aa, Zea mays
  VARIANT 166: note = Ancestral polymorphism is R, Derived polymorphism is S
  VARIANT 163: note = Ancestral polymorphism is T, Derived polymorphism is I
  VARIANT 89: note = Ancestral polymorphism is S, Derived polymorphism is L
  VARIANT 43: note = Ancestral polymorphism is R, Derived polymorphism is C
  VARIANT 39: note = Ancestral polymorphism is D, Derived polymorphism is N
  VARIANT 28: note = Ancestral polymorphism is R, Derived polymorphism is W
  VARIANT 20: note = Ancestral polymorphism is Q, Derived polymorphism is E
MADSGALVVTEARQQHPLSQIAASETHRLLLKQWVKEEDLLARRVVLWEACLNGARKEIAFLYCAFFAFHSASVLLLFLSSSSSSSAGLAAATTACRRSWILCLVSLLSSLAMIWALWYKSDTEAILERVLAREREDALHLARCVSELKRKGLRFDLLKEVDTVRRAKNLRAEAKGAADRPRRWQTRDLAVFAFFAVACGVLMLTRFLLCN

SEQ ID NO: 1956 - protein, 639 aa, Zea mays
  VARIANT 5: note = Ancestral polymorphism is A, Derived polymorphism is D
  VARIANT 20..639: note = Derived polymorphism lacks residues 20 to 639
  VARIANT 36..639: note = Derived polymorphism lacks residues 36 to 639
  VARIANT 222..639: note = Derived polymorphism lacks residues 222 to 639
  VARIANT 360..639: note = Derived polymorphism lacks residues 360 to 639
MDSFARRIDPKANQAEARRQQNINEALWKERTHQVQQYVARWVYTHGIPFHACDNDEFKEMVEAIGRFGPGFQPPSQHHYREKLLEEEHARTKSLLQDREDEKNKYGCSVMTDAWTDMKRRSIMNICTHTTAGTSFIKSKEMSNVSHTSEVIFELVDKAIQDLGPDSVVQVVTDNASNNMGAKALLHDKRPNIFWSSCATHTINLMLQGIGNLPRFKKRIDQAKSFTIFVYGHHRTLACMRSFTLKRDIIRPGVTRFATAYLTLQSMMEKKDDLRKMVVDSKWYDLPDVKSKKGKEATAMVLSIPFWKGVSLCLKVFEPLVKLLRLVDGDVKPSMGFLYGELINAKKAIKEAFGNVEIKYKEVMSIVEKKMKDRLDSPLHVAAYMLNPYYSYTNSSIFCDSTIMEKFMLCVETFYHGEDEKAYRAVNDDLDRFQTKQGSFSKNMARSCQRFDFNPASWWRLYGGGAPDLQAIAIRILSLTTSSSGCERTWSVFEQTHTKRRNRLTTERLNNLVFIQFNNRMLSKKERISRNKNYEVLLSSDCSEAQGFFFEGGDEQALVQIRDEDEGEMQGTGIPWSVLGDAMGVEDELQPRRSARVAREVDEEDWESEKEDEDNVHEDIDYEEDNCEISNTSDYVHVE

SEQ ID NO: 1957 - protein, 74 aa, Zea mays
  VARIANT 29: note = Ancestral polymorphism is R, Derived polymorphism is W
MGFVLVVSLPFIFLSILLGFGFYFLGKHWGREESGPASARRSTACRCRRPASSEPPCRRLSHSTARNKGPRLCD

SEQ ID NO: 1958 - protein, 210 aa, Zea mays
  VARIANT 199: note = Ancestral polymorphism is G, Derived polymorphism is R
  VARIANT 166: note = Ancestral polymorphism is A, Derived polymorphism is P
  VARIANT 165: note = Ancestral polymorphism is R, Derived polymorphism is K
  VARIANT 55: note = Ancestral polymorphism is A, Derived polymorphism is T
  VARIANT 53: note = Ancestral polymorphism is D, Derived polymorphism is N
  VARIANT 48: note = Ancestral polymorphism is R, Derived polymorphism is W
  VARIANT 43: note = Ancestral polymorphism is R, Derived polymorphism is C
  VARIANT 17: note = Ancestral polymorphism is P, Derived polymorphism is L
MADSGALVVTEAQQQHPLSQIAASETHRLLLKQWVKEEDLLARRVALWEACLNGARKEIAFLYCAFFAFHAASVLLLFLSSSSSSAASAAATTACRRSWIPYLVSLLSSLTMLWALWYKSDTEAVLERVLAREREDALYLARCVSELKRKGLRFDLLKEVDTLRRAKNLRAEAKGAADRPRRWQTRDLAVFALFAAACGVLVLTRFLLCN

SEQ ID NO: 1959 - protein, 512 aa, Zea mays
  VARIANT 7: note = Ancestral polymorphism is L, Derived polymorphism is P
  VARIANT 346: note = Ancestral polymorphism is A, Derived polymorphism is S
MAAFWLPLLFFASTVVVLRTWRARSIVNKAGPTYPPGLEPYPLIGHLPQFLANRHRVLDWMTEVLECQTTCTFVLRRLGGVRGAITASPANVEHVLRTNFDNYPKGPVFASLLHDFLGRGIFNADGEAWRAQRKVASHEFSTRSLRAFVARCVHAELHGRLLPLLRRAAASGSPLDLQDALERFAFDNICRVAFDRDPRQLADDGDDTADRTFADAFRDAANLSVGRFRYAVPGFWKIKKALNVGSEKRLRESIATVHDFADRIVQSRREEMLRAGFDKHDLLSRFMASQDESYSESKVPLRDVVISFLLAGRDTTSSALTWFFWLLSSRPDVQRRIRDEVAAVRARRAQGDVVGFDLDELREMHYVHAAITESMRLYAPVPVNSLRAEADDFLPDGTAVQAGWFVTYNSYGMGRMESVWGDDAREYRPERWLSPIDGTFRPDSPYRFLAFHAGPRLCLGKEMAYIQMKSIVACVLEELDVAVDGAYRPRQVASLTLRMADGLPVTVKPRRG

SEQ ID NO: 1960 - protein, 83 aa, Zea mays
  VARIANT 29: note = Ancestral polymorphism is R, Derived polymorphism is M
  VARIANT 43..83: note = Derived polymorphism lacks residues 43 to 83
MGFVLVVSLPFIFLSILLGFGCYFLGKHMGREEMRTEINGGDRVEQQWDYGTNFGKEKEEDNREQSRPADGSTFLTQQFRRLL

SEQ ID NO: 1961 - protein, 707 aa, Zea mays
  VARIANT 394: note = Ancestral polymorphism is G, Derived polymorphism is C
MAAALAPGVSRKLKKVLETRTDNPDLLASLGALSTFYVQNTPQARRNLKSSIEQRALAINRHFLDASLPAHKALDRVEGEVHALNDSWKKIEEALNSCSASTGDIISTTERLQQELEVITQRQEIVSCFLRDYQLSNEEINALREEEIDDKFFKALLHVQEIHSNCKVLLRTHHQLVSLSNDIKCLYKMFFFLYSQRAGLELMDMMSVYQEGAYERLCRWVQAECKKLGDTDNPEVSELLKMAVCCLKERPVLFKYCAEEVANMRHHALFRRFISALTRGGPGGFPRPIEVHAHDPLRYVGEMLGWLHQALASERELIVVLLDPDAMTDSGPTFRRQSGRDGDSSKGEPDVTSVLDRIFEGACRPFKVRVEQVLQSQPSLIVSFKLSNTLEFYCYTISELLGEDTALCNTIWSLRDAAQQTFFNILKSRGEKLLRYPPLVAVDLSPPPAVREGISLLLELIDTYNSMMVPASGKRPNFDPVISALLDPIIQVCEQAAEAQKSKGSLARRGRTSSDPSGNSRDSISVDAILSKNLSTSILSAESSSKVYLINCLSAIQEPLMGQEVATSYVNNLRSMIEAHICVLVDKEVDCILRKCGLSNKMPYIKEYGSKADARPLADIIETSPQMLMECLKAFYGIVTGTEGSLPEFEQLQVPRLRSDACNGLARALAESYELIYSAVMDPNNSYPDPRSLVKHSPEQIRTILEA

SEQ ID NO: 1962 - protein, 176 aa, Zea mays
  VARIANT 18..176: note = Derived polymorphism lacks residues 18 to 176
  VARIANT 31: note = Ancestral polymorphism is N, Derived polymorphism is I
  VARIANT 37..176: note = Derived polymorphism lacks residues 37 to 176
  VARIANT 60: note = Ancestral polymorphism is S, Derived polymorphism is C
  VARIANT 62: note = Ancestral polymorphism is S, Derived polymorphism is N
  VARIANT 67: note = Ancestral polymorphism is T, Derived polymorphism is I
  VARIANT 82: note = Ancestral polymorphism is I, Derived polymorphism is N
  VARIANT 83: note = Ancestral polymorphism is L, Derived polymorphism is F
  VARIANT 88: note = Ancestral polymorphism is E, Derived polymorphism is G
  VARIANT 95: note = Ancestral polymorphism is P, Derived polymorphism is S
  VARIANT 107: note = Ancestral polymorphism is G, Derived polymorphism is S
  VARIANT 118: note = Ancestral polymorphism is L, Derived polymorphism is I
  VARIANT 119..176: note = Derived polymorphism lacks residues 119 to 176
  VARIANT 126: note = Ancestral polymorphism is G, Derived polymorphism is S
  VARIANT 139: note = Ancestral polymorphism is K, Derived polymorphism is N
  VARIANT 163: note = Ancestral polymorphism is P, Derived polymorphism is S
MELIPIKPEVGSLVEELRTRAIDGELMPPGNGWSHPQDLRVQQQRTVLFTSQEKVGRGPCSSARISTATIATHTGVSKGLKILQLEREYLIEILSSLSFFIKSIVGGLKRNFFETFKLQRLTLCIGGIVNIELLERIQKQFTDDRYYIWQMRQLAMAYMLLRPVQFMDEDEADLQM

SEQ ID NO: 1963 - protein, 314 aa, Zea mays
  VARIANT 210: note = Ancestral polymorphism is V, Derived polymorphism is A
  VARIANT 186: note = Ancestral polymorphism is R, Derived polymorphism is H
  VARIANT 42: note = Ancestral polymorphism is L, Derived polymorphism is P
  VARIANT 28: note = Ancestral polymorphism is P, Derived polymorphism is L
MSRYDVESILSSDLPVVGGATGRAAKFPLDSLQPGSAAAMMLAGAAAASQATMPPSEKDYWSLPALHYQQQQERQFPASAYEAYGSGGVNVDFTMGTSSGSYLKSGGRPRKKLSLRDGVGKLFASGSDPIITHACVTPTQDPGLCCERAYPFTMINFVLLISRQGKVRLTKWYSPYTQKERTKVIRELSGLILTRGPKLCNFVEWRGYKVVYRRYASLYFCMCIDAEDNELEVLEIIHHFVEILDRYFGSVCELDLIFNFHKAYYILDEILIAGELQESSKKNVARLIAAQDSLVEAAKEEASSISNIIAQATK

SEQ ID NO: 1964 - protein, 377 aa, Zea mays
  VARIANT 77: note = Ancestral polymorphism is R, Derived polymorphism is W
MSSAAAAANVAVIGGGISGSVCASLLAARGVAVTLFDSGRGAGGRMAQRREVMEDGSELRFDHGAPYFTVTNGEVARVVGGWEARGIVAEWKATFACFDLATGKFTDFEKEGTAKKYVGVPAMNSICKSLCLEDGVVAKFGVTVGKMDWLQDRSSWSLASLDGKDLGYFDYVVATDKNIASPAFSGLTGRPPPLDLSSFPRLPTALQDIPVRPCFALMVAFSEPLATVPVHGFSFNNSNSLSWAFCNSSKPGRACVPPNRQSWVLHSTTEYASKVINNIGPRKPSAEALAKVAEELFREFQATGLSIPRPIFLKAHRWGAAFPAIAISGDDKCVWDKSTNLAICGDFCTSPSVEGAVLSATRGVSEILECLRCPSSI

SEQ ID NO: 1965 - protein, 241 aa, Zea mays
  VARIANT 115: note = Ancestral polymorphism is T, Derived polymorphism is N
  VARIANT 109: note = Ancestral polymorphism is R, Derived polymorphism is C
  VARIANT 66: note = Ancestral polymorphism is A, Derived polymorphism is V
  VARIANT 29: note = Ancestral polymorphism is P, Derived polymorphism is T
MSDAQATGDGPRCVGCGGRVKTLFVQYSPGNIRLMKCDKCKAVADPYIECEFMIILIDLVLHKTRAYRHVLFNKLSMGSSVDKGILYRSTLIHIALDTCCWRCIIGKHRIYIHVTPGSAIFSQIIFRYYKVRQVFLLFIIFIYDLVCFSVKFICNNSFLLVRYRDILFAVIISSYFKLFLFTMMVWEFPSSVIFIVEMFVLSSNVVALRVVSQFPRAHCFAVCLLAHAAKYLTQRWILGTP

SEQ ID NO: 1966 - protein, 770 aa, Zea mays
  VARIANT 487..770: note = Derived polymorphism lacks residues 487 to 770
  VARIANT 454..770: note = Derived polymorphism lacks residues 454 to 770
  VARIANT 356..770: note = Derived polymorphism lacks residues 356 to 770
  VARIANT 293..770: note = Derived polymorphism lacks residues 293 to 770
  VARIANT 288..770: note = Derived polymorphism lacks residues 288 to 770
  VARIANT 221..770: note = Derived polymorphism lacks residues 221 to 770
  VARIANT 205..770: note = Derived polymorphism lacks residues 205 to 770
MEAVQTALSERTNPLLNRSSGPSVVTRLQPDAGNGAGFYDGAYSFLDTTKACATRFSSGSVTSDDSPAVTPRLLSLMSSSSPDNCSSSSEWPDRAAASRSNRYLFDANAQARCAGYLDLMRLEVDAQLGRLRGGVTGLESYALPGNGRAIGGAHLGMSLDVMLIEIDERFNTLKLLMGSVFRQAKEMLGSVNSSVSDLQSENELQLEVFGAIIGECVSGLQEELERKLYEQISITNTMGRNWKEAITQFAAMREDLGALCKLLLPLAPEAHISNGKNESPGSKSNRWKYNFFGKKSREDRSPRAEDSKSFRKQKSFGAKDVISEKSDFHHLNGMTREQVITYFKSEISKMKRMHESALQEKTEELFRLKREKGSHSLKNDIEFEPLRKKIPELVLRMDQIISKNIKVPAICMTHDELDERCRLMSRIDALFYENQHFRGLLADRMKDVKALSSQLSEASTELSMQMLSEEELLRQIDKVREDCEDLRIECDVREGMYQTVTKHLLDDYKDSMDGAALNLSAKLSSLESAVSEKDKALCIYNEENHRLKEKLAELEKERLIHGDQEVPEAIKQDSTEIVLRDIEVEPCTSPRRSNVNNSRYDELVKLDSSLEQTSCVLKEMNNKNMDRSSSLSRNEQEKQLECILVSIMKLSKDFVEIEKKMSAERTENRSEELSDHCNHMVRQAMVLTKIGLWYKQMIEARRSELQKAEAKVMVLGDKITAQLSLLRKIYLALDHYSPTLHQHPGLLDAFMKTCKLVADLRSKQNEGDAT

SEQ ID NO: 1967 - protein, 392 aa, Zea mays
  VARIANT 220..392: note = Derived polymorphism lacks residues 220 to 392
MATAAAASRVAVSAPVFGSDGGARSSGIKGNNNVSFGSKSWVGGTLAWESSCSVRPRRASKVLCMSVQQASRSKVSVAPLHLESAKEPPLNTYKPKEPFTATIVSVESLVGPKAPGETCHIVIDHGGNVPYWEGQSYGVIPPGENPKKPGAPQNVRLYSIASTRYGDNFDGRTGSLCVRRAVYYDPETGKEDPSKNGVCSNFLCNSKPGDKIQLTAGSFSYDFMTSGPSGKIMLLPEEDPNATHIMIATGTGVAPFRGYLRRMFMEDVPNYRFGGLAWLFLGVANSDSLLYDEEFTSYLKQYPDNFRYDKALSREQKNRSGGKMYVQDKIEEYSDEIFKLLDGGAHIYFCGLKGMMPGIQDTLKKVAERRGESWDQKLAQLKKNKQWHVEVY

SEQ ID NO: 1968 - protein, 345 aa, Zea mays
  VARIANT 268: note = Ancestral polymorphism is A, Derived polymorphism is D
MDEASTSASGAATRRGFVPARSGVFYRFTQQNLPAWKPAMTPGCIIAMFLIIGIIFIPFGLLCLQTSNHIAEIIYRYDVDCVPDAYRGNRQAYIKDSSISKNCTLEAKVLEYMRAPIYVYYELENFYQNHRRYVKSRSDKQLRFGAKYTADSCSPVEWDNNGSPIVPCGLIAWSLFNDTYGFTRGSKEIKVNRKNISWKSDREHKFGKHVFPSNFQNGTLIGGGKLDPTVPLSEQEDLIVWMRTSALPKFRKLYGVIEDDLHADETIAIFVGNNYNTYTFGGKKSIVLSTASWLGGKNDFLGHAYIVTGSLSIIISILFALIHVKYPRPQGDPNCLSWNRKNSNS

SEQ ID NO: 1969 - protein, 95 aa, Zea mays
  VARIANT 79: note = Ancestral polymorphism is V, Derived polymorphism is M
MDVEVSAALFDLNMQPPSEDGLGFDLNLEPPVDEIGFDLNMHANVFEYDDVLDLTLDEPNPFDGIVKRKDAPEEIKKQVYMELLRRSRNGSVLPK

SEQ ID NO: 1970 - protein, 133 aa, Zea mays
  VARIANT 32..133: note = Derived polymorphism lacks residues 32 to 133
MDPTPQSPLSSDESDPSWFWRNPARQAARAAQRSAHAAAAARAAAEAREELEERAVVAVREDGAAARSAAVARPTPARASASRRVRHHPYSRASRQRGVKLRVPSDDEGEVVGPAKVEEGDNKVMKNEDAMKP

SEQ ID NO: 1971 - protein, 224 aa, Zea mays
  VARIANT 189: note = Ancestral polymorphism is A, Derived polymorphism is T
  VARIANT 119: note = Ancestral polymorphism is W, Derived polymorphism is S
  VARIANT 113: note = Ancestral polymorphism is D, Derived polymorphism is A
  VARIANT 108: note = Ancestral polymorphism is D, Derived polymorphism is H
  VARIANT 104: note = Ancestral polymorphism is A, Derived polymorphism is P
  VARIANT 103: note = Ancestral polymorphism is W, Derived polymorphism is C
  VARIANT 102: note = Ancestral polymorphism is F, Derived polymorphism is Y
  VARIANT 43: note = Ancestral polymorphism is N, Derived polymorphism is K
  VARIANT 42: note = Ancestral polymorphism is G, Derived polymorphism is R
  VARIANT 27: note = Ancestral polymorphism is L, Derived polymorphism is M
MAEEKKQGLQLLDFWVSPFGQRCRIALDEKGLAYEYLEQDLRNKSELLLRANPVHKKIPVLLHDGRPVCESLVIVQYLDEAFPEAAPALLPADPYARAQARFWADYVDKKLYDCGTRLWKLKGDGQAQARAEMVEILRTLEGALGDGPFFGGDALGFVDVALVPFTSWFLAYDRFGGVSVEKECPRLAAWAKRCAERPSVAKNLYPPEKVYDFVCGMKKRLGIE

SEQ ID NO: 1972 - protein, 305 aa, Zea mays
  VARIANT 59: note = Ancestral polymorphism is E, Derived polymorphism is K
MAPLVLKSSSSGTSILVIGGTGTIGRHLVTASLDAGHPTAVLVRPAAAAEDPAKASLLEAFKTRGASLIYGDINDAEALVAAIKQAGDVVISATGHSSPEEVESQLRIVAAIKEAGNVKRFLPSEYGCDVEHVAEHMVEPARSILGAKVRVRHALKAAGIPHTIVCSNWAQGFLLPRAGDPQLPDGRPPDTTATIFGDGQVQATFVNEQDMSRVAIKAVQDPRTLNKKLHLAIVHASFIAAGRAPSTKRNIHTKDSHGETMTQGVDDVDATQLYPGISYITVKDYLDALPPHNTLRSDGSRPDSR

SEQ ID NO: 1973 - protein, 276 aa, Zea mays
  VARIANT 225..276: note = Derived polymorphism lacks residues 225 to 276
MVAAGNPPPKPWERAGNSSGPVPFKPPSGGSTSDVVEASGTAKHGEVVSAAGNNVASNVNSTISMPVPPRPWQQQGYENSYGGYGSNMYSSYGGYSGPYGNNMYSGYGGGYGGMYGGSGMYGGPMYSGGMGGPYGGYGMGMSPYNQGPNSFGPPTPPPGFWVSFLRVMHGVVNFCGRVSFLVSQNTQAFHMFITALLQVSSDCYVIGLECFMVSLQDLFYVCWGSKENQRRAVLRAQELHHRRDEASSLLRRRKLTRGTACGLRMAREIKGPVWAQ

SEQ ID NO: 1974 - protein, 832 aa, Zea mays
  VARIANT 137: note = Ancestral polymorphism is T, Derived polymorphism is M
MSQPHAAAPASKRPFSSTTTSPSPTSSPATPLMKKAKHPAATASSVGTVEKNGIHLDTAAAAATGGGRTNGEEDAEMVLVDQDELPAPSAPASAGVAANLFRKKATLPQPSTSARKPLRIRIGQPKLPKNFEEDTWTILKDAITAIFLKQKLSCDVEKLYQAAGDLCLHKLGANLYERIKKECEIHIAEKISALVGQSPDLVVFLSLVQRTWQDFCDQMLIIRGIALLLDVKYVKNVANICSVWDMGLQLFRKHLSLSPEIEHKTVTGLLRLIESERLGEAIDRTLLSHLLKMLTALGMYSESFEKPFLECTSEFYATEGVKYMQQSDIPDYLKHVESRLQEEHERCILYLEANTRKPLIATTETQLLDRHTSAIIEKGFAMLMDANRINDLLRMYNLFQRVNAVELLKQALSSYIRATGQGIIMDEEKDRELVPFLLDFKASLDKILEESFAKNEAFSNTMKDSFEHLINLRQNRPAELIAKFLDEKLRAGNKGTSEEELEGILDKVLVMFRFIQGKDVFEAFYKKDLAKRLLLGKSASIDAEKSMITKLKTECGSQFTNKLEGMFKDIELSKEINDSFRQSSQARTKLPSGIEMSVHVLTTGYWPTYPPMDVKLPHELNVYQDIFKEFYLSKYSGRRLMWQNSLGHCVLKADFPKGKKELAVSLFQSVVLMLFNDAQKLSFLDIKDSTGIEDKELRRTLQSLACGKVRVLQKIPKGRDVEDKDDFVFNEDFSAPLYRIKVNAIQMKETVEENTSTTERVFQDRQYQVDAAIVRIMKTRKVLSHTLLITELYQQLKFPVKPADIKKRIESLIDREYLERDRSNPQIYNYLA

SEQ ID NO: 1975 - protein, 1287 aa, Zea mays
  VARIANT 321..1287: note = Derived polymorphism lacks residues 321 to 1287
MDPLRSYLGRILLEEITPVVMVLSTPLAEAACRKNGLSFVDMLSPFSLFKKIDVPVRTASEVPYRLQMFKIRMVYASDVRKEDCEVADEKIKPVVSEANEKALPDLLSDPPQAEDVLGKPEAELCPLWIKKFNRELMRTLSFSEHETFDHPVACLLVVSSMDKEPVNKFVDLFNTNQLPSLLNEGIMDPQILKHYLVLHDQQEGPQDIAVNVLAEMRSTLGLNDCKLLCINSSTEAGGSNADNSWLPYKALVLNNHDGSCILSVDDLNEIKDFMQDFVSNHIIPYMEQKIRVLNQQVATTRKGFRNQIKNLWYTFTSIESQIRVLGDFAFMLRDYELALSNYRLLATDYKLDKAWKRFAGVQEMSGLCYFILDQSRKDAEYCMENAFSTYLRIGSSGQRNATRCGLWWAEMLKTRGQYREASNVYFRVSNEEPSLHSAVLLEQAACCYLLCNPPMLRKYGFHLILAGNSYFVSDQKQHAVRVYRNALFVYKQNPWSYINNHVHFNIGRWYGVLGILDVAIKHLLEVIACSHQSLTTQNMFLNDFFHYVQSMGKKFDVYKLQLPVFNMSSLKVLHEDHRTYASHADVGVSESTWQELEEELIPSSSIVKTNWLDTQPMRKYKDSCICVAGEAVKLSVELKNPLQIPVAVSGISIICQLSSTLDALSSDVSGLDLDGGEDKVNTEPSISMLETDGDKFTLSKLDIVLGGGESKRGMNVKKVLKVQFCVGALLLDLFICWNLLQFDVQLDVTPKVEGILKLVGIRWTLSESVVGYQYFEFNAQKKIKKGKRGPHRSWNNSLVVIKGLPKLTGSIDRMPTKAFAGDLKLLTLNLRNHSEYAVKGIKMKLSNPRFLIPGDSSDIGLKFPHCLKRHVQSESSVVSAKTMKDNFKSLLFAFPQDIEIQAGAALSWPIWFHAATPGNVSLYISLYYEMGSSSDIKYRTLRMHFNLEVLPSLDVSFSVSTSSSRLQEYIVRMDVMNKTPSESFVLHQLSCVGDKWAVSALAACSSINSVETVSENQAVSYFFKIKDCEADSCKEAESDSCTSDMALCPGSSTDLFDIARSPFVDFHHQERCRQVKMAKGPCSLLDFVLISKAVDNSSKPTPDFELLSHHTCHCRQNPIWWLMEGPRTISHDFSKSYCEANLQLVIHNSEAHKILVRVVTFDVIPEKTVHPHDSTSAQGGWYDVSLESDVKAISSSKSTHQEKRSSKSIPPYVWCSLSCAQIELQPDSCARVPLKVCIFAPGTYNFSNYELQWKVHLSEGPHVGENENRLSGGGLGYPFYVTVLQGV

SEQ ID NO: 1976 - protein, 447 aa, Zea mays
  VARIANT 123..447: note = Derived polymorphism lacks residues 123 to 447
MGISARWLKSLVGLRKVGRQQQQRRKDDADVGRMKTDVADQFHFQIQHSQDDNSIAAQEIPEVSYGNDPPEDDSNVPSCFEPARSSAHMPFCQTEEAQKEIWAATIIQTAFRAFLFPLGFLLQARRARRALKGLVRLQALVRGHIVRKRAATTLRCMQALVRVQARVRARRVRMALENQTDRQNTSPEHTIEARVREIEDGWCDSIGSVGDIQAKLLKRQEAAAKRERAMAYALAHQWQASSRQPTAFEPDKNSWGWNWLERWMAVRPWESRFLGTYGTDGIFVVNETRQPDRSATKTPYRKPVKKHDSTLQSNMLNQKVFPSNSEGGGSSTNRSSGLVSTKSRLKVLPREGSEEASSHPSVIVRSTSNPKERISSINSKERTGDLDFQVHKRSSLPGIGPEAGKHLTKKGMVNRSLKATKDSQILGSRHHLASSIDPVPTRVELET

SEQ ID NO: 1977 - protein, 612 aa, Zea mays
  VARIANT 330: note = Ancestral polymorphism is G, Derived polymorphism is S
MGNTCVGPSITKNGFFQSVSTVLWKTSQDGDALPAAGSDANGPGRSQSTPPPALPKPASDVHVAVQSKAPEPVKIAASHSEPAPKAAAPVAANASPSSSPNSSAEALPTRPRPKAPPVKRVSSAGLLVGSVLKRRTENLKDKYSLGRRLGQGQFGTTYLCVERATGKEFACKSILKRKLVTDDDVEDVRREIQIMHHLAGHPNVISIRGAYEDAVAVHLVMELCGGGELFDRIVQKGHYTERKAAELARVIVGVVEACHSMGVMHRDLKPENFLFADQKEEAALKTIDFGLSIFFHPGQIFTDVVGSPYYVAPEVLKKKYGPEADVWSAGVIIYILLSGVPPFWAENEQGIFEEVLHGRLDFESEPWPSVSEGAKDLVRRMLIRDPRKRLTAHEVLRHPWVQVGGLAPDKPLDSAVLSRMKQFSAMNKLKKMALRVIAENLSEDEIAGLKEMFKMIDADNSGQITFEELKVGLKKVGANLQESEIYALMQASDAQADVDNNGTIDYGEFIAATLHLNKVEREDHLFAAFQYFDKDGSGYITADELQVACEEFGLGDVQLEDVIGEVDQDNDGRIDYNEFVAMMQKPPAGLPNKKAGLQNSFSIGFREALRMA

SEQ ID NO: 1978 - protein, 95 aa, Zea mays
  VARIANT 10..95: note = Derived polymorphism lacks residues 10 to 95
  VARIANT 14: note = Ancestral polymorphism is A, Derived polymorphism is T
  VARIANT 17: note = Ancestral polymorphism is G, Derived polymorphism is D
  VARIANT 19: note = Ancestral polymorphism is D, Derived polymorphism is N
  VARIANT 25: note = Ancestral polymorphism is N, Derived polymorphism is T
  VARIANT 26: note = Ancestral polymorphism is L, Derived polymorphism is H
  VARIANT 32: note = Ancestral polymorphism is S, Derived polymorphism is L
  VARIANT 34: note = Ancestral polymorphism is C, Derived polymorphism is R
  VARIANT 38: note = Ancestral polymorphism is S, Derived polymorphism is N
  VARIANT 39: note = Ancestral polymorphism is G, Derived polymorphism is S
  VARIANT 44..95: note = Derived polymorphism lacks residues 44 to 95
  VARIANT 45: note = Ancestral polymorphism is S, Derived polymorphism is I
  VARIANT 55: note = Ancestral polymorphism is R, Derived polymorphism is W
MAYDHNTLPSSWWAMFGSDTPTLQNLALRLVSQCCSSSGCERNWSTFALVQTKVRNQLSHQKLHKLVYVNYNLRLRLKDAIGFTSVQGEEHPFSQ

SEQ ID NO: 1979 - protein, 580 aa, Zea mays
  VARIANT 310: note = Ancestral polymorphism is L, Derived polymorphism is P
MGNTCVGPSAAGRNGFLANVTLWRPRGDDPAPAPALPPPPSPASDKAPDPVTIPESEHSSHHSSRSTDLPPAPASQPQDNPTAKKPAPKVKRVQSAGLLADSVLKRDVNTARLKDIYTIGKKLGQGQFGTTYLCVEKATGREFACKSIAKRKLLTEEDVEDVRREIQIMHHLAGHANVVSIVGAYEDAVAVQLVMELCAGGELFDRIIQRGHYSEKAAAQLTRVIVGVVEACHSLGVMHRDLKPENFLFVNQKEDSPLKTIDFGLSIFFKPGEMFTDVVGSPYYVAPEVLLKYYGREVDVWSAGVIIYILLSGVPPFWDESEQGIFEQVLKGDLDFSSEPWPSISESAKDLVRKMLIRDPKKRLTAHEALCHPWVCVDGVAPDKPLDSAVLSRLKQFSAMNKLKKMALRVIAESLSEEEIAGLKEMFKMIDSDNSGHITLEELKTGLQRVGANLMDSEINALMEAADIDNSGTIDYGEFIAATLHINKVEKEDKLFAAFSYFDKDGSGYITQDELQKACEEFGLGDTRLEDIIGDIDQDNDGRIDYNEFVAMMQKGDNPLGRKGHQSNTSFGLGDALKLR

SEQ ID NO: 1980 - protein, 171 aa, Zea mays
  VARIANT 163: note = Ancestral polymorphism is A, Derived polymorphism is T
MTMTVAAMPSSEASSSPSKRAAPATGLRGPRPLPLKVSSSSSSRGSSPAPTTASTTTTKKPVIVYEHTPKVIHARPQEFMTVVQRLTGKPPATTTTSSSSLPTISPATAEEGGAGDPLLLTLGQRRAAPAPPTTATTTQLSSPMTAGTLLSPGIIFSPNTMQTIQELSPLF

SEQ ID NO: 1981 - protein, 373 aa, Zea mays
  VARIANT 288: note = Ancestral polymorphism is A, Derived polymorphism is T
  VARIANT 306: note = Ancestral polymorphism is I, Derived polymorphism is T
  VARIANT 322: note = Ancestral polymorphism is I, Derived polymorphism is T
  VARIANT 332..373: note = Derived polymorphism lacks residues 332 to 373
MDPVADPSPSRRSLKRRPPARSPELSPKSGPGAGEAAAEGLIRRVEELEAAAARLRGEKEAAEDAARGLRQELDAERASAETAASEAMLMIERLQREKAAAQMEARQFKRYAESREDREREVQEELASLSDLAASYHSRLQSHGIDPDSFTDDDDDESYSYEEVGAEDVEQIGMAALQVERNVRDSGSGMEVKAMVVGNDRGEDEEDADADADDAEEPSSPVEKEFEYTVDVTCASTTKPATSVVAQYVGDGNSGGLYARVEALEADRAALRREIFALRAERAQLVMAREMARRLCWEMVAEQRAIVKKALVPASSFSVIRICKWVLSILFWRNRSSTAKYTFGLSTTFLGLLLLLDRSALLSSWRRLPWPQR

SEQ ID NO: 1982 - protein, 1358 aa, Zea mays
  VARIANT 33: note = Ancestral polymorphism is R, Derived polymorphism is P
MGKAPAAVVVAVNGQRYEATGVDPSTTLLEFLRTQTPVRGPKLGCGEGGCGACVVLISKYNPATDEATEFSASSCLTLLRSIDRCSVTTSEGIGNTKDGYHAVQQRLAGFHASQCGFCTPGICMSIFSALAKADKVASRPTPPTGFSKLTTSEAEKAVSGNLCRCTGYRPIVDACKSFAADVDLEDLGLNCFWRKGDEPATVSKLPGYSSAAVCTFPEFLKSEIKSSRENADGAAVAVSSDGWYHPQSIEELHRLFDSYWFDESSVKIVAANTGSGVYKDQDLYDKYIDIKGIPELSVINSSVKGIELGSVVSISTAIEVLSDGNLIFRKIADHLSKVASPFVRNTATIGGNIIMAQRLPFESDIATVLLAAGTTVTIQTASKRLCLTLEEFLQQSPCDSRTLLMSIFIPKWDSDGITFETFRAAPRPFGNAASYVNAALLARTSTDAASGKNIMEDICLVFGAYGADHAIRASKVEDFLKGKSLSSSVILKAVQLLKETVSPPEGTTHPEYRVSLAVSFLFTFLSSLTNSMNETAKVNVINGSLTNRTTNISGGYSLKENLEVDRNYLPIHSRQEMVFGDEYKPVGKPIKKVGAELQASGEAVYVDDIPVPKGCLYGAFIYSTRPHAHVKGINFKSSLASQKVITVITAKDIPRGGQNIGSSFPMLGEEVLFADQVVEFAGQNIGIVISETQRYAYMAAKQAVVEYSTENLQPPILTIQDAIQQSSYFQIPTFLSPKPVGDYNQGVSKADHTLSAEVKLESQYYFYMETQVALAIPDEDNCITIYSSTQFVEITQDVVARCLGIPLHNVRVITRRVGGGFGGKAMKAIHIACACAVAAFKLQRPVKMYLDRKTDMIIAGGRHPMKTKYSVGFKSDGKITAVHLDLGLNAGITPDLSAILPNTIIGSFKKYNWGALAFDIKLCKTNVSPKSTMRAPGEVQGSFIAEAIVEHVASVLSVDTNTIRRKNLHDFKSLAAFYGESAGEAPTYTLATMFDKLALSPDYQHRATMVEHFNSSNKWKKRGISCVPITYEVSLRAAPGKVSIMNDGSIAVEIGGVEIGQGLWTKVKQMTAFGLGQLCADGGECLLDKVRIIQVDSLSMIQGGFTGGSTTSENSCEAVRHSCLRLVERLKPVKESLEAKGATMEWGALIAQASMASVNLSAHAYWNPTSRSYLNYGAGISEVEVDVLTGATTILRSDLIHDCGQSLNPAVDLGQVEGAFIQGVGFFTNEEYKTNTDGMVIHDGTWTYKIPTVDTIPKQFNVELINSAGDRKRVLSSKASGEPPLLLASSVHCAMREAIRAARKEFSICTGPANSAVTFQMDVPATMPVVKELCGLDVVERYLQSVSAGPTTPRAISK

SEQ ID NO: 1983 - protein, 605 aa, Zea mays
  VARIANT 465: note = Ancestral polymorphism is P, Derived polymorphism is L
MDSADSSSPRCHAQKDAGELKDQNSTSKMPSGATELPCSLKREVQVLEKRLNDQFVMRRALEKALGYKPCAIHASSENCIPKPTEELIKEIAVLELEVICLEQHLLTLYRKAFEQQFSPASSACDMESNKQPARSFSGILSEAPELSFSTPRKHHQLNQSSRMVLARKSTPTASTSETSNEKINIGRSHSSLLHRSVRVSPSANNLARALKPCHTSPLSFVEEGKCMDPGVVSLADILGTRVADHVPQTPNKISEDMIKCITAVYMRLRDVPAVQHAFFPSPCSSFSSASGLSSKYTADIWSPRCRKESFVEEWQDNGLGNGESRELALPYDSVVEVSALCKGDQRSADVKDMLRKYMSLVQLLESVDLSGMKHEEKLAFWINVHNAMMMHAHIEYGIPQSNSKRILLTKVSYIISGQRVNAELIEYQILCCRAHSSGQWLRLLLYPKWKSRDKDELQGFAVDRPEPLVHFALSSGSYSDPVVRLYSPKSVFQQLEAAKEEYVRANVGVRGRGQHKIILPKALELYARDAGLGAQEVVAAVECHLPEGLRDAVRRSQQQAGRARAVEWKPHNLAFRYLLAKELVGGSPACSRPLEPVSAPLRAGP

SEQ ID NO: 1984 - protein, 161 aa, Zea mays
  VARIANT 124: note = Ancestral polymorphism is G, Derived polymorphism is C
MTQKRKSIGRGGVEDCGSPARAAACTSTTAASTSTTVEEKNTPAVFETTPPLWMTGPAETKKPKIASSSSSSSSSSSSSPDGGSNNAAVAQAQPQPPPANRCSACRKKVGLLGFRCCCGKTFCGAHRYAEKHACGFDYKHAGRGRIAKENPIIVADKIAKI

SEQ ID NO: 1985 - protein, 258 aa, Zea mays
  VARIANT 45..258: note = Derived polymorphism lacks residues 45 to 258
  VARIANT 41: note = Ancestral polymorphism is S, Derived polymorphism is I
  VARIANT 23..258: note = Derived polymorphism lacks residues 23 to 258
  VARIANT 6: note = Ancestral polymorphism is G, Derived polymorphism is R
MSEAAGRRSVNDPSFSDPSYTPQTYRNAIIGKTGLATTSASLAYQSYSLGQDTAPSQPLSAYASSTTVMMPPAGRSDQSSARHGFKPGSGKLEAHDSWQQWKGDNNVEMHLWRDHTPYQQMTRSQAYDQSRRDDTYQQTCSRGTEKFSRHAGLQARQFQTETPASHVWHQQQGQVAEEFPHLDIINDLLEEDQINGSIPESFHQDYNVFGLPFSPRGNLSDMGMASVRSPARFNSTKYEYDGGFSGAYDINAVNGLRE

SEQ ID NO: 1986 - protein, 118 aa, Zea mays
  VARIANT 67: note = Ancestral polymorphism is D, Derived polymorphism is Y
MAEISSQKIQIAVLDMIAAISSNKRSVVALESVLKKVCGLVVGIAYSSLTGLQEAAIRALAGLACMDADLVWLLLANVYYSLNQRESLLPDQDLALVSDLLPPPVSSREYLFVQYGGS

SEQ ID NO: 1987 - protein, 175 aa, Zea mays
  VARIANT 89: note = Ancestral polymorphism is R, Derived polymorphism is I
  VARIANT 97: note = Ancestral polymorphism is E, Derived polymorphism is V
MARLNEGLSLFDAILIVPMFQITWTFFSICIGFVYFQEYQVFDTLRIIMFVLGMTFVFVGISLLAPDDSKADTKDGSSTAEDSIIDIDRNGKMLMEETDIDDSISFVTSVKVNAKRVLSKAKSACSMSLGLGESTISASSMLAMPMVSSRTTGFRGIENDRPKYVPLRTTDWSNL

SEQ ID NO: 1988 - protein, 129 aa, Zea mays
  VARIANT 13: note = Ancestral polymorphism is A, Derived polymorphism is T
  VARIANT 16: note = Ancestral polymorphism is V, Derived polymorphism is I
  VARIANT 17: note = Ancestral polymorphism is V, Derived polymorphism is I
  VARIANT 40..129: note = Derived polymorphism lacks residues 40 to 129
  VARIANT 97: note = Ancestral polymorphism is D, Derived polymorphism is G
MAPRTALLIATAAMAVIAAAALLPATASATTYMVGDESGWDVGPDYDAWASGKKFKVGDTLEFLYSEGSHNVVVVDAQSYEACAVPSNAPTLTSGDDSVELGQAGRWLFICGVEGHCDAGMKLAVDVHG

SEQ ID NO: 1989 - protein, 577 aa, Zea mays
  VARIANT 334: note = Ancestral polymorphism is M, Derived polymorphism is R
MAAALASSPLVHLTTSRLRLPRPQASASSSGPVCSIGVCLGWRLKVGWRALRRRDRLRCFSTDGGGGEEGEKRGEEETSATAAASPASVPAETQVGAGEELASERSRSGSFSSSSSSSGTPGVSSEPPLLSFSVDNIDTVKLLELLGPEKVDPVDVKAIKEKLFGYTTFWLTKEEPFGDLGEGVLFIGNLRGKREEIFAKLQRQVRELTGDKYNLFMVEEPNSEGDDPRGGPRVSFGLLRKEVSEPGPTTLWQYVISLLLFLLTMFSCIELGIASKISSLPPEIVSYFTDPNATGPPPDMQLLLPFVESALPVAYEPFFLRGLFFWHILILPNMPTFCMQEIGHFLAAFPKNVKLGIPFFIPNFTLGTFGAITQFKSILPDRKTMFDISMAGPVAGAALSFSMFFVGLLLSSNPVGASDLVEVPSQLFQGSLLLGLISRATLGYRAMHAATVSIHPLVIAGWCGLTTSAFNMLPVGCLDGGRALQGAFGKDALFGFGLTTYSLLGLGVLGGPLSLPWGLYVLICQRTPEKPCLNDVSDVGSWRRAALIASVFLVVLTLIPLWDELAEELGVGLVSSF

SEQ ID NO: 1990 - protein, 300 aa, Zea mays
  VARIANT 36..300: note = Derived polymorphism lacks residues 36 to 300
  VARIANT 58: note = Ancestral polymorphism is T, Derived polymorphism is M
  VARIANT 59: note = Ancestral polymorphism is G, Derived polymorphism is S
  VARIANT 73: note = Ancestral polymorphism is G, Derived polymorphism is D
  VARIANT 119: note = Ancestral polymorphism is N, Derived polymorphism is I
MRGSVILALLAVASSSFFGATATASEGWPTAAVERQAIFSDPNNLTADWVGPGVCNYTSVYCASLPSGPDRRGALVVAEELALLADLALLHLNSNRFCDVLPRALCRLRILHELDLSNNRFVGPFPDVVLDLPALHFLDLCFNDFEGVVPPCLFDRLLDAIFLNHNRLRFQLPDNFGNSPASGVVLARNAFGGCLPVSVANMSGTLKEILLINNGLSSCFLPEIGLLRELTVLDVSFNQLAGPLPLKLALMRKLEQLDVAHNLLTGAVPSGICDLPRLKNFTLAYNFFTGEAPSCARLVA

SEQ ID NO: 1991 - protein, 162 aa, Zea mays
  VARIANT 69: note = Ancestral polymorphism is F, Derived polymorphism is C
  VARIANT 104: note = Ancestral polymorphism is N, Derived polymorphism is D
MSTPARKRLMRDFKRLQQDPPAGISGAPYDNNIMLWNAVIFGYQPAYFCDVRPDDTPWDGGTFKLTLQCTEDYPNKPPTVRFVSRMFHPNIYADGSICLDILQNQWSPIYDVAAILTSIQSLLCDPNPNSPANSEAARMFSENKREYNRKVREVVEQSWTAD

SEQ ID NO: 1992 - protein, 796 aa, Zea mays
  VARIANT 226..796: note = Derived polymorphism lacks residues 226 to 796
  VARIANT 175..796: note = Derived polymorphism lacks residues 175 to 796
  VARIANT 18: note = Ancestral polymorphism is L, Derived polymorphism is S
MATPSHLLLVVFTALLALLPGTTQLQPSQVWTLIKIQQLLNAPPMLSHWRRSTDFCGGGGGAMGPAGSAAVLCYGDTVTQLHIAGAGAPPLPRNFSIGAVVTTLSRLPDLKVLTLSGLGLWGPLPGKLGRLASLEIVNMSGNYLFGEVPRGVSRLAGLQTLVLDDNMLGGEVPAWIGALPSLAVLSLRNNTFQGAVPESLGSAPSLRSLVLASNNLSGNLPDMSRQANLQVLDVGGNSLGPAFPKLGRKVVTVVLGRNRFGGGLPAELSSFYLLERLDVSWNRFVGPFAPALLSLPSIRYLNIAGNRFTGTLSDKAPCGDNLRFVDLSLNLLMGSVPTCLRSPGRKPDTVVLVSTNCLDDSDGSQHPSPFCQNQALAVGIVPGKERKSVAGQAGFVAGVVVAILVAISAVGLIAFFAVRKAAMKRWEARAPTVSEEESSSTGYPSKMLADARYISQTLKLGALGIPSYRAFSLVELEAATNNFENSHLLGQDSHGEMYRGRLGNGTPVTIRTLKMKRSQTAQSFNRHIETISRLRHQNLVSALGHCFEYNLDESTVTQLYIVFEYVQNGNLRSRISRRASEGTEGCRLTWSQRISAAIGVAKGIQFLHGGIIPGLVGNDLRITNVLVDQNHVAKIGSYNIPILAEAMRSEQGGAGNKFQADSRVKSDKTDIFDFGVILLEVVSGKTITSMYEVEILKELLAWAIADEDRVRRRSFADPAVSKGCSDESLRTVMEICQRCLAKEASQRPSVEDVLWNLQFAAQVQDDWETDAWSSGGGSPVSSSSRATRPSRLHLSR

SEQ ID NO: 1993 - protein, 288 aa, Zea mays
  VARIANT 15: note = Ancestral polymorphism is L, Derived polymorphism is P
  VARIANT 21: note = Ancestral polymorphism is P, Derived polymorphism is L
  VARIANT 57: note = Ancestral polymorphism is G, Derived polymorphism is D
MTSHHNRMQWKTPALHLPLPPLLALGTQATAAALRIGLSPTGSGFSARLSPLVLASGPPHTGRGSGLLDTMVKLTMIARVTDGLPLAEGLDDGRDLKDSDFYKQQAKLLFKNLSKGHHEASRMSIETGPYYFHYIIEGRVCYLTMCDRSYPKKLAFQYLEDLKNEFERVNGNQIETAARPYAFIKFDTFIQKTRKLYLDTRTQRNLAKLNDELYEVHQIMTRNVQEVLGVGEKLDQVSEMSSRLTSDTRIYADKAKDLNRQALIRKYAPVAIVIGVVLMLFWLKNKIW

SEQ ID NO: 1994 - protein, 244 aa, Zea mays
  VARIANT 1: note = Ancestral polymorphism is M, Derived polymorphism is L
  VARIANT 21: note = Ancestral polymorphism is P, Derived polymorphism is H
  VARIANT 32: note = Ancestral polymorphism is V, Derived polymorphism is L
  VARIANT 37: note = Ancestral polymorphism is W, Derived polymorphism is C
  VARIANT 44: note = Ancestral polymorphism is G, Derived polymorphism is R
  VARIANT 51: note = Ancestral polymorphism is T, Derived polymorphism is I
  VARIANT 52: note = Ancestral polymorphism is A, Derived polymorphism is T
  VARIANT 57: note = Ancestral polymorphism is V, Derived polymorphism is M
  VARIANT 68: note = Ancestral polymorphism is G, Derived polymorphism is S
  VARIANT 71: note = Ancestral polymorphism is P, Derived polymorphism is Q
  VARIANT 73: note = Ancestral polymorphism is A, Derived polymorphism is V
  VARIANT 84: note = Ancestral polymorphism is G, Derived polymorphism is E
  VARIANT 89: note = Ancestral polymorphism is S, Derived polymorphism is N
MSMVAKMLQDECVVSDRIMRPGLITDVMDLKVRMVEWMQSKLEGCAPSRITAAKAIVKVGIVVMGHVGLTPQVISVLGGFRPQGKTVDSVVKVVETTCHAGGWMLLCCVLVFFHGRIIVDWWCQVFFHGRCRGAPDCLTYLTSNKGRRLELCELCAGNTGQEHFICLWPKLPCLILQTSNADPFSLMDMLIFKAVEEQVKNRVEHKARIFEQNATDSECKVDPKVLSKLYDQWVMPQTKDVSLD

SEQ ID NO: 1995 - protein, 266 aa, Zea mays
  VARIANT 211..266: note = Derived polymorphism lacks residues 211 to 266
  VARIANT 198..266: note = Derived polymorphism lacks residues 198 to 266
  VARIANT 192: note = Ancestral polymorphism is I, Derived polymorphism is T
  VARIANT 181: note = Ancestral polymorphism is V, Derived polymorphism is A
  VARIANT 174: note = Ancestral polymorphism is G, Derived polymorphism is D
  VARIANT 8..266: note = Derived polymorphism lacks residues 8 to 266
MESCHGEENIWYKCKNSVSTCWVDFEKQLNGHHFSQLCSVKGDSRKSLEADAYASYMKGALFSEQDKNIDATIINFKNTRAIYEEPGKYGGGLEGCVLLGFDIRDVQSPEDIVAAERLVFPGVGAFGSAMDVLNRTGMADALREYIQRDRPFLGICLGLQLLFDSSEENDPVSGLGVIPGVVRRFDSSNGLIVPHIGWNALQITKDTPLLQGADGQHVYFVHSYRVLPSDANRDWISSICNYGDNFISSISMGNIQAVQFHPEKSG

SEQ ID NO: 1996 - protein, 450 aa, Zea mays
  VARIANT 18: note = Ancestral polymorphism is L, Derived polymorphism is H
MKVPVLLLLVSLCFSLALAWQTDTESGSGRPYHYGEESFRHWTRSRQGRFRVLERFTHELLEDAVGNYRVAELEAAPRAFLQPSHYDADEVMFVKEGEGVIVLLRGGKRESFCVREGDVMVIPAGAVVYSANTHQSEWFRVVMLLSPVVSTSGRFEEFFPIGGESPESFLSVFSDDVIQASFNTRREEWEKVFEKQSKGEITTASEEQIRELSRSCSRGGRSSRSEGGDSGSSSSKWEIKPSSLTDKKPTHSNSHGRHYEITGDECPHLRLLDMDVGLANIARGSMMAPSYNTRANKIAIVLKGQGYFEMACPHVSGGRSSPRRERGHGREEEEEREEEQGGGGGQKSRSYRQVKSRIREGSVIVIPAGHPTALVAGEDKNLAVLCFEVNASFDDKVFLAGTNSALQKMDRPAKLLAFGADEEQQVDRVIGAQKDAVFLRGPQSHRVSSV

SEQ ID NO: 1997 - protein, 182 aa, Zea mays
  VARIANT 24: note = Ancestral polymorphism is A, Derived polymorphism is V
  VARIANT 22: note = Ancestral polymorphism is V, Derived polymorphism is M
  VARIANT 10: note = Ancestral polymorphism is G, Derived polymorphism is E
MAAAAAARAGASGVAWLLAAAVAAALVASASAQSGCTTTLISLYPCLNYISGNVSAPPSSCCSQLASVVQTNPQCLCAALSGDSSSLGGVTVDKTRALQLPQACNVKTPPASKCNSAGGGSAPGAATPATPSAGVPATAGTGTGSKATPTAPFLTSGAASTRGAVSLVLAFAAVTVYGISAA

SEQ ID NO: 1998 - protein, 201 aa, Zea mays
  VARIANT 66: note = Ancestral polymorphism is Q, Derived polymorphism is L
  VARIANT 14: note = Ancestral polymorphism is A, Derived polymorphism is V
  VARIANT 4: note = Ancestral polymorphism is R, Derived polymorphism is Q
MTSRRDRLEPSPAAAAVALLLVVVVAGAPASGQVATSCTASLISTFTPCLNFVTGSTNGGGSPTKQCCGVLAEMVRTGADCACLILTGNVPFSLPINRTLAVSLPKLCSSTSVPLQCRDTATQIPAPGPIAFAPALPPLPPIPPESSDPPADPTAIPPAVDSPPFSQRPVVVPSSAVRRSHVSVAAVAAVLPIVAAASIFV

SEQ ID NO: 1999 - protein, 193 aa, Zea mays
  VARIANT 28: note = Ancestral polymorphism is T, Derived polymorphism is K
  VARIANT 76: note = Ancestral polymorphism is P, Derived polymorphism is Q
  VARIANT 80: note = Ancestral polymorphism is A, Derived polymorphism is G
  VARIANT 89: note = Ancestral polymorphism is P, Derived polymorphism is L
MEATATPRTQEVMKPEPGTVKVTVDEVTLRKFELSDVDAMMAWASDPQVAALCRWEPYESTEPLLAFIRDVVLPHQWFRAICLGSEPRPVGAVSVSPTGDPCRAELGYVLARAHWGRGVATAAVKRTVTAVFGEVPGLERVEALVDVANLASQRVLEKAGFTREAVLRKYGANKGVVRDKVMCSFIDPDAVPE

SEQ ID NO: 2000 - protein, 246 aa, Zea mays
  VARIANT 179: note = Ancestral polymorphism is N, Derived polymorphism is K
  VARIANT 149..246: note = Derived polymorphism lacks residues 149 to 246
MRLLHKLDVSNNRLSGGFPQHILCLPSVRYVDLRFNDLRGPVPPALFDKPLDAIFLNDNRFDFELPDSLGNSPASVLVLANLRLRGCIPCSVGRMAGTLGELVALNSGLRSCLRQELGWLRELTLLDLSSNQLQGMLPESMAGLHNLQQLHVARNELWGHVPEGVCTLPALRNFTYSYKYFCSEPSRCLNVREVDDRQNCIAARFTRRVGGALASASTVVPPTPGPSRRKRRIRICGAGMWSQLLH

SEQ ID NO: 2001 - protein, 193 aa, Zea mays
  VARIANT 68: note = Ancestral polymorphism is I, Derived polymorphism is T
  VARIANT 80: note = Ancestral polymorphism is A, Derived polymorphism is G
  VARIANT 85: note = Ancestral polymorphism is G, Derived polymorphism is S
MEATATPRTQEVMKPEPGTAKVTVDEVTLRKFELSDVDAMMAWASDPQVAAVCRWEPYESTEPLLAFIRDVVLPHPWFRAICLRGEPRPVGAVSVSPTGDPCRAELGYVLARAHWGRGVATAAVKRTVATVFAEVPGLERVEALVDVANPASQRVLEKAGFTREAVLRKYGAIKGVVRDMVMSSFIDTDPVPE

SEQ ID NO: 2002 - protein, 184 aa, Zea mays
  VARIANT 14: note = Ancestral polymorphism is A, Derived polymorphism is V
  VARIANT 38: note = Ancestral polymorphism is T, Derived polymorphism is M
  VARIANT 53: note = Ancestral polymorphism is L, Derived polymorphism is V
  VARIANT 55: note = Ancestral polymorphism is F, Derived polymorphism is V
  VARIANT 67: note = Ancestral polymorphism is R, Derived polymorphism is G
  VARIANT 96: note = Ancestral polymorphism is L, Derived polymorphism is V
  VARIANT 111: note = Ancestral polymorphism is T, Derived polymorphism is K
  VARIANT 133: note = Ancestral polymorphism is A, Derived polymorphism is V
MEQEAPARPGSVPAVTLRRFELGDVDAMLEWASDPEVTAFMAWDACTSRDALLAFLRDAVLPHPWFRAVCLGGGGHCRPVGAVSVTPTDDACRAELRVVLARAHRGKGVATAAARRAVSAAFGDLPGVERVEALVDVDHNAAARRVLEKAGFQREAVLRSYRVVKGRLRDVAVYSFISTDPVVE

SEQ ID NO: 2003 - protein, 468 aa, Zea mays
  VARIANT 333..468: note = Derived polymorphism lacks residues 333 to 468
  VARIANT 321..468: note = Derived polymorphism lacks residues 321 to 468
  VARIANT 246..468: note = Derived polymorphism lacks residues 246 to 468
  VARIANT 230: note = Ancestral polymorphism is P, Derived polymorphism is L
  VARIANT 226: note = Ancestral polymorphism is T, Derived polymorphism is I
  VARIANT 216: note = Ancestral polymorphism is D, Derived polymorphism is V
  VARIANT 157..468: note = Ancestral polymorphism lacks residues 157 to 468
  VARIANT 48..468: note = Derived polymorphism lacks residues 48 to 468
MDHVVGGKFKLGKKIRSGSFGKLYLAVNVQNGEEVAVKLESVTSRHPQLHYESKLYMLLQGGSWRILYLPNCSKIYQLPHLIFFWDRFPLDQGCRREALATGCCTSTANRGHRAGGQKQPATTVGHRRLEEGEEKGELGFILDGFPRTMRQAVENGRCRGYPAPRLRQRNWHGQGEPPAGFAGDDAPRAVFPSIVGRPRHTGVMVGMGQKDAYVGDEAQSKRGILTLKYPIEHGIVSNWDDMEKIWHHTFYNELRVAPEEHPVLLTEAPLNPKANREKMTQIMFETFNTPAMYVAIQTVLSLYASGRTTDFRDYLYRNFRYSVEKTEGLGWEYSTDGKCEKMPSTNMLNVHIQSLPCFEQEGMIDDASLWDTTTICSNVCTRYTITAGTNATGFTPIQFLSYAVTKRTVQTPQIRISWLLTCRIFPDSKSSWSHLPRFKIAQLSFPILYFFLESFPILYSVCSNTIFA

SEQ ID NO: 2004 - protein, 126 aa, Zea mays
  VARIANT 23: note = Ancestral polymorphism is D, Derived polymorphism is E
MFAMTSIKGVGRRFSNIVCKKADIDMNKRAGELTPEELERLMTVVANPRQFKVPDWFLNRKKDYKDGRFSQVVSNALDMKLRDDLERLKKIRNHRGLRHYWGLRVRGQHTKTTGRRGKTVGVSKKR

SEQ ID NO: 2005 - protein, 260 aa, Zea mays
  VARIANT 138: note = Ancestral polymorphism is A, Derived polymorphism is V
  VARIANT 178: note = Ancestral polymorphism is S, Derived polymorphism is Y
  VARIANT 187: note = Ancestral polymorphism is G, Derived polymorphism is V
  VARIANT 205: note = Ancestral polymorphism is N, Derived polymorphism is S
MYKFFSHRNSRVGFARPPTRTRARKAERSPPGLPFLPALRSPKARSFRKPAQAMNAASTAAAAPAPAATVQVPRGQVDLIDFIDWTGVECLNQDSSHSIVNALKQSLRDDEGLYLASDSDEQLLIYIPFMQVVKLHSALFKGPEEEGPKTVKLFSNKEHMGFSNVNDYPPSDTLELSSDHLIEMGLGLSFLQNKLLPLKYVKFQNVRSLTIFIEDNQSGSDVSKIHKIALYGTTLVSLPHVYYHSHCSHFGRLYFLFGKV

SEQ ID NO: 2006 - protein, 621 aa, Zea mays
  VARIANT 336..621: note = Derived polymorphism lacks residues 336 to 621
MSHGNGMLNSVKVERWPAAVAANGQPRPMDVLHDGSSPPFLTKTYDMVDDPTTNAVVSWSAANNSFVVWDPHIFGTVLLPRYFKHNNFSSFVRQLNTYGFRKVDPDRWEFANEEFLRGQRHLLKNIRRRKPPHSSPNQQSLGSYLEVGHFGYEEEIDQLKRDKQLLMAEVVKLRQEHQNTRSDLQAMEEKLQDTEQKQQQMMAFMARVMQNPDFMRQLISQREMRKELEDAISKKRRRRIDQGHEAGSMGTGSSLEQGPQGVFEPQEPVESLANGVPSDLESSSVEAKGLEVRQGVSSGGSEHLNGRPSGELNDDFWEDLLHEGGLGADAGNAVGQDDMNMDMDPDRELTRRRRARATARIASQLWAEVGPCAEMLAVFDRAVAPSPEGLRQPGAAGGGCAAGLADRFREARPDAVTVNLGGSGALAYSSSNQNPLLPRLFGAVDGVFCMFQGTIANVAVLKQQYGLSKGANEVSIIIEAYRTLRDRGPYPADQVVRDISGKFAFVLYDCSTKSVFMAADTDGNVPFYWGVDTDGRLVVSDDAELVKSACGKSCAPFPKGFFFTTSGGLRSYEHPMHEVKPVPRVDSKGEVCGTTYTVDASARKETTIPRVGSAADWSSQY

SEQ ID NO: 2007 - protein, 496 aa, Zea mays
  VARIANT 393: note = Ancestral polymorphism is C, Derived polymorphism is R
  VARIANT 111..496: note = Derived polymorphism lacks residues 111 to 496
  VARIANT 23..496: note = Derived polymorphism lacks residues 23 to 496
MFALRYPRIRGSLYDGDGGAQAQEQPPAPGTCDLYKGRWVYDESRAPLYKESDCSFLTEQVTCMRNGRRDDDYQKWRWQPDGCDLPRTKEGIWKDIKEGGILDEHIVHEKEIAISDIQQTVESVQLDIKHLLEAAAAKVAEVQLEVNQLYGFAETLNSLNIIQEHDIVFKDMLHSELTGLTNTIGESYRIQDECKLPMHISPDVNLDRHQEANGGSEQEGVELELQRELGPEKLREKLRQECLWKGTELAHGVADALFAVSPTEDLDGPIVHLPPPAVRLPREKHVSEEAGNHLFVESCIPLHDFTYIIISHDNATVTLLSNSHVSFLQLGAGTSLPGLVAAKILVLPPYQGEGYGLGLLEAINYIAQSKNIYDVTIESPSDSLQYVRSSIDCLCLLMFDPIKPALGAIVSSLKETNLSKRAQSLRMVPPADLMETICQKLKIKKKQFLRCWEILIFLSLDSQDHKSVDNFRACIYDFMKGEILGSASRTNRKRLL

SEQ ID NO: 2008 - protein, 166 aa, Zea mays
  VARIANT 104: note = Ancestral polymorphism is R, Derived polymorphism is Q
MPASLVTSSLLPPCRAAATSARALRSFARRPPPSSAGLVRVRCHAATPPPPEVPGQTTPPEVPGTDRQPLEVPGTNRPPDEVPSIDTPPEFNAPPGVDVPMPGQPAPGPELPGPAMPSPPAPEVPVVPPNPDVPPPQLPEVDPPSPPPEVVPPEPPGTATAPPPFV

SEQ ID NO: 2009 - protein, 68 aa, Zea mays
  VARIANT 8: note = Ancestral polymorphism is E, Derived polymorphism is Q
  VARIANT 9: note = Ancestral polymorphism is P, Derived polymorphism is T
  VARIANT 19: note = Ancestral polymorphism is L, Derived polymorphism is H
  VARIANT 30: note = Ancestral polymorphism is K, Derived polymorphism is R
  VARIANT 31: note = Ancestral polymorphism is T, Derived polymorphism is M
  VARIANT 34: note = Ancestral polymorphism is P, Derived polymorphism is L
  VARIANT 36..68: note = Derived polymorphism lacks residues 36 to 68
  VARIANT 42: note = Ancestral polymorphism is L, Derived polymorphism is W
  VARIANT 50: note = Ancestral polymorphism is L, Derived polymorphism is H
  VARIANT 53: note = Ancestral polymorphism is A, Derived polymorphism is G
  VARIANT 58: note = Ancestral polymorphism is P, Derived polymorphism is S
  VARIANT 65: note = Ancestral polymorphism is Y, Derived polymorphism is N
MLLNNCGEPVHRQVIDNGLLPILVKIVKKKTDLPVREKIFLLLDATQTSLGGAKARFPQYYEAYYELV

SEQ ID NO: 2010 - protein, 115 aa, Zea mays
  VARIANT 53: note = Ancestral polymorphism is Y, Derived polymorphism is C
  VARIANT 55: note = Ancestral polymorphism is T, Derived polymorphism is A
  VARIANT 60: note = Ancestral polymorphism is S, Derived polymorphism is R
  VARIANT 65: note = Ancestral polymorphism is E, Derived polymorphism is D
  VARIANT 94: note = Ancestral polymorphism is R, Derived polymorphism is G
MIQGGDIVRGDGKGSESIYGGIFPDENFTVKHTHPGVVAMANSGLDSNGSQFYITTIKTSWLDGEHVVFGRVIQGMDTVYAIEGGAGTYNGKPRKKAVITDAGEIPKEKWGDQEA

SEQ ID NO: 2011 - protein, 284 aa, Zea mays
  VARIANT 72: note = Ancestral polymorphism is A, Derived polymorphism is V
  VARIANT 76: note = Ancestral polymorphism is S, Derived polymorphism is F
MAAASLLEATRFLSTPHPSSRSRPLPYPPGSGLHPHLLRTPRLSTLRVHLHRPAPLGAQKPARPGALLVIDALRRSVLDSLAALKRPALALLLAGVLLAAASAGGPHAAALAASGGRVGGSAFSSRSSSPRSYGYSAPAPRGGYTAAPFYSPSPFVSVGPALGIGFGGSGFLVTLMGFATFLYLAWTRTRRRRTVPPRGAMEGRPAMARRWGCRWGSTGLGRRQRVRPCRWTWAGWAEAGEEDPDASTTDDTDARGRRAAAGRPARARQWGCRRGSPDRGDDRG

SEQ ID NO: 2012 - protein, 223 aa, Zea mays
  VARIANT 186..223: note = Derived polymorphism lacks residues 186 to 223
  VARIANT 98..223: note = Derived polymorphism lacks residues 98 to 223
  VARIANT 95: note = Ancestral polymorphism is N, Derived polymorphism is S
  VARIANT 78: note = Ancestral polymorphism is W, Derived polymorphism is R
  VARIANT 77..223: note = Derived polymorphism lacks residues 77 to 223
  VARIANT 75..223: note = Derived polymorphism lacks residues 75 to 223
  VARIANT 71: note = Ancestral polymorphism is Q, Derived polymorphism is P
  VARIANT 67: note = Ancestral polymorphism is Q, Derived polymorphism is K
  VARIANT 59: note = Ancestral polymorphism is P, Derived polymorphism is S
  VARIANT 50: note = Ancestral polymorphism is D, Derived polymorphism is A
  VARIANT 41: note = Ancestral polymorphism is P, Derived polymorphism is R
  VARIANT 36: note = Ancestral polymorphism is F, Derived polymorphism is S
  VARIANT 34: note = Ancestral polymorphism is E, Derived polymorphism is G
  VARIANT 24: note = Ancestral polymorphism is R, Derived polymorphism is C
  VARIANT 22: note = Ancestral polymorphism is S, Derived polymorphism is N
  VARIANT 15: note = Ancestral polymorphism is L, Derived polymorphism is V
MVNINRQESDEPPSVYIFINSSMCHLASIEKYVGNFATFVPVLLFNLELDTFRYVSYIPNHCLFMRQWLMQFTIQFYRGLMGFPQKVCTTGFLLSSSQYFISDDMTITRYSFTITVDPYIVNYSGVVFCQCKYWRGPVMLKQADGSYACFVDSEAQFTLGQAKELLRVIGLQEEGSSLEFLRRGYKHIMETSRVTIIEFLCCCLTNLRCCTCWLDAFLIWNWE

SEQ ID NO: 2013 - protein, 416 aa, Zea mays
  VARIANT 241: note = Ancestral polymorphism is C, Derived polymorphism is Y
MRCPTPTGFSIMAATGDQLAAVRVRGRASVRVNPSFFSPNTASSTSSPSSAHPMFGVFCKGQQMLIADEMVGLADGDPGTPVLAVAVCGPQGDVVVGGHKPASGFVSGHDGGGGDVGQVLLEAMALVEGLRTAIRMGITSVKAFTDHRLLYNCMVGLSRPAGDEQLADMISQALSAQKQFERCEISLAEQGQVGNAVKLAKEVELEAEIGRYLSTTKERTETCRICLEDVDSRKMHAVEGCAHRFCLVCMKTHMKMRLLGGLAPRCPQPGCATKLGAEGAAALLSPRLVGMMAQRRLKEEEEEEQMSIHPSLRVYCPYPRCSALMPLSEVLRGSLSPEYPATFRECAECGGPMCVECKVPWHGPLSCPEYRRRYPHGGGPEDVALQKLARQRLWQRCESCHHMIELAVGCAHIICV

SEQ ID NO: 2014 - protein, 271 aa, Zea mays
  VARIANT 16: note = Ancestral polymorphism is M, Derived polymorphism is V
MKPLWLYLYGVSSITMQGTGSLVQNKLVGAPGGGSSPHVVQNADIPVKQTTSSSSREQSDDDDMEGDAETTGNGNPVQHRLQRRKQSNRESARRSRSRKAAHLNELEAQVSQLRVENSSLLRRLADVNQKFNEAAVDNRVLKADVETLRAKVKMAEDSVKRVTGMNTLFPAVSDMSSLSMPFNGSPSDSASDAAVPIQDDLNSYFANPSEIGGSNGYMPDIASSVQEDDDFVNGAQVAGKMGSTDSLQRVASLEHLQKRMCGGPASSGSTS

SEQ ID NO: 2015 - protein, 297 aa, Zea mays
  VARIANT 129: note = Ancestral polymorphism is A, Derived polymorphism is D
  VARIANT 101: note = Ancestral polymorphism is L, Derived polymorphism is P
  VARIANT 88: note = Ancestral polymorphism is D, Derived polymorphism is N
  VARIANT 77: note = Ancestral polymorphism is A, Derived polymorphism is P
  VARIANT 76: note = Ancestral polymorphism is S, Derived polymorphism is F
MANRGAAAGKLTVAETFSNLREQGKSAFIPFITAGDPDLATTSKALKILNSCGSDVIEVGVPYSDPLADGPVIQASATRALKKGTTLDSVIEMLKGVTPELSCPIVLFTYYNPILKRGVGNFMSFIKQAGIHGLVVPDLPLEETALLRSEAIMHNIELVLLTTPTTPTDRMKGIAQASEGFLYLVSAVGVTGARSNVNLRVEHLLREIKKVYFLVSMTCGASGIQMVIFLALQVTDKPVAVGFGVSTPEHVKQIVGWGADGVIVGSAIVRQLCEAATPEEGLERLEEYARSMKAAMP

SEQ ID NO: 2016 - protein, 339 aa, Zea mays
  VARIANT 235: note = Ancestral polymorphism is E, Derived polymorphism is G
  VARIANT 159: note = Ancestral polymorphism is T, Derived polymorphism is A
  VARIANT 142: note = Ancestral polymorphism is L, Derived polymorphism is Q
  VARIANT 138: note = Ancestral polymorphism is A, Derived polymorphism is T
MASAIKAASTSSQWSSSPAAVHSSPLSKRLPAAVAMPGRRRSVATVRAVAAVAPAAPAAPAKLTAGAGGRCLPVSQTMSRLRAQGKTAFIPYITAGDPDLATTAEALRLLDACGADVIELGVPFSDPYADGPVIQASAARALASGTTPDGVLAMLKEVTPELSCPVVLFSYFNPIVRWGLADFAAAVKEAGVHGLIVPDLPYGNSCALTLRTEAIKNNLELVLLTTPSTPADRMEEITRASRGFVYLASVNGVTGPRANVNTRVQSLIQEVKQVTDIPVAVGFGISKPEHVKQIAEWGADGVIIGSAMVRQLGEAASPKEGLKRLEKYARIMKNALPCQ

SEQ ID NO: 2017 - protein, 168 aa, Zea mays
  VARIANT 14: note = Ancestral polymorphism is I, Derived polymorphism is T
MAAAGKLLLLAAAILAASFVADARPCGHAQTLLVSFSSVLRPNPDPTNPTPLTTTVVTVLRVRRLGPHQIRRPVALPSVESEVAASSAQDRAKDILVVVSGLLFGFGCGALTAASMYLVWSLLASTCASGYDDDVYSDDEDRLSDSESPKNAGYVIIHDADEYGAGKN

SEQ ID NO: 2018 - protein, 274 aa, Zea mays
  VARIANT 247: note = Ancestral polymorphism is R, Derived polymorphism is K
  VARIANT 167: note = Ancestral polymorphism is P, Derived polymorphism is L
  VARIANT 151: note = Ancestral polymorphism is A, Derived polymorphism is S
  VARIANT 131: note = Ancestral polymorphism is I, Derived polymorphism is R
MANGGAAAGKLTVAETFSNLREQGKSAFIPFITAGDPDLVTTSKALKILNSCGSDVIEVGVPYSDPLADGPVIQASATRALKKGTTLDSVIEMLKGVTPELSCPIVLFTYYNPILKRGVGNFMSTIKQAGIHGLVVPDLPLEETALLRSEAIMHNIELVLLTTPTTPTDRMKGIAQASEGFLYLVSAVGVTGARSNVNLRVEHLLREIKKVTDKPVAVGFGVSTPEHVKQIVGWGADGVIVGSAIVKQLCEAATPEEGLERLEEYARSMKAAMP

SEQ ID NO: 2019 - protein, 361 aa, Zea mays
  VARIANT 257: note = Ancestral polymorphism is E, Derived polymorphism is G
  VARIANT 240: note = Ancestral polymorphism is N, Derived polymorphism is S
  VARIANT 236: note = Ancestral polymorphism is A, Derived polymorphism is T
  VARIANT 157..361: note = Derived polymorphism lacks residues 157 to 361
MASAIKAASTSSRGLRPRRQSTRRRYRSGYQLQWPCRAAEVCGHCKGGRRGSSGCPGAGQAHRRCRRPMPAGVADHVQAQGAGQVLLCRHSHVRVLTWNSVVTSWFSQTAFIPYITAGDPDLATTAEALRLLDACGADVIELGVPFSDPYADGPVIQASAARARASGATPDGVLAMLKEVTPELSCPVVLFSYFNPIVRWGLADFAAAVKEAGVHGLIVPDLPYGNSCALTLRTEAIKNSLELVLLTTPSTPADRMGEITRASRGFVYLATVNGVTGPRANVNTRVQSLIQEVKQVTDIPVAVGFGISKPEHVKQIAEWGADGVIIGSAMVRQLGEAASPKEGLKRLEKYARSMKNALPCQ

SEQ ID NO: 2020 - protein, 142 aa, Zea mays
  VARIANT 46: note = Ancestral polymorphism is S, Derived polymorphism is Y
MVHGGYPRRDAAVRRPKSSSSAVVADRKRKWTAAAKNTSLKNQIRSTERFLHKDLPDDIRVAQEKKLEELKRQQELQNQLVVQRKLTSDDDTLDVSDDDFMSGSSSNEEADDEWTDKSAKEPASSASGRAASGMSSDEKNQR

SEQ ID NO: 2021 - protein, 320 aa, Zea mays
  VARIANT 234: note = Ancestral polymorphism is S, Derived polymorphism is N
MARAALCIALSLQLGRLDWCGARNATATSCNRFYIYAEPPRHATEQCKPSILLTHVLPPAQLAIAVRLFSSRAPSSLVCDQRRRAASMEMIDAELRLGPPGSNNSDVVVTVVPPAAARKPAAPAPASAAKRPSSSVVKSDDASGTGDHDDDAAPASKAARDTPRTQLLYRARSDQLMIGLVLVNERRRVRAVGWPPVRAYRKNAFHAAAEAARRTNNKGEELQGGGGRLYVKVSMDGAPYLRKVDLRTYGGYRELRDALDALFGCFSSSSASSSSADGGCQFAVAYEDKDGDLMLAGDVPWEMFICSCKKLRIMRGSEAR

SEQ ID NO: 2022 - protein, 357 aa, Zea mays
  VARIANT 225..357: note = Derived polymorphism lacks residues 225 to 357
  VARIANT 39..357: note = Derived polymorphism lacks residues 39 to 357
MDPVGPVAVPAIPHGSSRTSATCRACPLASEMPSWRDSQLPSSSSTSRCIRERCERLKGRPERIASVALRRESIDLVTLGDFHFGLPPSFTGPTVPAAAAGATNNCSGSIESMSGTWPTSEAVEIMVPSLRGATNNCSGSIESMSGTWPTSEAVEIMVPSLRGILLGAVHGMVEALFRRYIEQGMDEESAYKNTVESIKFCSSYKIQFILGFFSLYCLQAGYAEQYRWNSSFSVNGTLSMICLEQGPHILNIFKDYHVSKTSILNDLAFYKSRQKLMQDKSLEELFMNSLIQSLCSSVACHVFAFGESRSLSIAKKIFAGQQLFCRTSSSVLSSHAGQPLHHYIAMMDLQERNERLF

SEQ ID NO: 2023 - protein, 79 aa, Zea mays
  VARIANT 52: note = Ancestral polymorphism is S, Derived polymorphism is C
  VARIANT 26: note = Ancestral polymorphism is P, Derived polymorphism is L
MFVALLINICIISVSGTVCNSSNVSPDDSAKCSDITLDSSSFLLRNVLGNISAVVYGVALLACGISSSITGTYAGQYIM

SEQ ID NO: 2024 - protein, 100 aa, Zea mays
  VARIANT 30..100: note = Derived polymorphism lacks residues 30 to 100
  VARIANT 40..100: note = Derived polymorphism lacks residues 40 to 100
MEPMDLIRRVKEIEQEAYGEHGMATDEDPKQTVAVDLSKRLKDLRAGNDGSSQKVFFPSPLLSLLLFAIFRQNIVWIILFVLCNICGRNRLSKNGVNSLV

SEQ ID NO: 2025 - protein, 402 aa, Zea mays
  VARIANT 23: note = Ancestral polymorphism is G, Derived polymorphism is R
  VARIANT 25: note = Ancestral polymorphism is R, Derived polymorphism is G
  VARIANT 29: note = Ancestral polymorphism is R, Derived polymorphism is W
  VARIANT 35..402: note = Derived polymorphism lacks residues 35 to 402
  VARIANT 41..402: note = Derived polymorphism lacks residues 41 to 402
  VARIANT 49: note = Ancestral polymorphism is H, Derived polymorphism is L
  VARIANT 51: note = Ancestral polymorphism is H, Derived polymorphism is Y
  VARIANT 54: note = Ancestral polymorphism is C, Derived polymorphism is Y
MAATAAEEMERMVEAEWEEGKQGMRKRKRYGLVEYRALPAYLRDNEYIHRHYRCEWPLPQVLLSAFSIHNETLNVWTHLIGFFIFLALTIYTATQVPNAVDIRSLQHLPDVLRKADIHKIQAELVSCLPSLPHLSDLQKLKDELKTSWNSMEVLPSLSRWHLLELLANCLPHRFTHPNETSLSVLQSMKEDLASLIAPQLIRPIARWPFYAFLGGAMFCLLASSTCHLLSCHSRRLAYIMLRLDYAGIAALIATSFYPPVYYSFMCYPFFCNLYLSFITILGVATIAFSLLPVFQNPEFRTIRACLFFGMGASGVIPVLHKLVLFWHQPEALHTTGYEILMGLFYGLGALVYAARVPERWMPGKFDIAGHSHQLFHVLVVAGAYTHYHAGLVYLKWRDLQGC

SEQ ID NO: 2026 - protein, 105 aa, Zea mays
  VARIANT 47: note = Ancestral polymorphism is P, Derived polymorphism is L
MAAGRKSAPIGSRYARVCEELLDIGARIAVRSYSHCPQTGRMYYKPPSAPASARSTGHDGAADASPVATATRWKQQTAPEVEFRASEFILYGGGGGKKEPARCSR

SEQ ID NO: 2027 - protein, 204 aa, Zea mays
  VARIANT 147: note = Ancestral polymorphism is R, Derived polymorphism is C
MENDRRQLGQIDPRRARFPCCIVWTPIPFITWLVPFIGHIGICREDGVILDFSGPHFVSVDNFAFGAVARYIQVNCDECYKLIEPEGDATWDGALKKGTQEFQNRNYNLFTCNCHSFVANNLNRLFYSGHDEWNVVSLAAVMFLRGRWVSTASVVKTLLPFAVVLSIGTFLGGTTFLTGLLAFAAAMTVWFLVGTYCIKGLIEL

SEQ ID NO: 2028 - protein, 376 aa, Zea mays
  VARIANT 87: note = Ancestral polymorphism is P, Derived polymorphism is L
  VARIANT 101: note = Ancestral polymorphism is C, Derived polymorphism is Y
MAGTGGEGAVGKVTCAAWIRRRDDYGGPPGVSRLLVAFGRRSTASSPPLVDLLEFDAKASALASESEPLASASPARVTVGEDAADTPRAIAVHPGGRELVCATAKGCRLFNLVYKDFGVHLISRDASPLQSVGPQKCLAFSTDGAKFAVGGEDGHLRIFHWPSLITILDEPKAHKSFRDMDISLDSKFLVSSSTDGSARIWNIDEGSPLTNLTRASDEKIEYCRFSRDGAKPFLFCTLVKGHDVLTMAVDISNWKRIGYKRFSAKPISTLAISLDGKYLALGNRDGDFCAVEVKKMEVAHWSKKVHLGFPVSSIEFCPSERVVISTSHQWGAEITKLDVPPEWKVWQIWLALLSLFVSSAVLFYAFFTHARLNLRP

SEQ ID NO: 2029 - protein, 459 aa, Zea mays
  VARIANT 83: note = Ancestral polymorphism is T, Derived polymorphism is M
  VARIANT 129: note = Ancestral polymorphism is A, Derived polymorphism is V
  VARIANT 143: note = Ancestral polymorphism is S, Derived polymorphism is C
  VARIANT 171..459: note = Derived polymorphism lacks residues 171 to 459
  VARIANT 176: note = Ancestral polymorphism is A, Derived polymorphism is T
  VARIANT 184: note = Ancestral polymorphism is A, Derived polymorphism is S
  VARIANT 185: note = Ancestral polymorphism is T, Derived polymorphism is A
  VARIANT 202: note = Ancestral polymorphism is L, Derived polymorphism is V
MPQYQELPCGGQVLDIDTALKDGILGGALEPEDAAAGDAGKQPVELRKMMDELDAAGDGGGDEAVPAVFICPISLEPMVDPVTLCTGQTYERANISRWLALGHRTCPTTMQELWDDALTPNATLRQLIAAWFSRRYTRFKKRSADFHGRAADLVHGLRGTAMPRRQALKGQARVAALRELRALATAHQSVTKAIAEAGGVVLLTSLLGPFTSHAVGTEAVAILVSGVPLDADTKAALMQPAKVSLVVDMLNEGAADTKINCVRLIRILMDERGFRPETVASLSLLVGVMRLIRDKRHPDGVVAGLELLNSICAVHRPARSMVVSIGAVPQLVELLPELATECVEPALDILDALSAVPEGRTALKDCPRTIPNAVRVLMRVSEACTRRALSMLWTVCRMAPEECAPAAVEAGLAAKLLLVIQSGCAPELKQKASELLKLCRLNCTDTLFISKCKLTRTIQ

SEQ ID NO: 2030 - protein, 702 aa, Zea mays
  VARIANT 156: note = Ancestral polymorphism is V, Derived polymorphism is L
  VARIANT 227..702: note = Derived polymorphism lacks residues 227 to 702
MIYENIHLIWCLHASYLLCTVGSVYIKSKEAPAKDVLKDLVEMCRGIQHPLRGLFLRSYLSQISRDKLPDIGSEYEGDAETINDAVEFVLQNFIEMNKLWVRMQHLGPAREKEKRGKERNELRDLVGKNLHVLSQIEGVDLDMYKETVLPRILEQVVNCKDDLAQFYLMDCIIQVFPDEYHLQTLETLLNAFPQLQPSVDIKTVLSQLMDRLSNYAASSPEVLPEFLQVEAFAKFSNAIGKVIEAQPDMPVVGAVTLYVSLLTFTLRVHPDRLDYVDQVLGACVKKLSGKAKLEDSRATKQIVALLSAPLEKYSNIVTALELSNYPRVMDYLDNATTKVMAVVIIQSIMKNTTCISTSDKIEALFDLIKGLIKDMDGAQDDELDEEDFKEEQNSVARLIHMLHNDEPEEMLKILCTVQKHILQGGPKRLTFTVPSLVFSALKLVRRLQSQDGDVTGEDVPATPKKIFQILHQTIDALSCVPSPELALRLYLHCAEAANDCDLEPVAYEFFTQAFILYEEEIADSKAQITAIHLIIGTLQRMNIFGVENRDTLTHKTTGYSAKLLKKPDQCRAVYACSHLFWADDQDGIMDGERVLLCLKRALRIANAAQQMASATRGSSGSVTLFIEILNKYLYFFEKGIPQITNTVIQDLIELIRTEKQSDNSVADPSTEAFFSSTLRYIEFQKQKGGSIGEKYEQIKTSS

SEQ ID NO: 2031 - protein, 375 aa, Zea mays
  VARIANT 125..375: note = Derived polymorphism lacks residues 125 to 375
  VARIANT 142..375: note = Derived polymorphism lacks residues 142 to 375
MELFARAKVVRLKSHHDKFLYADEDEAHVTQERDGSSANARWAVEPAPHNPGAIRLRSRYGHYLTASGEPFLLGMTGRKVTQTAPAAPRPANASVDWEPVRDGFQARLRTRAGHFLRANGGLPPWRNSVTHDVPHRTATQDWVLWDVEVVQLLTPAPPDRAGSAPLAKLPDSPPAPELANPPQPHHRPSKSYAAPPPPPTLEPEAPPPRLSKLESSDSFSAPLHKVEGRAIHYHIADDLGNVQDGTVGHSFTFNGSNLEELAHKLQEETGLDNIIICTRSPINGKLTPLRLQLPPNNAAMHIVLVQESSKGAILKGTWLDHLHGRTVHKSQTFGEDTGGLEFWWIVLVRVARSPYIIGSGHAGCAVTLGVRSNLA

SEQ ID NO: 2032 - protein, 435 aa, Zea mays
  VARIANT 192: note = Ancestral polymorphism is A, Derived polymorphism is T
  VARIANT 247: note = Ancestral polymorphism is L, Derived polymorphism is H
MRPHLLRLLSLLLLVAACLPPPAACRHIHPPPRQQQQHGGTNVLTVALAAAASILVLLLLYLCAAIAVRRFRSRGAVAREPAAASRAAAFLRLHGLHHHRPSFTYEQLRAATAGFDAARKLGDGGFGTVFLAYLPPSARPAAVKRLHVPPSPSPSPSFPSASATITKSFCNEVLILSALRHPHLVRLHGFCADPRALLLVYDFVPNGTLSQHLHRRRAGPGVAGVPLPPPLPWRTRVAMAAQIASALEYLHFGVKPAVVHRDVTSSNIFVEADMRARLGDFGLSRLLAPPDACATGGARDLVCCTAPQGTPGYLDPDYHRSFQLTEKSDVYSFGVVVLELVTGLRPVDVGRERRDVTLADWVVAKIQVGELREVVDAPVLGEGPAVMASVEAVAELAFRCVAPDKDDRPDAREVVAELARIQTMLPELPGRIAQN

SEQ ID NO: 2033 - protein, 515 aa, Zea mays
  VARIANT 69: note = Ancestral polymorphism is L, Derived polymorphism is P
MHPLTLSSTALLRLIKSLSPAAGPRAHLAAAEIHGLLFKEGLLHAGAHLPTALLSAYAALGRPRHARDLFDEMPDPGLVSRTAMARAHAASGQAAQALAVFRDMIADGVLPDNVALAVALAACHTTASLPAAGMAAARRPGKMVHAIIVTSGIVPDVFVSTELIRVYGEYGELALSRRLFDAMPVRSTVSWNAMVHQYIRHSNVGDAYELFLAMPRRDVVSWNTMIAGYSLVGRFMEALELSRQMISPSSCPVYPNGPTMSTVLAACAGAGCLETGIWVHAFVDRNRMNDDGSLDRSLIDMYVKCGSIEKALQVFEKAPEARDLYSWTTMICGLAMHGRAADALKMFGMMQDNGIHPDDVTLVGVLNACAHCGLVDEGLRHFYSLEKYAITPKIEHYGCVIDLLGRVGRLQEAYNIIRTMRMKPNAVIWGAFLNACKVHSNVELGEIAAAELTRLIILELVLTIEASGGIAPIVSVLQLWMSVDKRCIREKHFKVNLLSKLEMLDFVFWQVAHEW

SEQ ID NO: 2034 - protein, 672 aa, Zea mays
  VARIANT 28: note = Ancestral polymorphism is W, Derived polymorphism is R
MAAAAALLLGEDGRGYELARRLEACGAWREWLGDDSAHAALAQHLTSPATWDAFLYPAASPSPPPRPLLLLQLRVRALLFDKASAALLLPPRGAAPVSLHSINANYLRLHGDDIYFSLEDEQEDNTQHQVHSRTAFSPSRDGSMLSQRHNRYEELPDTWYKPYADKFRIWHSKLHSGDKEIPKRTPEGMSDYLKICSVHKRKRAVFMDDPSISAPILENGPSLHSKNAGEFSNSTDELIPEIRFPSDCVPESAIPKTSGISRANKIEVHGVLDNLPAPSSRNTAMLERFGMVPEYYKTGNKYRGKDGSRVEGKSLSQEQALLMTKQLVARYLANSGFESGTVVSIDVLSEIIIKHICKLGRNLKLLTDSYRKQFSSIELLKMFLQTVGYSNIGSLMEITKMGNRVANYPIHQDAQVLQTQNAISIHAQQLPRQFPPQMLQNLTPQQQQQLQNLTPQQQQLLQQQQWLRRNQLCSPRGPLTMADKNQPMVNVKVENTMDSQIDVPYGSFTRQQQFNIRQQQQLLHQQQQQLQQQQLQQQQQQLQQQQHQQQLNQQQQQLQQQQQQLQQQQQQFTQQQQLQQQQQQLQQINQQQHLQQQQQQQLNQQQLQQQQQQMTMSGNQNAQLAQQFKQVSSMSAYGMRMPPVKVEAFHELVSGDSSLKHDNDPNKLTSPK

SEQ ID NO: 2035 - protein, 184 aa, Zea mays
  VARIANT 146: note = Ancestral polymorphism is M, Derived polymorphism is T
  VARIANT 133: note = Ancestral polymorphism is A, Derived polymorphism is V
MDHPKDVDYLNRPIENYIPMQIIFGSGVAICRFAMGSNEPLGKPTEVVDILDDGIEVTSEFVDCSNLTGKGKTVDKGTPSNSNDSKPNLGNRKWFMTDEDVAMFNGIKEVVSDVDAAVHESIHAEAAPGIYNAVINGPGFSRESLTYALNHMMEHKATSLVFMDMTLDDRDLWLKTFLAKHYHN

SEQ ID NO: 2036 - protein, 285 aa, Zea mays
  VARIANT 68: note = Ancestral polymorphism is L, Derived polymorphism is P
MGQQSLIYAFVARGTVILAEYTEFTGNFTTIASQCLMKLPASNNKFTYNCDGHTFNYLVEDGFSMAMPDCGHLCVDLADLVDMRLAYCVVAVESVGQQIPIAFMDRVKEDFTKRYGGGKAATAAANSLNREFGSKLKEHMQYCVDHPEEVSKLAKVKAQVSEVKGVMMENIEKVLDRGEKIELLVDKTENLRSQEGRLVSLDVRISVGTRFQTAGNKCQEKDVVTEHENQAHRPGNNHRTHSDHYPLCLSWFQMPLSTDQNTDTFNCTYYTAAWSKKKYDLLLFR

SEQ ID NO: 2037 - protein, 165 aa, Zea mays
  VARIANT 17: note = Ancestral polymorphism is V, Derived polymorphism is M
MAIRGSIGFAVLCVALMLHAAATAAAARTVPMPGASSTSTGSTASLPAAAGTKNDDSGSGGAGVADKKNLFVGVGGMGDLPGFPAVGGGYGGGFGNNGGGVFSGVTGPLGGVGGGVGGVGPLGGVGGFGPLGGGGGGIPFGGFAGGGTPFGGYGGGGAGAGGVTP

SEQ ID NO: 2038 - protein, 148 aa, Zea mays
  VARIANT 55: note = Ancestral polymorphism is G, Derived polymorphism is R
  VARIANT 130: note = Ancestral polymorphism is P, Derived polymorphism is L
MRRSAVSVRRAAPAALAILFGALLLVSFVVDGVRKAAPPAAIGGRRMMLGGGAGGLRTLEDFKAHDPFQDSKRRVPNGPDPIHNSASVVIILSCHMLPFTMFCWIFSRRIAHHKFAKGVMGLDSEKEAPLAHAILLLAGALSSFGFRI

SEQ ID NO: 2039 - protein, 531 aa, Zea mays
  VARIANT 34..531: note = Derived polymorphism lacks residues 34 to 531
  VARIANT 210: note = Ancestral polymorphism is A, Derived polymorphism is T
  VARIANT 264: note = Ancestral polymorphism is R, Derived polymorphism is Q
  VARIANT 362: note = Ancestral polymorphism is P, Derived polymorphism is S
  VARIANT 371: note = Ancestral polymorphism is S, Derived polymorphism is N
  VARIANT 409: note = Ancestral polymorphism is P, Derived polymorphism is S
  VARIANT 427..531: note = Derived polymorphism lacks residues 427 to 531
  VARIANT 452..531: note = Derived polymorphism lacks residues 452 to 531
  VARIANT 500..531: note = Ancestral polymorphism lacks residues 500 to 531
MSQRGETGSGDRRPHRRRPRDQGVHRCHCRHPPRPHAWECASRRRHAIRFNRLRQPLHAAGGGEMKWGLAAVMASTTTVARDFSGDKCRRSEETAGYKDLQLQLPSKTDLQPPATLMAVMPSRETDNIAEHGHNAAKHVASLISVDTPKVGPDIQQHTTKKSSIITDKKAMKKLFVSQLECKDTPDEPRSARRVNPRVAEKEIVVVLSFASVALVESSVAVVDHLTFLVSHLPPLQNLTAASSSSLQDPIMEEGARTEEVPVQRCALPNAPDTVFISINGCIQHWFKALLLALQKIKVSQEQKKICIATTEPLLMFALSCGMYSSPKVSCQSILGFDFSDDNEVLHNRLPGVDTDRQESDEPPSVYIFINSSMCHLASIEKYVENFATFVPVLLFNLELDTFQYVSYIPNHCLFMRQWLMQFTIQFYRGLMGFPQKVCTTGFFLSSSQYFISDDMTITRSYHKLLEYICSTFFCSLVCLWGKDTNFVELVGFAMQFIFIYTKELLRVIGLQEEGSSLEFLRRGYKNATWWE

SEQ ID NO: 2040 - protein, 480 aa, Zea mays
  VARIANT 213: note = Ancestral polymorphism is M, Derived polymorphism is T
  VARIANT 224: note = Ancestral polymorphism is P, Derived polymorphism is L
  VARIANT 257: note = Ancestral polymorphism is Y, Derived polymorphism is D
MKLRLRSMQARGGSAAVETHRVDLPPTATLADVKTLLASKLSAAQPVPAESVRLSLNRSEELVSPDPAATLPSLGLASGDLVFFTLSPLTALAPPAQALPRNPSPSSGAAASIAEAADRGKGSKQSGTGDFSSSSLAQAVVVSPSFPVASGTRDVVMEEEAVDATKGWSSFVLRDLKREMDNVGAAEGTAAGRLVAALHAALLDAGFLTAKLTGSHLSLPQGWPSGALKPLTIKYTIPELSSMVSVTEEGKVVVLNYSLMANFVMVYGYVPGAQSEVCRLCLELPGLEPLLYLDGDQLNGVHEKGVHDLWRVLKDEICLPLMISLCQLNGLRLPPCLMALPADLKTKVLGFLPGVDLAKVECTCKEMMNLASDDSIWKKLVSKFENYGEGSRLAGKNAKAIFVEAWQANKRRQKRPNPTFWNYGWGNSPYSRPLRLPLIGGDSDRLPFIGNHGSVGRHFGNQRRNISPNCILDGHRHNFL

SEQ ID NO: 2041 - protein, 656 aa, Zea mays
  VARIANT 527: note = Ancestral polymorphism is G, Derived polymorphism is S
MRRPSGAGAPCRSRAIQVLVAVSFAYALAVLLLESPFVSTSLLGAGASAAASRKLHLAGAWEGVRRAVPARPAKHPHRETLSSDAGRGRARRLAGIVSGLELCHLNSTRSGSLRKVAAEAAESGARVFSDLEALATALASSRDSSGEEEKSKCPHSIVLSGDEFRERGRAVELPCGLTLGSYITVVATPHEAHPERDPKITLLREGEEPIMVSQFMMELQGLKTVDGEDPPRILHFNPRLRGDWSGKPVIEQNTCYRMQWGTPLRCEGWRSRADEETVDGLVKCEKWIRDDEGRSEESKTSWWLNRLIGRTKTVSVDWSYPFVEDRLFVLTLTAGFEGYHVNVDGRHVTSFPYRTGFVLEDATGLSLDGDLDVQSVFAGTLPTTHPSFSPQKHLEMLPSWQAPPLPDEPVEIFIGILSAGNHFAERMAVRKTWMSAAQKLPNVVARFFVALHGRNEINAELKKEAEFFGDIVIVPFMDSYDLVVLKTIAICEYGVHVVYARYIMKCDDDTFVRLDSVIAEVKKIQNGESLYIGNMNYRHKPLRDGKWAVTYEEWPEEDYPIYANGPGYVISSDIADSILSEFLNLKLRLFKMEDVSMGMWVERFNSTRLVKYVHSVKFCQFGCIDDYYTAHYQSPRQMLCLWDKLQAGKAQCCNMR

SEQ ID NO: 2042 - protein, 335 aa, Zea mays
  VARIANT 103: note = Ancestral polymorphism is S, Derived polymorphism is C
  VARIANT 104: note = Ancestral polymorphism is H, Derived polymorphism is Y
  VARIANT 322: note = Ancestral polymorphism is L, Derived polymorphism is F
MMYSPPRTDPDREEEQCFSIGSNLLTSLDHYHTMDFDEPVVSPMTNAGMQEGVQLYSSTGDAQLNRNMNTGKCLEDGKRKGSGEDSSSLRSLVRKLEASIAFSHRITLPLFHPTVHVNVLLQGETSALQREVSMECADEKAGDARAKREDYVHVRAKRGQATNSHSLAERFRREKINERMKLLQDLVPGCNKITGKAMMLDEIINYVQSLQRQIEFLSMKLSAIGPGLNCDLDLQDILCTQDASSAFPGYNLQTSNVHINLYRASEEGFSHRNRIIPSPANVHVTRNAQLSAFPQRGVIWNEELCSIASDRNAAVLNFVRFFKSHFDIADSMKVE

SEQ ID NO: 2043 - protein, 202 aa, Zea mays
  VARIANT 66: note = Ancestral polymorphism is D, Derived polymorphism is H
  VARIANT 110: note = Ancestral polymorphism is I, Derived polymorphism is S
  VARIANT 117: note = Ancestral polymorphism is N, Derived polymorphism is S
MPSPPRPLASLCRARLVLFLVPALLLLLPSTARSAGDESARALSVGEELVAETMPLRHGRRVYRIHGLRPSAWYEVKISYPASIPSSFSIRLVDDWGSKNRRLLNTEKIIFKAESSSPVYVLVTVEPEGVVAKPNVPERELALFNIVCDELMLGIPHFAWWAGIAALLCIVLAALAPLVLPLHKLLSCEGTELSESDAAKMS

SEQ ID NO: 2044 - protein, 202 aa, Zea mays
  VARIANT 24: note = Ancestral polymorphism is V, Derived polymorphism is A
  VARIANT 27: note = Ancestral polymorphism is A, Derived polymorphism is V
MAASFARGGVAAAAATALVMVAAVLAVSWAGVARADFAQDRAMCADRLMGLATCLTFVQDKATARAPTPDCCAGLKQVVAASKLCMCVLVKDRDEPALGFKINVTRAMDLPSLCSNPATFSDCPKILGMSPDAPEAEIFKEYAKKHESNNGTTIPAAATGAAAATGKSTSAAPTADGAGRQPGTVFFYVVSALLVSVAVLLC

SEQ ID NO: 2045 - protein, 425 aa, Zea mays
  VARIANT 59: note = Ancestral polymorphism is R, Derived polymorphism is C
  VARIANT 229..425: note = Derived polymorphism lacks residues 229 to 425
MGALSRPEEVLALVKLRVAAGQIKRQIPPEEHWAFAYSMLQKVSRSFALVIQQLGPELRNAVCIFYLVLRALDTVEDDTSIPTEVKVPILQEFYRHVYNRDWHYSCGTNHYKVLMDKFHLVSTAFLELGQGYQKAIEEITRRMGAGMAKFICKEVETVDDYDEYCHYVAGLVGYGLSRLFYAAGTEDLAPDSLSNSMGLFLQKTNIIRDYLEDINEIPKSRMFWPREIWSKYADKLEDFKYEENTEKAVQCLNDIVTNALIHAEECLQYMSALKNHAIFHFCAIPQIMAIGTCALCYNNVHVFRGVVKMRRGLTARIIDETNSMSDVYTAFYEFSSLIESKIDDNDPNAALTRRHVNSIKQTCKSSGLVKRRGYHLDTSPYRPMLVNHDCPPAGGYPFRGTVYQVTCSWPFSPMETRQTLPICPQ

SEQ ID NO: 2046 - protein, 307 aa, Zea mays
  VARIANT 54: note = Ancestral polymorphism is G, Derived polymorphism is D
  VARIANT 103: note = Ancestral polymorphism is V, Derived polymorphism is D
  VARIANT 210: note = Ancestral polymorphism is S, Derived polymorphism is C
MSSPHGGLDDQIERLMQCKPLAEPEVRALCEKAKEILMEESNVQPVKSPVTICGDIHGQFHDLAELFRIGGKCPDTNYLFMGDYVDRGYYSVETVTLLVSLKVRYPQRITILRGNHESRQITQVYGFYDECLRKYGNANVWKTFTDLFDYFPLTALVESEIFCLHGGLSPSIETLDNIRNFDRVQEVPHEGPMCDLLWSDPDDRCGWGISPRGAGYTFGQDISEQFNHTNSLRLIARAHQLVMEGFNWAHEQKVVTIFSAPNYCYRCGNMASILEVDDCREHTFIQFEPAPRRGEPDVTRRTPDYFL

SEQ ID NO: 2047 - protein, 107 aa, Zea mays
  VARIANT 43: note = Ancestral polymorphism is M, Derived polymorphism is I
  VARIANT 31: note = Ancestral polymorphism is I, Derived polymorphism is V
MATALKSFLNSPVGPKTTHFWGPVANWGFVIAGLVDMNKPPEMISGNMTAAMCVYSGLFMRFAWMVQPRNYLLLACHASNESVQLYQLSRWARSQGYLEKKEPEAKQ

SEQ ID NO: 2048 - protein, 136 aa, Zea mays
  VARIANT 80: note = Ancestral polymorphism is P, Derived polymorphism is A
  VARIANT 31: note = Ancestral polymorphism is S, Derived polymorphism is C
MYVCHHPIPIPPITLSLYSNHSAESYLTQPSSSSPGSPPAMSAAFKAFLNSPVGPKTTHFWGPVSNWGIILASVADTKKPPEMISGNMTGVLCVYSALFVRFAWMVRPRNYFLMVTHSCNECVQLYQLSRWARAQG

SEQ ID NO: 2049 - protein, 173 aa, Zea mays
  VARIANT 134: note = Ancestral polymorphism is D, Derived polymorphism is E
  VARIANT 88..173: note = Ancestral polymorphism lacks residues 88 to 173
  VARIANT 60: note = Ancestral polymorphism is G, Derived polymorphism is V
  VARIANT 11: note = Ancestral polymorphism is A, Derived polymorphism is V
MQILGRKVLEVSRRLPLFYAAHSGRAHAIATLAGAAARWAPPATSGSLATAPWAATQRRGAKMLGSDGIAASLLRYSSSYISIEFMPWVEIIIDYYSFVSLANLKIQGHIYQVIKAQHSHQGRGGATIQVELRDVDTGNKITERFRTDEALESLKRLSNLKFRRNCLAKLLHT

SEQ ID NO: 2050 - protein, 299 aa, Zea mays
  VARIANT 33: note = Ancestral polymorphism is R, Derived polymorphism is Q
  VARIANT 75: note = Ancestral polymorphism is G, Derived polymorphism is R
  VARIANT 95: note = Ancestral polymorphism is P, Derived polymorphism is L
  VARIANT 99: note = Ancestral polymorphism is T, Derived polymorphism is I
  VARIANT 102: note = Ancestral polymorphism is T, Derived polymorphism is I
  VARIANT 284..299: note = Derived polymorphism lacks residues 284 to 299
MMRCAAAALAVALIAAVAAATAAGSPAAGTCARRGAPPFLDAVGSRCPFVRIDPSPPLEVRGETVDTELNLRRRGASYSILFYAAWCPFSSKLRPIFGTLSTMYPQIHHFTVEESSATPSLFSRYGVRGFPAILLVNETTMVRYRGSKDLNSLVDFYKETTGLDPIAYIDVVEQESTGSLSSVMPWDRSIREMAKDEMYLLVAVLFIIVKVVAHFIPVVMSHLRAFLVVRVQNLNLGIRRGSNQLLERALNVLDVRRLWSKLRLSNKATDLRKGANNARAWASSFPSVSLGEPSSSRQA

SEQ ID NO: 2051 - protein, 240 aa, Zea mays
  VARIANT 8: note = Ancestral polymorphism is D, Derived polymorphism is G
MDTISLDDWEVLPGHRSSFLMDAAECRHGVGGCVKDQLWLGAELVVIDMDHFGPTSSSSSHSHPPPCDHCVLDEEAKQKPLLLPPSEDAYACECDGDRRIAIDAVPDEPERADLVSEATEVLIYEADEEEMAKSVEEADQDDDALLVGAAAPDGGGVSLSQCTPEEEEEEGVGKAGFGVGSLRLRVNGAGGALCSFGVAVAAATFCFCVFLIGGGGGKQQQQQQLLRKGQDPAPADVCPR

SEQ ID NO: 2052 - protein, 294 aa, Zea mays
  VARIANT 14..294: note = Derived polymorphism lacks residues 14 to 294
  VARIANT 44: note = Ancestral polymorphism is S, Derived polymorphism is L
  VARIANT 61: note = Ancestral polymorphism is Q, Derived polymorphism is L
  VARIANT 96: note = Ancestral polymorphism is D, Derived polymorphism is V
  VARIANT 152..294: note = Derived polymorphism lacks residues 152 to 294
  VARIANT 189: note = Ancestral polymorphism is A, Derived polymorphism is D
  VARIANT 209: note = Ancestral polymorphism is K, Derived polymorphism is N
  VARIANT 249: note = Ancestral polymorphism is A, Derived polymorphism is V
MRDFPSCFGESGVQIADASSSSSSSAGKGAAQNLVTCLYQTHFSGRPCVISLTWSKSLMGQGLSVGVDDLSSGHCLCKADIKPWLFSKKKGSRSLDVEDGKVEIFWDLSGARFGAGPEPVEGFYVAVVFDLELALLLGDMKKDAYRKTGASQSTLNAAAFVARREHIYGKKIYSAKAQFCDNGQFHDIAIECDTVGFKDPCLEIRVDKKPVMQVKRLAWKFRGNQAILVDGLPVEVFWDVHSWLFGSTASNAVFMFQTRQAPEKSLPWSYSQNFRESQLQGLGFSLILHAWKVE

SEQ ID NO: 2053 - protein, 149 aa, Zea mays
  VARIANT 10..149: note = Derived polymorphism lacks residues 10 to 149
  VARIANT 11: note = Ancestral polymorphism is R, Derived polymorphism is H
MARRRRGSAWRATRRRSRLTASSRSSAARHSTSSRASPPSSASPSSPGPHTPRSASTAAASSSSAPRSLRRTLSLTPPRLPLLRRMRKRTTTMGTASTNTSIEVCRPKRKNGDNFLRTYLFMCFCYKVLGHTFVGAQCDPDILCVSNWS

SEQ ID NO: 2054 - protein, 270 aa, Zea mays
  VARIANT 3: note = Ancestral polymorphism is F, Derived polymorphism is S
  VARIANT 70: note = Ancestral polymorphism is A, Derived polymorphism is V
MLSQLLFCLPGVFESVASVVAMSMFNRIFGKPKEQANSNALATLDKLNEVTFQLGTCNVYAIVNQKVLKVHFVYIQTLDMLEKKEKVLEKKANAELERAKEFSKAKNKRAAIQSLKRKKLYEQQIEQLGNFQLRIHDQMIMLEAAKATTETVDALRTGAAAMKAMQKATNIDDVDKTMDEINEQTENMKQIQDALSAPLGAFADFDEDELEAELEELEGAELESQLLEPVAAPPVHPVHVPANKQPARPAPQKVTAEDDELAALQAEMAL

SEQ ID NO: 2055 - protein, 418 aa, Zea mays
  VARIANT 192: note = Ancestral polymorphism is E, Derived polymorphism is A
MDAARWVVCLLVTVICLSCAAAATAAVRSPAARLHRHLKRLNKPAVKSIESPDGDMIDCVHISHQPAFDHPYLKNHTIQLTPLYGSQMRPNYHPEGLYEESKASSSGGERPMAQLWHQNGRCPEGTVPIRRTRKDDLLRASSMRRYGRKRRAAANPMSVSPTMLNEGGHQHAIAYVQGDKYYGAKATINVWAPKIEQPNEFSLSQLWILGGSFGEDLNSIEAGWQVSPDLYGDNNTRLFTYWTSDAYQATGCYNMLCSGFIQINNQIAMGASIFPTSSYSGSQYDISILIWKDPKEGNWWMQFGKDYVLGYWPSFLFSYLADSASMVEWGGEVVNSQADGVHTSTQMGSGHFPEEGFGRASYFKGVQVVDSSNNLGAPRGGLGTFTEQSSCYDVQSGSNADWGTYFYYGGPGRSSSCQ

SEQ ID NO: 2056 - protein, 118 aa, Zea mays
  VARIANT 11: note = Ancestral polymorphism is Q, Derived polymorphism is K
  VARIANT 14: note = Ancestral polymorphism is P, Derived polymorphism is L
  VARIANT 17: note = Ancestral polymorphism is A, Derived polymorphism is S
  VARIANT 24: note = Ancestral polymorphism is G, Derived polymorphism is E
  VARIANT 42: note = Ancestral polymorphism is R, Derived polymorphism is T
  VARIANT 50: note = Ancestral polymorphism is P, Derived polymorphism is L
  VARIANT 51: note = Ancestral polymorphism is A, Derived polymorphism is V
  VARIANT 54: note = Ancestral polymorphism is A, Derived polymorphism is T
  VARIANT 55: note = Ancestral polymorphism is A, Derived polymorphism is V
  VARIANT 57: note = Ancestral polymorphism is V, Derived polymorphism is I
  VARIANT 59: note = Ancestral polymorphism is R, Derived polymorphism is H
  VARIANT 60: note = Ancestral polymorphism is L, Derived polymorphism is P
  VARIANT 61: note = Ancestral polymorphism is A, Derived polymorphism is V
  VARIANT 62: note = Ancestral polymorphism is A, Derived polymorphism is T
  VARIANT 65: note = Ancestral polymorphism is D, Derived polymorphism is N
  VARIANT 69: note = Ancestral polymorphism is A, Derived polymorphism is V
  VARIANT 72: note = Ancestral polymorphism is A, Derived polymorphism is V
  VARIANT 73: note = Ancestral polymorphism is S, Derived polymorphism is A
  VARIANT 76: note = Ancestral polymorphism is R, Derived polymorphism is W
  VARIANT 81: note = Ancestral polymorphism is R, Derived polymorphism is H
  VARIANT 85: note = Ancestral polymorphism is L, Derived polymorphism is H
  VARIANT 87: note = Ancestral polymorphism is E, Derived polymorphism is K
  VARIANT 89: note = Ancestral polymorphism is A, Derived polymorphism is V
MPGADVGADEQQEPAAARAEEMPEPAPAPAAPPPLTIFYGGTVVVFEDFPAEKTAEVMRLAAGDDLPIARKASLPWFLAKRKDRLVERAPYARPSSPAKEPEKKTVKPASASASCSTK

SEQ ID NO: 2057 - protein, 315 aa, Zea mays
  VARIANT 57: note = Ancestral polymorphism is L, Derived polymorphism is M
MAYDPLRTHLERRAAEQLDIFKEMVSLRVFERIFSELLYCEHWTTHYVFLQDYKFILFFRLFTHNLHIPKLMFFKFEMMMCLCEVNADNNTIGCLRRPRSKWSSTSSTEILGASTAPLFSSSRDNGGPAFETDFADQLKNFSKMGHGVSSGGVLLKSSGWHTPVVPQIRTNASIGTVVDNNICHPTEFDFFLCIHAGAKDRLQERLRKSKCLGLEEAAKNKGFDLGNVDAMQTDMEVVFEVLKSLEDVEELDPEWLHDPHKLHTCVEKDTSLSDSCGVDPFGLVVMAPEGMQSRSRSPYSSGSDQDLSFSIYASL

SEQ ID NO: 2058 - protein, 213 aa, Zea mays
  VARIANT 150: note = Ancestral polymorphism is D, Derived polymorphism is G
  VARIANT 160..213: note = Derived polymorphism lacks residues 160 to 213
  VARIANT 190..213: note = Derived polymorphism lacks residues 190 to 213
MAMAMGHRQSGSCAKVRPGGIGIGIGMGMVSKQHQRTPPPSSYCLHLHHILYLRPVASSHHLTRHSVDVTKDDKPLEPLPPAAAETESTQQQEDEDGGPKLDPRRFEEKFAVLNTGVHECQSCGYRYDQAAGDPSYPVPPGLPFAQLPDDWRCPTCGAAQSFFESKSVEIAGFAQNQQFGLGGNSLTSGQKGLLIYGSLLIGFLFFISGYFLQ

SEQ ID NO: 2059 - protein, 282 aa, Zea mays
  VARIANT 2: note = Ancestral polymorphism is A, Derived polymorphism is V
  VARIANT 113: note = Ancestral polymorphism is C, Derived polymorphism is Y
  VARIANT 119..282: note = Derived polymorphism lacks residues 119 to 282
MALAYAAARLVHPCIGMGMVSKQHPRTPPSSSCCLHLHHILYLRPVVSSHHLARHSVDVTKNDKPLEPPPPPAAGTESTHQQEDEDGGPKLDLMRFEEKFAVLNTGVHECRSCGYRYDQAAGDPSYPVPPGLPFAQLPDDWWCPTCGATQSSFESKSVEIVGDEDGGPKLDPRRFEEKFAVLKSGVHECRSCGYRYDQAAGDPSYPVPPGLPFAQLPDDWRCPTCGAAQSFFESKSVEIVGFAQNQQFGLGGNSLTSGQKGLLIYGSLLIGFLFFISGYFLQ

SEQ ID NO: 2060 - protein, 135 aa, Zea mays
  VARIANT 97: note = Ancestral polymorphism is C, Derived polymorphism is Y
  VARIANT 125: note = Ancestral polymorphism is W, Derived polymorphism is C
MGMVSKQHPRTLPPSSCCLHLHHILYLRPIASSHHLARHSVDVTKDDKPLEPPPPAAAETESTQQQEDEDGGPKLDPRRFEEKFVMLNTGVHECRSCGYRYDQEAGDPSYLVPPGLPFAQLPDDWLCPTCGTAQS

SEQ ID NO: 2061 - protein, 161 aa, Zea mays
  VARIANT 24: note = Ancestral polymorphism is K, Derived polymorphism is M
MESPPARAEFTYPPGIHNVLEVKKADYDSCTNSTPIATHSSGDDKIVIKSPGHRFFICGVPGHCAAGQKLNVRVLKTRSSDAPSPAPSARSAAGSAAATPSPTTETTGASSASGGSSTPDATTAPAPNANGAGVGAAGHQNVVVVVVAMAVAALASMTMLH

SEQ ID NO: 2062 - protein, 436 aa, Zea mays
  VARIANT 16: note = Ancestral polymorphism is S, Derived polymorphism is F
MKLVYMVTLLPLLFMSGVLEAAGAGNDSSADGTNGNLHSSGTSRPAAAPRGRSLQASQSSVYSVDRYGARGDGRNDDTRALEMAWKAACASPRPAVVLVPDGRRYLLKLLTLRGPCKSSVTLTVKGTLVASPNRADWSDNDRRHWIVFRSIDKLTVNGGGAIDGNGEKWWPHSCKINKALPCKEAPTALSFHYCVDLKVEDLKIVNSQQIHMSVEDSANALLARLSITAPGTSPNTDGIHITRSKDVRVTDCKIKTGDDCMSIENGTHNLHVSKVNCGPGHGISIGSLGDDNSRAEVSGITIDSVQLHGTTNGARIKTYQGGSGYAKDITFQNMVMYDVKNPIIIDQNYCDKAKPCGEQESAVQVSGVVFKNIRGTTSTKDAIKMNCSENVPCQGITLQNIDLKMQDGKGNTRSTCQNAKWTEFGTVRPQPCTAIK

SEQ ID NO: 2063 - protein, 441 aa, Zea mays
  VARIANT 1: note = Ancestral polymorphism is M, Derived polymorphism is I
  VARIANT 23: note = Ancestral polymorphism is G, Derived polymorphism is C
  VARIANT 61: note = Ancestral polymorphism is S, Derived polymorphism is L
  VARIANT 87: note = Ancestral polymorphism is A, Derived polymorphism is T
MASSSGMKLVYMAPLLPLLFMSGVLEAAGAGSSADGTNGNLHGSVTSRPAAAPRGRSLPESQSVFSLDRYGARGDGRNDDTRALEMAWKAACASPRPAVVLVPAGRRYLLKLLTLRGPCKSSVTLTVKGTLVASPNRADWSDSDRRHWIVFRSIDELTVNGGGAIDGNGEKWWPHSCKINKALPCKEAPTALSFHYCVGLKVEDLKIMNSQQIHMSVEDSANVLLARLSITAPGTSPNTDGIHITRSKDVRVTDCKIKTGDDCMSIENGTHNLHVSKVTCGPGHGISIGSLGDDNSRAEVSGITIDSVQLHGTTNGARIKTYQGGSGYAKDITFQNMVMYDVKNPIIIDQNYCDRAKPCGEQESAVQVSGVVFKNIRGTTSTKDAIKMNCSENVPCQGITLQNIDLEMQDGKGSTRSTCRNAKWREFGTVHPQPCTATDTE

SEQ ID NO: 2064 - protein, 1076 aa, Zea mays
  VARIANT 923..1076: note = Derived polymorphism lacks residues 923 to 1076
  VARIANT 893..1076: note = Derived polymorphism lacks residues 893 to 1076
  VARIANT 865..1076: note = Derived polymorphism lacks residues 865 to 1076
  VARIANT 788..1076: note = Derived polymorphism lacks residues 788 to 1076
  VARIANT 593..1076: note = Derived polymorphism lacks residues 593 to 1076
MDGGDATNSGKHVAGQVCQICGDGVGTAADGDLFTACDVCGFPVCRPCYEYERKDGTQACPQCKTKYKRHKGSPPVHGEENEDVDADDVSDYNYQASGNQDQKQKIAERMLTWRTNSRGSDIGLAKYDSGEIGHGKYDSGEIPRGYIPSLTHSQISGEIPGASPDHMMSPVGNIGRRGHQFPYVNHSPNPSREFSGSLGNVAWKERVDGWKMKDKGAIPMTNGTSIAPSEGRGVADIDASTDYNMEDALLNDETRQPLSRKVPIPSSRINPYRMVIVLRLAVLCIFLRYRITHPVNNAYPLWLLSVICEIWFALSWILDQFPKWSPINRETYLDRLALRYDREGEPSQLAPVDIFVSTVDPMKEPPLVTANTVLSILAVDYPVDKVSCYVSDDGAAMLTFDALSETSEFARKWVPFCKKYNIEPRAPEWYFAQKIDYLKDKVQTSFVKERRAMKREYEEFKVRINGLVANAQKVPEEGWIMQDGTPWPGNNTRDHPGMIQVFLGHSGGLDVEGNELPRLVYVSREKRPGFQHHKKAGAMNALVRVSAVLTNGQYMLNLDCDHYINNSKALREAMCFLMDPNLGRNVCYVQFPQRFDGIDRNDRYANRNTVFFDINLRGLDGIQGPVYVGTGCVFNRTALYGYEPPVKKKKPGFFSSLCGGRKKTSKSKKSSEKKKSHRHADSSVPVFNLEDIEEGIEGSQFDDEKSLIMSQMSLEKRFGQSSVFVASTLMEYGGVPQSATPESLLKEAIHVISCGYEDKTDWGTEIGWIYGSVTEDILTGFKMHARGWRSIYCMPKRPAFKGSAPINLSDRLNQVLRWALGSIEILFSRHCPIWYGYGGRLKFLERFAYINTTIYPLTSIPLLLYCILPAVCLLTGKFIIPKISNLESVWFISLFISIFATGILEMRWSGVGIDEWWRNEQFWVIGGISAHLFAVFQGLLKVLAGIDTSFTVTSKATDEEGDFAELYMFKWTTLLIPPTTILIINLVGVVAGISYAINSGYQSWGPLFGKLFFAFWVIVHLYPFLKGLMGKQNRTPTIVVVWAILLASIFSLMWVRIDPFTTRVTGPDIAKCGINC

SEQ ID NO: 2065 - protein, 1724 aa, Zea mays
  VARIANT 27..1724: note = Derived polymorphism lacks residues 27 to 1724
  VARIANT 138..1724: note = Derived polymorphism lacks residues 138 to 1724
  VARIANT 352..1724: note = Derived polymorphism lacks residues 352 to 1724
  VARIANT 446..1724: note = Derived polymorphism lacks residues 446 to 1724
  VARIANT 1267..1724: note = Derived polymorphism lacks residues 1267 to 1724
MDKGKSVVAELVASFSDVRVTPRQPPEPQAKSFLPSPSFLTATAPLVNLKHSKRTDWPARLLQFYFAASSEFGHCLDLEWHFKPAKGPDPPSMAVLPTRQDPLLNIPAAPSPLPAGRLEHEHDGPTPFLFPARRINNLALASTVLPKRVPLHLLQKITNDFSKDRELGSGAYGKVYKGVHKNGETMAVKLLHSMAGLDDKLFEEEFHNIARLQHKNIVRLVGFCHETQRQFIPHDGKMIFADSKYMALCFEYMHNGSLDKFIIGIIALFLFSYDQLNSLERLFAPTDENSVHDWSTRYAIIKGICEGLKYLHEELNPPIYHLDLKPANILLDDNMMPKLADFGLSKIFEQERTRITQSCVGTHGYLPPEYIDRKVISNKLDIFSLGVIIIKIISGPTGYTQCAEMPSKQFVELVHEKWRNKLQTTMDAAALETYCEQVVRCIEMALSCVETDRHKRPSIGAIIDELNKMETNTDQVFSVDICSTPAQTQPPPLPDSSHSTEETSNTKGVSRLGPREYVQSTMRDLVIGITKSVVEGVISKAQSVMEEENMLLISMQHDLHFITDEFQMIYSFLSITDEERINNAVVRIWVMQTRGLAYDLEDYMDAFSCLDKTRKWWSRLFRACLAPPGSPYMSVTSLAVELKHLKARVEDVSHRNTRYNLISDAGSKPGLVRQQPVPPGAVAYENDTRRKHILGDLTQLITNKDDADLQLISMWGAGGGTGTTSIIRKCYSDPEIIQNFICRAWVNLSHPFNPHEFVRSLMAHFYANSCQERQGGIIGVDVLTSMDATATQGDLLSEFVQLVDKNRYLVVLEDLPTMAEWDSIRTFLPDRKNGSWIIVSSQKYEIASLCVGHPYQILDLKQSSPTEHSVCAFLREEVTLKEKKGGNRKEKIYVGDESEVNNGSTSTNSKVISTEYDLSHNHRMVANSKWKEARDWMQNSSLVGRRLQMYQIHRCIAEAQRNHSHVMSVWGIVGVGKSAIVRNFYCDRILENQQFQEYGWVDLSHSQPFNLKDFSQNLLTNFQSDSLQANETTPSRGILGTVRKCCEFLSTRHCLVVIDGLQSKEEWDLIQSSLVSRYSKSNTIIIVITTEASIAAYCADKDDLVFNVKTLETDAAFDLFENEISKKAPLWTTSLCDRGNSVTQELVSKCGGLPMVIVAIAGILATKVVSWMDTATSINLRFMFELEINPDLQDLFSWVHSCFRTCPDFIKPCIFYLSFFPRDHNIRRRRLVRRWIAEGYCRDSDDKSAEENGEFFFSKLLGMSIIQPESSDARMVSCQINGFFRECILSRSGEMEDLVIELADRCNLTTQRSGRHLVISESWDRDKILFESIDFSRLRSMTVFGMWKSFFISKSMKLVRVLDLEDALGLTDENVDQMVKLLPCLKFLSLRGCQKISHLPSSLGDLRLLQTLDVVNTSIVTLPASITKLKKLQYIRGGTTSITSEDPLVPHTSVSWLSKFRRSPLGGLEVPSGIGELTGLHTLGVVDIGASAAEAILRELKKLTQLRKLGVFGVNSNNCGAFVSAISGHFHLESLSVWLDEENGRCSDCIFVPLKNLRSLKLYGVLNRLPLINQLSKLTKLDLEITTLMQEDISFLGKLPTLCILRLCVEDVNAPFRFSVFTNGVEERSYQKLKVLEIACRSSLSVTFGSEAMKNLDLLKLDCCSGQLRRLFGLLHLSELKEVWLKGSYEETLKHDLEVQLAAHPNNPVLKLGKNTLCTLSWMA

SEQ ID NO: 2066 - protein, 475 aa, Zea mays
  VARIANT 9: note = Ancestral polymorphism is K, Derived polymorphism is M
  VARIANT 66: note = Ancestral polymorphism is S, Derived polymorphism is I
MASSMKPTMLASTAALPLLALLLLLLHLSSGALEAVVVSASNGTAADGASYTCSGSLTWPSSSHQSVFSLDRYGARGDGRHDDTGALARAWEAACASPRPAVLLVPGGRRYLLKLVVLRGPCRSRVAVTVKGTLVASPNRADWSDSDRRHWIVFRSVDRLTVHGRGSIDGNGHSWWPHSCKINKALPCKAAPTALSFHYCTNLRVENLKMMNSQQIHMSIEDCASVQVSRLSITAPGTSPNTDGIHITRSKDVRVTNCKIKTGDDCMSIEDGTHGLHVSGVVCGPGHGISVGSLGDDDSRAEVSGITIDSVQLHGTTNGARIKTYQGGSGYARDITFQNMAMHGVRNPIVIDQSYCDRAEAEPPCREQRSAVQISDVVFRNIRGTTVTRDAIRMSCSRDVPCRGIVLQNIDLKMQGGKGHAESTCQNAKWRKSGKVVPQPCTSKEEGKVGQLLEFLLDHELASSLRSWSSWSLWN

SEQ ID NO: 2067 - protein, 335 aa, Zea mays
  VARIANT 248: note = Ancestral polymorphism is R, Derived polymorphism is L
  VARIANT 197: note = Ancestral polymorphism is T, Derived polymorphism is R
  VARIANT 194: note = Ancestral polymorphism is L, Derived polymorphism is Q
  VARIANT 188: note = Ancestral polymorphism is K, Derived polymorphism is M
  VARIANT 133: note = Ancestral polymorphism is M, Derived polymorphism is K
  VARIANT 119: note = Ancestral polymorphism is L, Derived polymorphism is S
MSAAPCADDRATDTSRLESRGGPAPPAATTMRIMARTLRGDRVALDVDGANTVAQLKSMIMAREGVAAGDQRLFFAGRHLDDDGMPVAHYGVRHGSVVFVSLRLRADDASQSQYVLSDSPSISLVRTVSQLLMIDQQPMMRFEDGDGHGHEEAVVKATTTRPPVSRRSLRKILSRLHVDVWTAQHDAKFLDLLQRRTRGCGVGVGDLTADDWSAIRAELNAATGSAFPVEDLQRRLGELRREFDAVSRIKDHPRFTYDARRHVVVAKETEWKRYVLENPDAVAYEGRSTHFGRLRAIFSGSGAETRGRGGPIRRESRAKRCLSKLLRSFGLRCKL

SEQ ID NO: 2068 - protein, 161 aa, Zea mays
  VARIANT 9..161: note = Derived polymorphism lacks residues 9 to 161
  VARIANT 54: note = Ancestral polymorphism is F, Derived polymorphism is S
  VARIANT 60: note = Ancestral polymorphism is K, Derived polymorphism is E
MLLQLVLQQESWAGPRKSVRDLIQKQLRSPSPRVPTSSSGPSPATRYAPIPVLSPFCFAERSCSRTLRAQGTGKGRKNMGEFDDYWARAYRGDSAVPHSDPQRLVSTWTGAVALGAAACVHHHASALASHLKSLPATWQDMTLALDQKRWKKAIEKKQQRA

SEQ ID NO: 2069 - protein, 371 aa, Zea mays
  VARIANT 175..371: note = Derived polymorphism lacks residues 175 to 371
MGNCCATPSTTEESGKSRQKKPKQKANPYNVAYNRGAAPAAARPGLVVLRDPTGRDLGAQYELGGELGRGEFGVTYLCTESATGARYACKSISKRKLRTPVDVEDVRREMCHRHGVMHRDLKPENFLYASKKESSPLKAIDFGLSVFFRPEHPWLHDSKKMPDISLGDTVRARLQQFAAMNKLKKKALRVIAEHLSVEEVADIKQMFEKMDVSKNGKLTFEEFKAGLRKLGNQMPDSDLQIMMDAADIDKNGTLDYEEFVTVSVHVRKIGNDEHIQKAFTYFDRNKSGYIEIEELREALADELEGTDEDIINGIIRDVDTDKDGKISYDEFAAMMKAGTDWRKASRQYSRQRFSNLSLKLQKDGSLGAETR

SEQ ID NO: 2070 - protein, 762 aa, Zea mays
  VARIANT 241..762: note = Derived polymorphism lacks residues 241 to 762
MTVTPRITVWDGRLVAHGRSVLAGVPDNIVLTHASGAGLVDGAFVGATAAEPSSMHVFTFGTLRDLRFVCCFRFKLWWMTQRMGTSGRDVPLETQFMLLECGPGDGHGDGDAAVYVAMLPLLEGQFRAALQGNDRDELEITLESGDKAVQTAQGTCMLYVHAGTNPFDTITQAVKVVERHMQTFHHREKKKLPSFVDWFGWCTWDAFYTDVTAESVKQGLKSLADGGTPPRFLIIDDGWQQIGSENKEESANAVVQEGAQFASRLTGIKENAKFQKKTKTKESGGGGGEQQAQTPGLKLLVEEAKREHGVRYVYVWHAMAGYWGGVKPAAEGMEHYESALAYPVQSPGVMGNQPDIVMDSLSVLGLGLVHPRRALSFYDELHSYLASCGVDGVKVDVQNIIETLGAGHGGRVALTRAYHRALEDSVARNFPDNGCISCMCHNTDMLYSARQTAVVRASDDFYPRDPASHTVHVSSVAYNTLFLGEFMQPDWDMFHSLHPAADYHGAARAIGGCPIYVSDKPGNHNFELLKKLVLPDGSVLRAQLPGRPTRDCLFADPARDGTSLLKIWNVNKCTGVVGVFNCQGAGWCRVTKKTRVHDAAPGTLTGSVRADDVDVIAGLAGDGWGGEAVVYAYRSGELVRLPQGATLPVTLKVLEFEVFHVSPVRAVAPGVSFAPIGLLDMFNSGGAVEQCEVRGGANAAAAVALRVRGCGRFGAYCSRRPARCMLDATEVEFSHDADTGLVTLHIPVPEQEFYRWSLEIEV

SEQ ID NO: 2071 - protein, 241 aa, Zea mays
  VARIANT 109: note = Ancestral polymorphism is S, Derived polymorphism is Y
  VARIANT 123: note = Ancestral polymorphism is G, Derived polymorphism is D
  VARIANT 139: note = Ancestral polymorphism is L, Derived polymorphism is P
MRKGILTGAAAGVEEVDIQGLGMQERKNHIERLVRIAEEDNERFLLKLRDRMERVGIDSPTIEVRFENLNIDAEAYVGNRGVPTMTNFFSNKVMDVLNAMHIVSSGKRSVSILHDISGVIRPGRMSLLLGPPGSGKTSLLLALAGKLDSNLKVSGRVTYNDMLTELSRREKEANIKPDPDVDVYMKAISVEGQESVVTDYILKILGLEICVDTMVGDSMIRGISGGQKKRVTTGICNLQLN

SEQ ID NO: 2072 - protein, 255 aa, Zea mays
  VARIANT 102: note = Ancestral polymorphism is Y, Derived polymorphism is H
MDLLASLAAEERWLFPLFLAMYAAIYCVGQLLVFRRWAPRQRLDGASCLISLFHGTPAALAAAGAILALPAGSRSFAAPNARLQDHVLDYSVAYFTMDLLHYLAFLPGDVLFIAHHLATLFVFLTCRYLVRHGAYALLVLLLLAEVTSLLQNVWTLAGIWRDQSPAAARVYGALSPPFYALYTLVRGVAGPLFLLKMAAFYLSGQAVDVIPWWVRISWILVVGTAIAVSNLWIWNLWKELVREWKQAPSKSKKDT

SEQ ID NO: 2073 - protein, 447 aa, Zea mays
  VARIANT 54: note = Ancestral polymorphism is G, Derived polymorphism is S
MKSFRRWADLPPDFLCCIGDRLELKWYASARGVCTSWRRALVPPSPALLVIAKSDSCYPYAAASLPTGRSFELTAFISGWRCVGSSNGWLAFSVHETVYVLLNPIAAVQIILPPLNYGDEYNSHWDWWVSKIVFTPSTAKDDFAAAAICGIDRIAYITAGATRWAFMGVRLSGEVGDKLTDVVYTDKGKFYCLSMYGDVHVLRLPARRCRKPANAEEAGSSELKFSVLRPLPPARHSSIVSPLCWENYQMLLMSEDEVPPSQGRRLNPPATLKPLLPRFGPTTLFAPPYDTVRDFTSAKNLVFCDGNLYQVWRNESCTVTLRLPAGGQRRVAENEIVVLKYCPGRQPSWDVVKDLGGYSLFVGTNNAVSMYAEGVPGLRGNCVYWIGGRATRNKGMVFDMKSGRSTPCRAPQAGSLPGGHDYSTVCWYFMSDVINNSYNGSRQNVEE

SEQ ID NO: 2074 - protein, 196 aa, Zea mays
  VARIANT 128: note = Ancestral polymorphism is A, Derived polymorphism is G
MGRAAEEEGDVEFADYDLDDEDAMEEDGRAARALPVPRIVSPAVVRTRGRFVGRSPSVLTSSRYRFDFTTNNGDHGPIPLPQRSIEGWAILVSGVKDDAEEDDLYNAFSDFGHVKDLHLNLERRTGYAKGYALIEYENFEEAQAAIRAMNGSQLFTKTINVDWAFSRGPIQNFKSARPSRPRSRTPPRRLAALTPY

SEQ ID NO: 2075 - protein, 291 aa, Zea mays
  VARIANT 199: note = Ancestral polymorphism is P, Derived polymorphism is T
  VARIANT 179..291: note = Derived polymorphism lacks residues 179 to 291
  VARIANT 157: note = Ancestral polymorphism is M, Derived polymorphism is T
  VARIANT 156: note = Ancestral polymorphism is S, Derived polymorphism is F
  VARIANT 146..291: note = Derived polymorphism lacks residues 146 to 291
  VARIANT 74: note = Ancestral polymorphism is E, Derived polymorphism is K
  VARIANT 66: note = Ancestral polymorphism is A, Derived polymorphism is T
  VARIANT 65: note = Ancestral polymorphism is R, Derived polymorphism is G
  VARIANT 59: note = Ancestral polymorphism is A, Derived polymorphism is T
  VARIANT 19: note = Ancestral polymorphism is R, Derived polymorphism is G
MPAPPHPTPLLPPAGEPFRVFVGYDPREHEAYEVCRRSLLRRSSIPLDVRPIRQAELRAAGLYTRARGPTESTEFSFTRFLTPYLAGYRGWALFVDCDFLYLADLADLLAAAAAADRAAGAGRIAVACVKHEYQPAEATKMDGAIQTVYPRKNWSSMVLYNCGHPKNVAALTPEAVSTQTGAFLHRFAWLDDDEIGEVPFAWNFLVGHNRVDPADPATRPRAIHYTSGGPWFERYRDCEFADLWLKEAEELRADKDKENDKLKLLKDMDDANGKQEVEEETAQEKEKEKGK

SEQ ID NO: 2076 - protein, 320 aa, Zea mays
  VARIANT 30..320: note = Derived polymorphism lacks residues 30 to 320
  VARIANT 39: note = Ancestral polymorphism is P, Derived polymorphism is L
  VARIANT 116: note = Ancestral polymorphism is E, Derived polymorphism is K
MPSLPLALPPAPALAPLPRRQGPRLLTHRSGLPIDRLVPAILSCKRRATAMQRGALLTRAVVARLYLVVLNIDTHRCWARDYYNNYAQFRWVGDSVHCASAIRSVACAVSLLFSTERSGVSLQDPQPIVGILIQPDTFGTRLLIAYERGLLVLWDVSEDRAVSVRGYGDLRMKGQINGAQGDSGEDQLNTTIDDSEEEREICSLCWASREGSTVAVGYITGDILLWDMTTKSSRQEKQSDVSSNVVKLQLASGSRRLLVIVLHWSAGSAVHSNKGGHLFVYGGDDMGSEEVLTVCLFFLLIITISFACHLKGCCAHAMSS

SEQ ID NO: 2077 - protein, 321 aa, Zea mays
  VARIANT 26: note = Ancestral polymorphism is D, Derived polymorphism is Y
  VARIANT 44: note = Ancestral polymorphism is P, Derived polymorphism is L
  VARIANT 62..321: note = Derived polymorphism lacks residues 62 to 321
  VARIANT 101: note = Ancestral polymorphism is P, Derived polymorphism is R
  VARIANT 124: note = Ancestral polymorphism is F, Derived polymorphism is S
  VARIANT 127: note = Ancestral polymorphism is R, Derived polymorphism is W
  VARIANT 139: note = Ancestral polymorphism is G, Derived polymorphism is E
  VARIANT 176: note = Ancestral polymorphism is A, Derived polymorphism is V
  VARIANT 183: note = Ancestral polymorphism is D, Derived polymorphism is E
  VARIANT 221: note = Ancestral polymorphism is K, Derived polymorphism is N
  VARIANT 309: note = Ancestral polymorphism is L, Derived polymorphism is P
MEGEAETVVGSCSKPCGPLEDYYIPYYILKPGAQQVFDLSKEAPDKVLHRLYANLERLKMEGHFLAVQIWRTLRLIVAGGDGTASWLLGVVSDLKLSHPPPVATVPLGTGNNLPFSFGWKAFIFVERNLLSVAYKNVIGARRASWRIISSIEHKEESRKNEEHVIQIKEYRGKIEAELSNICDGILKLIDSHLVPSSTAAESKVFYLKMKGDYHRYLAEFKTGAERKEAAESTMIAYNAAQDIALAELASTHPIRLGLALNFSVFYYEILNSPDKACNLARQAFDEAISQLDTLGEDSYKDSTLIMQLLRDNLTLWSADNT

SEQ ID NO: 2078 - protein, 178 aa, Zea mays
  VARIANT 16: note = Ancestral polymorphism is N, Derived polymorphism is K
  VARIANT 17: note = Ancestral polymorphism is T, Derived polymorphism is P
  VARIANT 28: note = Ancestral polymorphism is P, Derived polymorphism is H
  VARIANT 29: note = Ancestral polymorphism is T, Derived polymorphism is A
  VARIANT 30: note = Ancestral polymorphism is V, Derived polymorphism is L
MVHSIPTEAEIQGTPNTSAVLPLFWLGPTLVCMQLHPMVSHLLFVHKIIKEISTLVLTRGPKLCNFVDWQGYRVVYKRYASLYFCMCIDPADNELETLQIIHHYVEILDRYFGNVCELDLIFNFHKAYFILDEILIAGELQESNKKSVLRLVTTQDALVEAAKEEAGSLRNIIAQATK

SEQ ID NO: 2079 - protein, 442 aa, Zea mays
  VARIANT 23: note = Ancestral polymorphism is L, Derived polymorphism is V
MAKPPRAPRPKLQTPRAPARRLLGLGGLGVAAAAYVGVDYLRHLSPAWHGRLQPALWAVLALAAAARAPFYRHWSAELRAALPFLGSIAFMLAAFLCEAISVRFVSAVMGLHWHRTAAPLPDTGQWLLLSLNEKLPQSVVDLLRAHVITLHHYLMLFIMLGFSVLFDCIKAPGLGIATRYMFTMAIGRVLRTITFIATILPSARPWCAVARYQIPQHPHPWAQKYYVPYASDSNAIRRVITQDMAYAAVQAYPDEYKPDWGRMSFLVDILRPTPGEGPSWYHLLKKASGGCNDLMYSGHMLVAVLTAMAWTEAYGGWISVAIWLLVLHSAQREVRERHHYSVDCVAAIYVGVLLWRMTGFIWSARDLARARRLAKLEEVQSRLVHAAKDSDIDEIRGLLKEVELSGQERQGFSQRAILAFAAGTIIFTLSCVLIAFTATSDG

SEQ ID NO: 2080 - protein, 312 aa, Zea mays
  VARIANT 35: note = Ancestral polymorphism is L, Derived polymorphism is Q
  VARIANT 151: note = Ancestral polymorphism is A, Derived polymorphism is D
MGLPMRRERDAEAELNLPPGFRFHPTDDELVEHYLCRKAAGQRLPVPIIAEVDLYRFDPWDLPERALFGAREWYFFTPRDRKYPNGSRPNRAAGNGYWKATGADKPVAPRGRTLGIKKALVFYAGKAPRGVKTDWIMHEYRLADAGRAAAAKKGSLRLDDWVLCRLYNKKNEWEKMQLGKTAVAGVGATKEEAMDMATSHTHSHSQSHSHSWGETRTPESEIVDNDPFPELDSFPAFQDPAMMMTVPKEEQVDGCSAKSGNLFVDLSYDDIQGMYSGLDMLPPPGEDFYSSLFASPRVKGNQPAGAAGLGQF

SEQ ID NO: 2081 - protein, 279 aa, Zea mays
  VARIANT 136: note = Ancestral polymorphism is L, Derived polymorphism is P
MSGLYSQGFSPARNLSPQIRSNPDADSQYLAELLAEHHKLGPFMQVLPVCNKLLSQEIMRVSSIVHNHGFGDFDRHRFRSPSPMSSPNPRANLPGNGFSPWSGLQERLGFPQGTSMDWQGAPPSPSSHVVKKILRLEVPVDSYPNFNFVGRILGPRGNSLKRVEASTGCRVFIRGKGSIKDSGKEDKLRGKPGYEHLSDPLHILIEAEFPASIIDARLRQAQEIIEELLKPVDESQDLYKRQQLRELAMLNSTLREDSPHPGSVSPFSNGGMKRAKTGQ

SEQ ID NO: 2082 - protein, 219 aa, Zea mays
  VARIANT 178: note = Ancestral polymorphism is S, Derived polymorphism is N
  VARIANT 174: note = Ancestral polymorphism is S, Derived polymorphism is R
  VARIANT 166: note = Ancestral polymorphism is L, Derived polymorphism is P
  VARIANT 155: note = Ancestral polymorphism is C, Derived polymorphism is R
  VARIANT 132: note = Ancestral polymorphism is R, Derived polymorphism is C
  VARIANT 96: note = Ancestral polymorphism is E, Derived polymorphism is D
  VARIANT 85: note = Ancestral polymorphism is P, Derived polymorphism is L
MPRLSCKFADPDSAVSSAPVARRVRSDTMSCGSDVCRDGGSSSGSEEFRRPRPSKVAADDSVAPARSSDAAAPASWIDRKLLVDPKMLFVGDKIGEGAHGKVYKGKYGDQIVAIKVLNRGSTPEEKATLEARFIREVNMMCKVKHENLVKFIGACKEPLMVIVSELLPGMSLKSYLHSIRPSQLDTHTAISYALDIAHAMDCLHANGIIHRDLKPGKDA

SEQ ID NO: 2083 - protein, 202 aa, Zea mays
  VARIANT 180: note = Ancestral polymorphism is P, Derived polymorphism is L
MTFKRRNGGRNKHGRGHVKYIRCSNCAKCCPKRSAFLDILTCVAIFGLNYLSKLLWKMYDVGTIFYSQDKAIKRFLVRNIVEQAAVRDVQEACVHDGYVLPKLYAKVHHCVSCAIHAHIVRVRSRENRRNREPPQRFRRRFPVVLHVSLVLDKAISVVLMMAQGQVRAHRAQVLLPQQLPLLPLLVPKFRNAIRGLVLSPMG

SEQ ID NO: 2084 - protein, 381 aa, Zea mays
  VARIANT 101: note = Ancestral polymorphism is Y, Derived polymorphism is H
  VARIANT 108: note = Ancestral polymorphism is M, Derived polymorphism is I
  VARIANT 174..381: note = Derived polymorphism lacks residues 174 to 381
  VARIANT 232: note = Ancestral polymorphism is D, Derived polymorphism is Y
  VARIANT 276: note = Ancestral polymorphism is W, Derived polymorphism is R
  VARIANT 364..381: note = Derived polymorphism lacks residues 364 to 381
MPMSIHPSRARCSRDRSPCCCFLTIRRWSPPPNITVAGRHGAPPSPSVLPARQHDATMPPADALRDDDPRKHSLRWRSDNTLISSSMSHDMWLTNYICLLYIGVRIMMQTTTTGVLIATLMRFSLRYYVRLVICSLKELIRKERIDFIGIQETNKKSFDDSWLQSISGNRNFAWFWSPAKGRSGGLLVGLDADVFDIRQVDKGDFMIKVLVAHKESGFIWNFINVYGAAQNDYKQFFLTELASFCSNCKYPMLIGGDFNILRKDSDKNKPGGTNCWSSLFNSIIDVNSLIELDLSGRRYTWSNNREPPTFEKLDKFLASPEWVLQFKNVVVTGLDRTLSDHVPLYLKTESNVSPKRDFRYELCWKFRPDFKEFVCKSWSLP

SEQ ID NO: 2085 - protein, 249 aa, Zea mays
  VARIANT 142..249: note = Derived polymorphism lacks residues 142 to 249
MRSRRTGTPIRSRDDKAKPTMQKCYESEAEKYHASETISVPRASSLPSPPYRATGMYGTSRYVTDQSVLLQKSEALHHRGFTRPEDGENMNHVGKGNVDRWLHMLMDNQQEDHAAYHSSDEHDNDEENASDEQRTQSRVDEESCRNGITEYSDEIIEVEDEIVSDQGAERGRNNFGIKDREEKNIWFHRTDSTWGFWSLPSSPSMILGMRKGVERMAVDDDRKYGYEDSVSRSSTKFPRPAACAAAPRR

SEQ ID NO: 2086 - protein, 196 aa, Zea mays
  VARIANT 178: note = Ancestral polymorphism is D, Derived polymorphism is N
  VARIANT 158: note = Ancestral polymorphism is S, Derived polymorphism is I
  VARIANT 121: note = Ancestral polymorphism is L, Derived polymorphism is I
  VARIANT 112: note = Ancestral polymorphism is R, Derived polymorphism is W
  VARIANT 110..196: note = Derived polymorphism lacks residues 110 to 196
  VARIANT 104: note = Ancestral polymorphism is V, Derived polymorphism is M
MDTEAVPALAVVDARFCAAGAATLAVAKALSMSGSDFAVTDAATGAPVLRVDGVLFSLRRRCVLVDADRRPVLTVQESALMLNTRWKVFRGDSTRRRDLMFSVVKPSVIQLRGPTKVSVFLASNDAEQACDFRITGSYHDGACAVSLGDSDTIDRRFSVVSALLGKNSYSVTVNPGIDYAFVVALVVILDEMHYQR

SEQ ID NO: 2087 - protein, 420 aa, Zea mays
  VARIANT 224: note = Ancestral polymorphism is P, Derived polymorphism is L
MAALTSAKGALLPSWARSSSSGHGGDLWRVLGKALATAGGGGGGGCSLLLPRRWQSSLPQLDHVADSMRVNVLRRSNEESGGEIDWDNLGFGLTPTDYMYVTRCSPEDRGDFPRGELCRYGNIELSPSSGVLNYAQGLFEGMKAYRRPDRAGYTLFRPEENARRMQRGAERMCMPAPSVEQFVHAVRQTVLANRRWVPPQGKGALYLRPLLVGSGPILGLAPAPEYTFLIYAAPVGNYFKEGLAPINLVVHDEFHRAMPGGTGGVKTIANYAPVLRAQMDAKSKGFTDVLYLDSVHKRYLEEVSSCNVFVVKGGVVATPDTRGTILPGITRKSVIELARDRGYKVEERLVSIDDLVAADEVFCTGTAVVVAPVSTVTYQGERYEFRTGPDTVSQELYTTLTSIQMGMAAEDSKGWTVAVE

SEQ ID NO: 2088 - protein, 194 aa, Zea mays
  VARIANT 13: note = Ancestral polymorphism is N, Derived polymorphism is I
  VARIANT 32: note = Ancestral polymorphism is H, Derived polymorphism is P
  VARIANT 36: note = Ancestral polymorphism is S, Derived polymorphism is F
  VARIANT 179: note = Ancestral polymorphism is A, Derived polymorphism is T
MTAFRCLFSFVKNKETSVQTFLNNMSMEDNFHTPLSLQAAQEYETFSEIVEQMMVAREDADRWIYPWGNSKFSSSKFYSLSFTSIEPPPPFLWWQSKVCKKIKVFIWLVFRDRIISKNLLKRKGFMNAASDPHSVLCDSNYKETNFHLLFESPFSWNCWQYVGIQWNLELDFFRMLEDTKNVLAGASSWKLWLW

SEQ ID NO: 2089 - protein, 430 aa, Zea mays
  VARIANT 226: note = Ancestral polymorphism is R, Derived polymorphism is W
MRSTMKAQHANGRGSRSPFLTSYALTLAFITFVSVLYFKDFSSTLHRPFLHRPRRHAAPDKSQAGRRAAAERLPFAVGAAPAGCDVGRGEWVYDDAARPWYQEEECPYIQPQLTCQAHGRPDRAYQHWRWQPRGCSLPSFNATLMLEMLRGKRMLFVGDSLNRGQYVSLVCLLHRIIPESSKSMETVDSLTVFKAKDYNATIEFYWAPFLAESNSDDAVVHRIADRIVRGTSIEKHAKFWKGADILVFNTYLWWMTGQKMKILRNSFEDKSKDIIEMETEEAYEMVLNAVLKWVESNMNPRTSRTFFVTMSPTHTRSRDWGDDTDGNCYNQTAPIEDLSYWGPDTSKGLMRVIGEVFSASKSRIPVGVVNITQLSEYRKDAHTQIYKKQWNPLTPEQVADPKSYADCTHWCLPGLQDTWNELLYSKLFFP

SEQ ID NO: 2090 - protein, 393 aa, Zea mays
  VARIANT 39: note = Ancestral polymorphism is G, Derived polymorphism is C
  VARIANT 193: note = Ancestral polymorphism is S, Derived polymorphism is Y
MKVLVVAVLALVAAAAAAGQGEEGGGPPLPFAVGAAPAGCDVAQGEWVRDDDARPWYQEWECPYIQPQLTCQAHGRPDKAYQSWRWQPRGCSLPSFNATLMLEMLRGKRMLFVGDSLNRGQYVSLLCLLHRAIPDGAKSFETVDSLSVFRAKNYDATIEFYWAPMLAESNSDDAVVHSADDRLIRGAPMDRHSSFWKGADVLVFNSYLWWVAGDKIQILRGADNDPSKDIVEMKSEEAYRLVLHQVVRWLERNVDPVKSRVFFVTASPTHTDGRAWGDDDAEGSGNCYNQTSPISAASSYRGGTSQEMLRATEEVLATSRVPVGLVNITRLSEYRRDAHTQTYKKQWVEPTAEQRADPRSYADCTHWCLPGVPDTWNELLYWKLFFPSNDQVL

SEQ ID NO: 2091 - protein, 67 aa, Zea mays
  VARIANT 44: note = Ancestral polymorphism is G, Derived polymorphism is E
  VARIANT 15: note = Ancestral polymorphism is L, Derived polymorphism is P
MPFIEAHGSNHQRSPNLLAEVNLAEEGVLQLLLASIHRLSSRTGSDNEATVSSKYVLFLDNIFILSW

SEQ ID NO: 2092 - protein, 217 aa, Zea mays
  VARIANT 27..217: note = Derived polymorphism lacks residues 27 to 217
  VARIANT 68..217: note = Derived polymorphism lacks residues 68 to 217
  VARIANT 74: note = Ancestral polymorphism is A, Derived polymorphism is V
  VARIANT 99: note = Ancestral polymorphism is A, Derived polymorphism is P
  VARIANT 131..217: note = Derived polymorphism lacks residues 131 to 217
MASAGVAPSRYKNSSSTSIGAEKLQDQMNELKIRDDKEVEVTIINGKGTETGHIIVTTTGGKNGQPKQTVSYMAERIVGQGSFGIVFQAKCLETGETVAIKKVLQDKRYKNHGIVISYFIAKKFRNNINVWYAYRADYSGLSFGRDQYVQALQGEVSYLNTYDGRTMHYPDPLIKANDTIKIDLETNKIMDFIKLYLPFHGLHQVIYLVRLNVSTNS

SEQ ID NO: 2093 - protein, 292 aa, Zea mays
  VARIANT 149..292: note = Derived polymorphism lacks residues 149 to 292
MAQEDVHLDDAGLALGLSLGSGSGGASGAARHGGISRRLSREVRLPSPHPLEPSLTLSLPDEATATGSGGGGAAHSVSSLSVAGVKRERVDDAEGERASSTAALPRACAGAEDDDDDGSTRKKLRLTKEQSALLEDRFKEHSTLNPKQKVALAKQLKLRPRQVEVWFQNRRARTKLKQTEVDCELLKRCCESLTEENRRLQRELQELRALKFAPHPQAPPSSATQAGAAAGVVPAPPPPLYMQMQMPAAATLSLCPSCDRLAGPGAAAKAEPRPKAAATHHFFNPFTHSAAC

SEQ ID NO: 2094 - protein, 250 aa, Zea mays
  VARIANT 121: note = Ancestral polymorphism is R, Derived polymorphism is W
  VARIANT 112..250: note = Derived polymorphism lacks residues 112 to 250
  VARIANT 44: note = Ancestral polymorphism is C, Derived polymorphism is R
MDMAPAAVSSNPRSVEEIFKDFSGRRAGLVRALTSDVDDFCSFCDPDKENLCLYGLPNGSWEVSPPADEVPPELPEPALGINFARDGMQRRDWLSLVAVHSDSWLISVAFFYGARLNANDRKRLFSMISDLPSVFEAFADRKHVRDRSGVDSSGKSRHSSKRGNDGHAKNSRAAAPAAKEYDDDDDEEDEEHTETFCGSCGGLYNANEFWIGCDICERWFHGKCVRITPAKADHIKHYKCPDCSSKKIRQ

SEQ ID NO: 2095 - protein, 210 aa, Zea mays
  VARIANT 63..210: note = Derived polymorphism lacks residues 63 to 210
  VARIANT 29..210: note = Derived polymorphism lacks residues 29 to 210
MAPLLFRDMKGLSCSSPASTAICPSLERQPMVRPHKAIASASPLSHVPAAPRTHRHDGKKGRQQEEQQQRKAVVVGNAGGLVSPAGSSRYLLSGRFAATEEIQEVESAPAVDVKPKREEAGEAAADAKSAQAQEQAQEQVVVLKVSLHCKACAGKVKKHLSKMEGVTSFNIDFAAKKVTVVGDVTPLGVLSSVSKVKNAQLWAAPPAIAA

SEQ ID NO: 2096 - protein, 231 aa, Zea mays
  VARIANT 134: note = Ancestral polymorphism is R, Derived polymorphism is G
MAVPEVVVDGVVFPPVARPPGSAGSHFLGGAGVRGLEIGGNFIKFTAIGVYLEDAAVPALAKKWGGKTADELASDAAFFRDVVTGDFEKFTRVTMILPLTGEQYAEKVTENCVAFWKAAGLYTDAEGVAVEKFREVFKPETFAPGASILFTHSPAGVLTVAFSKDSSVPAAGGVAIENKRLCEAVLESIIGERGVSPAAKLSLAARVSELLAKETAAPADAPQAEPVSITA

SEQ ID NO: 2097 - protein, 601 aa, Zea mays
  VARIANT 369..601: note = Derived polymorphism lacks residues 369 to 601
  VARIANT 277..601: note = Derived polymorphism lacks residues 277 to 601
MGGTGASSRRRWARRSFRTAGGGGGRGTGGVVRRTVAASTTMAPRGTQGFAHVDKQQRHVHGVLSDFRCNSGSTDHLSLYVEEFKHKSSHRSSVRCLPSAQGNVTEISRMQPVARKVQVDMTFNDKGLCRASRTVSGMRIQPKYYISSPNNNLKNSPTVKSYSGMSDFNYQLVRSAKRSALPKMGLTSTNCSLSEKMSFLRRPRHGDNHQNQSRISALNRRNKIVNPRGAAHLLSKDKVHEHLNSSLERHSQALLSNALIREKQLCCSDILNQKEPEQLWSSAYSESEKMLCFSSSDSIDDLQVSSSSDTSDSFNLSSLGVIDGDEWNTTFKRVYYPHAACLDSISVIYAKEIGQVSPISVLQPLSEDCSDSENIRHEPADPYDLQLRLELGTSAPRETAAEASNFRGTSVCLTSEVQSSDEKPIQLVEDILEEFEDDEERDFSYLLDILIASGIHGTAEDQMYKVCQSLDHPAGDDVFEKLEKKYNKVVQWSRSDRKLLFDMANTILSQILAPCLNMQPWVYTTRNLAPLWGPDGLLEKVLQMLVQRREHLAPSETKPEKKGFDPKWPGLADCIDRAGRDIERMVKDDLLEELVVELLSS

SEQ ID NO: 2098 - protein, 215 aa, Zea mays
  VARIANT 61: note = Ancestral polymorphism is G, Derived polymorphism is S
MAAPPARARADYDYLIKLLLIGDSGVGKSCLLLRFSDGSFTTSFITTIGIDFKIRTVELDGKRIKLQIWDTAGQERFRTITTAYYRGAMGILLVYDVTDESSFNNIRNWIRNIEQHASDNVNKILVGNKADMDESKRAVPTSKGQALADEYGIKFFETSAKTNLNVEQVFFSIARDIKQRLSETDSKPEDRTIKIKAEGEAEAAAAAQNSACCGS

SEQ ID NO: 2099 - protein, 529 aa, Zea mays
  VARIANT 219: note = Ancestral polymorphism is L, Derived polymorphism is H
  VARIANT 271..529: note = Derived polymorphism lacks residues 271 to 529
  VARIANT 290: note = Ancestral polymorphism is E, Derived polymorphism is V
  VARIANT 304: note = Ancestral polymorphism is A, Derived polymorphism is T
MAATGVVAEPKTKYDRQLRIWGDQGQAALEKASICLLNCGPTGTEALKNLVLGGIGSVTVVDGSKVESSDLGNNFLLDEGCLGQPRAKSICSFLQELNDAVKAKFVEESPAHLIDTNPSFFSQFTVVIATQLPESFLLKLDYICRKADIVLVAARSYGLTGLVRVSVKEHCVIESKPDHFLDDLRLHNPWTELKQFAKSIDINDKDPVVHKNTPYIVILVRLAEKWADAHDGNLPSTRQEKKEFKDLIRAHMLNVDEENYKEAVDSSYKVSVTPGINNEIRQIIDDDSAEVNSSSSDFWILVAALKEFIAKEGNGELPLEGTIPDMTSLTEYYVSLQKIYQAKAEFDCLALEHHVKEILKRIGRDPDSISRAYIKTFCKNSRKLRVSRYRSFEEEFSSPFVPEIQRYFTDEDYSYATNFYILLRAVDRLAANYSRLPGIFDSEIDEDIPRLKTVAASVASEMGLNGASLSEDLITEMCRFGGAEIHPVAAFVGGVASQEVIKLVTKQFVPLPGTFIFNGIDLKSQVLML

SEQ ID NO: 2100 - protein, 145 aa, Zea mays
  VARIANT 35: note = Ancestral polymorphism is P, Derived polymorphism is S
MKHQRDAGAVPLSLALSLGGGGGGVAPKHGISKKPRRAAGGEFVCKTCSRAFGSFQALGGHRTSHLRARHGLALGMHAAAPAKEEDTATKPAAAKPAPAPASHLCHVCGLGFDMGQALGGHMRRHREEAAAAAAQAPPVLLQLFV

SEQ ID NO: 2101 - protein, 149 aa, Zea mays
  VARIANT 111: note = Ancestral polymorphism is M, Derived polymorphism is V
  VARIANT 112: note = Ancestral polymorphism is V, Derived polymorphism is A
  VARIANT 113: note = Ancestral polymorphism is Y, Derived polymorphism is H
  VARIANT 115: note = Ancestral polymorphism is S, Derived polymorphism is I
MANAASGVAVAEECVARFQELRGGRAHRFVVFKVDDALQRVVVEKAGGRAAGFGDLAASLPADDCRYAVYDHDFTVGVGDAAAAAGELEAPRSRIVFVAWAPEAAGVRSKMVYASSCEGFRKELDGVQVDLQATEPGELTLDVLNDHAS

SEQ ID NO: 2102 - protein, 146 aa, Zea mays
  VARIANT 12: note = Ancestral polymorphism is S, Derived polymorphism is F
  VARIANT 14: note = Ancestral polymorphism is D, Derived polymorphism is N
  VARIANT 21: note = Ancestral polymorphism is A, Derived polymorphism is V
  VARIANT 26..146: note = Derived polymorphism lacks residues 26 to 146
  VARIANT 37: note = Ancestral polymorphism is F, Derived polymorphism is L
  VARIANT 41: note = Ancestral polymorphism is Y, Derived polymorphism is H
  VARIANT 45: note = Ancestral polymorphism is N, Derived polymorphism is S
MVSEFFHSGCTSEDINNLSHALALKEASNVFLGNTKFRLPYVGSNSWAVLSLRQIEPHDYISKLFNLFTQFNNVLTDFDRDIWSYISLGYFKQLDLTDSTVLRNLGMGLGHSLLAYKATMRGISKVQGARSAPPDLAISMFVASCI

SEQ ID NO: 2103 - protein, 270 aa, Zea mays
  VARIANT 223..270: note = Derived polymorphism lacks residues 223 to 270
  VARIANT 181..270: note = Derived polymorphism lacks residues 181 to 270
MAYTVTRSYTDQDSFLMTSSRSKSKSRSRSRSRSRSRSRSPRRRDRLRSERAPHRSRSRSRSPYRRRERRGHRDFACKNCRRPGHFAKECPSAPMCNNCNLPGHFAAECTLQTVCWNCKESGHIASECKNEALCHACNKTGHLARDCPTSGANVKLCNKCFKSGHIAVDCTNERACNNCRQPGHIARECKNDPVCNLCNVSGHVARVCPKTTLASVIQGGPFRDILCRICGQPGHISRNCMATIICDTCGGRGHMSYECPSARIFGLRRL

SEQ ID NO: 2104 - protein, 474 aa, Zea mays
  VARIANT 200: note = Ancestral polymorphism is R, Derived polymorphism is H
  VARIANT 105: note = Ancestral polymorphism is R, Derived polymorphism is G
MANASKHLQPSSQAGNDKKYQGTLVASPAKAISPKCVNRIVPSKQLILGGGSIGHVASFLIKVVALEAVRRVSKTRCPFIWNSVQALQILVYPPFSWIQRWAPLGFLVQGIQKLSMPLLFLSVTTTVSELSSKHDDEPDNNTEHSETPSETNELASTSGTSDAADGTKEIVQENWLVLLFRELEKQGITLPERFTEDELRRFYVAANGDFQSLLSSVKKTIHWRETFHILTLQELDRWSHLVFWHGFDTMLRPCLVVRLGLACSSIPPHDRPRFGQAVVSQIDHGVVNLINEEDSRITVLLDCHGISPFRFPMQMMRSFITVVQENYPNRLGVLFVIRLPPVVRVIAQTFLQVLKPATKQKLRFEGDSYKKALAEFLQAVPAFLGGKCSCPRCESPRDDSVIQAGEGSKKQPRLVSVDDGLPVTDLDFDLDEEIPSPYSCENAIRAAIIGLLMVCIFVAFLAGMIDPASVPASA

SEQ ID NO: 2105 - protein, 174 aa, Zea mays
  VARIANT 150..174: note = Derived polymorphism lacks residues 150 to 174
MQSAQSLVSRARTAIHSAAARVLTDIKADLQDAEGFGGRSRALSPRMSLDREAAEASATGREPDVKPSSPRDEVLEISPSENEDSSSIPTESTCSTKLTFPPASIVKQLVSVIENGRSFKSMSDMRYTGEQLLKDKGGLSLSVVTSLVLQYNNRVFDHCNYKKTVVESRRQFFS

SEQ ID NO: 2106 - protein, 615 aa, Zea mays
  VARIANT 304: note = Ancestral polymorphism is R, Derived polymorphism is C
MGNSLACFCCAGGAAGHVAPAALPSDPAYDEGLGHSFCYVRPDKVPVPFSADDDLVADAKAAEDATTFRAISGAALSANVSTPLSTSLLLLLPDESAASSSGFESSESFAAVPLQPVPRFPSGPICAPAGAGAGFLSGPIERGFLSGPLDAALMSSGPLPGAATSGRMGGAVPSLRRSLSHGGRRLRDLTRAILARTEKLQGSMDLGLGLGLGSPDGAGLQLQWAQGKAGEDRVHVVVSEERGWVFVGIYDGFNGPDATDFLVSHLYAAVHRELRGLLWDQRDAHPDQPTTTSTTASDHQDRRRRRARRSRPPRGADDDQRRWKCEWERDCSSALKPPTQRPPRGSSQNDHLAVLKALARALRKTEEAYLDVADKMVGEFPELALMGSCVLAMLMKGEDMYLMNVGDSRAVLGTMDSVDVEQVTSDGLVGDGTPLLSAVQLTSEHSTSVRQEVCRIRNEHPDDPSAISKDRVKGSLKVTRAFGAGFLKQPKWNEALLEMFRIDYVGSSPYVTCSPSLCHRRLSTRDRFLILSSDGLYQYFTSEEAVAQVEMFIATTPDGDPAQHLVEEVLFKAANKAGMDFHELIEIPHGDRRRYHDDVSVIVISLEGRIWRSCV

SEQ ID NO: 2107 - protein, 344 aa, Zea mays
  VARIANT 101: note = Ancestral polymorphism is P, Derived polymorphism is S
MLAKRVAAISFLLDRDDDDSSGAGAGWCKRRRLWTTADYETTRVLGEGSFGAVVEARHRATGQAVAVKTLRAPAGAGAEVVAVANKTLREAEFLAACRGHSSLVGLHAIAVNPAKAEIALVMECVGPNLHDVLNGSRYRAGRPFTEPQVRLIMRQLLAGAKHMHARQIMHRDIKPGNILVGAGAGADDREPVSVKICDLGLAASITKPAYGQAGTRRYMAPEMLLGKPDYDAMVDMWSLGCVMAELLTGKPLFDGEDDMEVLSWIFGVLGVSERTTWPAFKSLPLAAMVPLPPVRHPSMLRKLFPKKLLSADGFDLLQRLLSCDADKRPSASVALRSPWFTDLN

SEQ ID NO: 2108 - protein, 247 aa, Zea mays
  VARIANT 207: note = Ancestral polymorphism is A, Derived polymorphism is T
  VARIANT 141..247: note = Derived polymorphism lacks residues 141 to 247
  VARIANT 108..247: note = Derived polymorphism lacks residues 108 to 247
  VARIANT 91: note = Ancestral polymorphism is I, Derived polymorphism is N
  VARIANT 90..247: note = Derived polymorphism lacks residues 90 to 247
MPPHCAATSSVSTRPLRRHLLLLVSLTNPTSSSSTTSITPEKYAGDSDLELECIKVYYNEASGDRFVPRAVLMDLEPGTMDSVRSGPFGQNFHPDNFVFGQSGVGNNWAKGHYTEGTELIDSVLDVVRKEAENCDCLQGFQVCHSLGGGTPPKGTTAWAPPPKPSDDGSGAKQREMGGDDDGAPCPSPDPVIGRVLQAPKLREFTLAELRAATHGFKPEMVLGEDGFDRVYKGWVDECTLNPTKSVL

SEQ ID NO: 2109 - protein, 350 aa, Zea mays
  VARIANT 255: note = Ancestral polymorphism is V, Derived polymorphism is I
  VARIANT 254: note = Ancestral polymorphism is V, Derived polymorphism is L
  VARIANT 85..350: note = Derived polymorphism lacks residues 85 to 350
MAAAWPLSAIAGILPASLSLTLLLATLVSILVLGAAAFFFEHIRKIGCMHSLERSAVSDAFFEDPNSLKKVPCPSVLDPPEKYISLIVPAYNEEYRLPEALTETLNYLKRRSTADKSFSYEVLIVDDGSTDGTSKVAFSFVKKHKIDNVRVLLLGRNHGKGEAVRKGMLHSRGELLLMLDADGATKVTDLEKLEAQVHALAKKAKSSPGTSTSSSQNLSDVEVAVFGSRAHLEKQALATRKWYRNFLMKGFHLVVLLTAGPGIKDTQCGFKMFTRAAARKLFTNIRLKRWCFDVELVYLCKRLRIPMVEVSVNWTEIPGSKVRMTSIMHMVFELLLIKVGYGLGIWKIGS

SEQ ID NO: 2110 - protein, 181 aa, Zea mays
  VARIANT 67: note = Ancestral polymorphism is Q, Derived polymorphism is K
  VARIANT 62..181: note = Derived polymorphism lacks residues 62 to 181
  VARIANT 56: note = Ancestral polymorphism is P, Derived polymorphism is L
  VARIANT 19: note = Ancestral polymorphism is Y, Derived polymorphism is H
  VARIANT 6: note = Ancestral polymorphism is A, Derived polymorphism is V
MVDSLAKLSMDVGDKDLVYSLLLVFSGMLMDKKGKECILDNIQITISVLSELVSYPHMMVVQETTLQCLVAFSTFPHPKIYPVLIDFGLSFTWTIPEDKAVDLYVLERALISMHSSCGDVISPVAIGFMLFPFVRGILFPMVFMQMEKILAAYRKASKQWCSTQNKLAQVRQQVWKRTMVG

SEQ ID NO: 2111 - protein, 419 aa, Zea mays
  VARIANT 155..419: note = Derived polymorphism lacks residues 155 to 419
MGNCWGARIKDGSPHPGASGMFSKSSGKDGSRLSGCSSRASSASMPPSAKTECEILRSANVKIFTFNNLKAATRNFRPDSVLGEGGFGSVYKGWIDENTLSPCRPGTGIAVAVKRLNHEGLQGHREWLAEVNYLGQFCHPNLVKLIGYCLEDEHRLLVYEFMPRGNMENHLFRRGSYFQPLSWNLRMKVALGAAKGLAYLHSAEAKVIYRDFKTSNILLDTDYSAKLSDFGLAKDGPVGEKSHVSTRVMGTYGYAAPEYLSTGHLTAKSDIYSFGVVLLEMLSGRRAIDKNRPQGEHNLVEWARPYLTHKRKIFRILDTRLEGQYNLNGAQTIAALALECLSYEAKMRPTMDAVVAILEELQGSGEAEKKLQEPKAGTKQAPAAVSASMSSSRKPRRKSLGDTKETVGVPDPKPLAHSR

SEQ ID NO: 2112 - protein, 268 aa, Zea mays
  VARIANT 1: note = Ancestral polymorphism is M, Derived polymorphism is K
MAAMPAPLLPLLLLVVAAAMTLSPAAARIPGVYVGGGGGWQSAHATFYGGSDASGTMGGACGYGNLYSQGYGVNNAALSTALFDEGLRCGACFEIRCEEQPGWRWCRPGRPSILVTATNFCPPNYALPSDDGGWCNPPRPHFDLAMPMFLHIAEYRAGIVPVSYRRVPCRKSGGVRFTINGFRYFNLVLITNVAGAGDVVRASVKAASTGWLPMSRNWGQNWQSNAILVGQALSFRVTASDRRTSTSWNAAPSTWQFGQTFEGKNFRV

SEQ ID NO: 2113 - protein, 253 aa, Zea mays
  VARIANT 185: note = Ancestral polymorphism is K, Derived polymorphism is N
  VARIANT 201..253: note = Derived polymorphism lacks residues 201 to 253
  VARIANT 224: note = Ancestral polymorphism is K, Derived polymorphism is N
MAAGGTADFFYRESQRLGYVARSAFKLIQMQKQHKLIAPGAAVLDLGCAPGAWLQVSVRYSSSSLRAPEWLVRTWVPSRRVALSSASMLSNSVVAEQKVKVPSAHCDSRVRTVCADVMTLMKRQARAMSPQERGFSVILSDMCPPVSGITTKDGAISCELGMRALSLAVGKIKLKDSNYSDTLEKYLSSTEPESDEDGVLRRGGNLVVKFLENEDISGFGKFCKVKFKKVSLLRPKATRPSSREIYMICEGLR

SEQ ID NO: 2114 - protein, 372 aa, Zea mays
  VARIANT 217: note = Ancestral polymorphism is K, Derived polymorphism is M
  VARIANT 275: note = Ancestral polymorphism is K, Derived polymorphism is N
  VARIANT 303: note = Ancestral polymorphism is W, Derived polymorphism is S
  VARIANT 336: note = Ancestral polymorphism is G, Derived polymorphism is V
MAKDGGPDWNGLLKWSLAHGDGTNPPRALSEEDRKWFMDAMQANTVDVVKRMKEITQVMKTPEDVLQSQGVTPENIEDMLDELQEHVESIDMANDLHSIGGLDPLLGYLKNSNAGIRAKAAEVVSTIVQNNPKSQQLVMESNGLEPLLTNFKSDPSTNARTKALGAISSLIRHNQPGVSAFRLGNGYAGLKDALGSDDARLQRKALNLIQYLLHNYKADRSVATELGLPKLMMHLVSSDDSLVREAALGGLLELARDKTSGNALPDQEKLKDMLKSRIEGISAMDTDDLHAAREERQLVDSLWKECYNEPSSLREKGLVVLPGEDAPQQPPPDVAGKMFEPPLRAWAAARPAQEDDSDSGSGKKAPPLLLKF

SEQ ID NO: 2115 - protein, 447 aa, Zea mays
  VARIANT 413: note = Ancestral polymorphism is C, Derived polymorphism is R
  VARIANT 185: note = Ancestral polymorphism is A, Derived polymorphism is P
MLRVRNRLLPLLGAASPLPSPIHIHLRVCRLLSTSTSTATVPAPFSLENYLVAACGFAPAQARLVSKKAFNELSRESKRSSEEHSCRRLISASNPDAILALLSGAGLSRADIAAVVFADPLILRASVSKIAPRLVALRDRVGLSTPQIARFLLVGSRALRRCDVVPKVEFFLSFLGSFDRVLAVAKANLGIFNANLEKVIKPNIDLFRQRGVRNVPKICLHRPRTLSFNLERVKEFLLRAEELGVPAASPLFMQAVGVVTSFPPEKVAAKLDFFKRTLGCSESEVSNAVSKMPQILALSEATLLRKIEFLVNEGAIEPQYIMQRPILLAFSLEKRLVPRYRVIKVLQGKGLLNSNMSLSSLASLAEETFKSKFVDCHKDCVPGLADAYAAACASIVPSTVTWPKIILNFVVFRGSVFDVEQYLNYLGTISTFVPLHDSSRHSAIYKV

SEQ ID NO: 2116 - protein, 682 aa, Zea mays
  VARIANT 86: note = Ancestral polymorphism is T, Derived polymorphism is I
MPAAALAVRVAAVLLLLARGGSGSAPGEFVLSGFASGNVTTSGAAVVTSSGLLQLTNATNEVFGHGFYPVPLRFKDASSTPRSFSTTFVFAMVPRHDDAHGHGIAFALAPSPTVPGAVAGKNLGLFNTSDDTGKARSGVVAVELDTAKDEEFSDINDNHVGIDVNSLVSVSSAPAAYVDAGSLVNISLVSGEPLQAWVEYDGASMRLEVTVAPARKPRPAVPLVSSIVNLSSAVADDTYVGFTAANGAASTSHYVLGWSFRLGDGRATDLDASKLPPVPSSKKKTSRLNLVTLSLVVVVALLLASVAVAALVVRHRRFAEEQEDWEIQYGPHRISYKDLHAATRGFRDAIGQGGFGRVYHGVLQRPVNAEVAVKKVSHDSRQGLREFVSEIASMSRLRHRNLVQLLGYCRRRGELVLVYDYMVNGSLDRHLFDAGKPALSWEQRGKIVRDVAAGLLYLHEGWEQVVVHRDIKSANVLLDADMNGKLSDFGLARLYDHGSNPQTTHVIGTLGYLAPEMSKTGKATTSTDVFAFGAFLLEVACGRRPMERDDDLDSPGLVDLVLECWKAGRIVEARDKRIGKCDEADVELVLKLGLLCSHPDPRCRPSMRQAVQMLEGAAPVPETPPKDLASNSRLFYGYSESFDEFATMFPATSEVTSVTTQPSSSHSTGEGQQVSSEQITNV

SEQ ID NO: 2117 - protein, 691 aa, Zea mays
  VARIANT 104: note = Ancestral polymorphism is G, Derived polymorphism is W
MAAAVTVAVRVMVPVLLLAPAPAAAAVEFTFTGFARENVTTSGAAATSSGGLLQLTNATNWVLGHGFYPAPLRFKDAASGAPLSFSTTFVAAILPRYLDAHGHGLAFALAPSAAGPGLAVAGKYLGLFNTSDNAGNGTTSEVVAVELDTALDVEFDDINNNHVGVDVHTLRSVASKPAGYVDAATGGSVDVALASGRLLQVWIEYDGATTRLEVTVSPAGVGVPRPRVPLVSCEVDLSSAVADQTYVGFSAANGAASSSHYVLGWSFRLGGGRAPDLDLSKLPRPPPPSGGHKKATELPLLLTLIILVVVVLLVVSAAVTVLVVWRRRRFTEEQEDWEVEYGPHRVSYKDLYAATRGFRDVIGVGGFGVVYRGVHPRPGGVEVAVKKVSHDSRQGLREFVSEIASMSRLRHRNLVQLLGYCRRRGELLLVYDYMVNGSLDRHLFGAGNEPTLSWEQRAKIVRDVAAGLLYLHEGWEQVVVHRDIKASNVLLDADMNGRLSDFGLARLYDHGSESRTTRVIGTLGYLAPEMIKTGKATPSADVFAFGAFLLEVACGRRPMESLGNNGDPAGLVDSVLERWKTGRIKDARDPRIGMCDEDDLELVLKLGLLCSHPDPRCRPSMRQVVQILEGAASLPSTPPEDLGGAGGRIFGHYETFDEFVNVFPTTFDITTVTTPSPCSPSSADRQQLISA

SEQ ID NO: 2118 - protein, 127 aa, Zea mays
  VARIANT 75: note = Ancestral polymorphism is R, Derived polymorphism is L
MRSQALFFLTIALLTVLARSSNRHHHHHSHVQSRGQGAASGGGGGGELASRGKAAARAWPCCDSCGGCTRSEPRLCRCLDAAPRGCHPACRDCVKSSLSADPPVYQCMDRVPDFCLRRCTAPAAAAR

SEQ ID NO: 2119 - protein, 431 aa, Zea mays
  VARIANT 296..431: note = Derived polymorphism lacks residues 296 to 431
  VARIANT 52: note = Ancestral polymorphism is D, Derived polymorphism is G
MDLSSDDVKAANMRPAVAAADGTSTLLRGWREFMRSGAPARFLCYEDGKWIGITGEAVPQLRQAFQERRAMADASYGGKAYLFDFLRMIRIDEVTGEETGLAWIDDRGDCFFPAPDCGGRKRKRDDEPAEDEAESSSGVDVRSGERHGVDAKKMKAWENAAVRLEENDMYYQVVSKLFLSYGMAQRGAAITEVRKIAPGARTVAFREQGQRLAYARCTATGTAKFAWYGASEDDVAAVVERGFVRNNAPRLGARKHGDGVHLSPAQCPYTSAMLAKADGSDEAHIVLCRVLMGRPEAVPAGSSQFCPSSRSYDSAVDKLENPQWYVVWNMDMNTRILPEYVVSFKCSKLQQMRESSEATSKLKKPAPVARDMFPTLLAEIQQIVPDKCDLLQESYKNFKMGQIKKDQFIQFLRNYVGDEVLKTVAKKLRRC

SEQ ID NO: 2120 - protein, 131 aa, Zea mays
  VARIANT 61: note = Ancestral polymorphism is Y, Derived polymorphism is H
  VARIANT 53: note = Ancestral polymorphism is T, Derived polymorphism is S
  VARIANT 52: note = Ancestral polymorphism is R, Derived polymorphism is P
MAHRMDNEYDYLFKIVLIGDSGVGKSNILSRFTRNEFCLESKSTIGVEFATRTLQMQTYGYDKLMFAGQLVKCNLIASFIVMREGAWLLAPLVGSITKQHNNFACRMCEHGAPRMIHVHASMKMKEPCCYI

SEQ ID NO: 2121 - protein, 215 aa, Zea mays
  VARIANT 53: note = Ancestral polymorphism is T, Derived polymorphism is S
  VARIANT 52: note = Ancestral polymorphism is R, Derived polymorphism is P
MAHRMDNEYDYLFKIVLIGDSGVGKSNILSRFTRNEFCLESKSTIGVEFATRTLQVEGKTIKAQIWDTAGQERYRAITSAYYRGAVGALLVYDITKKQTFENIQRWLRELRDHADSNIVIMMVGNKSDLNHLRSVAEEDGQALAEKEGLSFLETSALEALNVEKAFQTVLSDIHQIISKKALAAQEAAGSGPPGQGTTINIADPSANTKRGCCSS

SEQ ID NO: 2122 - protein, 123 aa, Zea mays
  VARIANT 31: note = Ancestral polymorphism is G, Derived polymorphism is A
  VARIANT 3..123: note = Derived polymorphism lacks residues 3 to 123
MSGSAFNAFKSRVPVAWSPRLYITLVRGLPGTRRLHRRTLEAMRLRRCHRTVEHRTTPSLLGMLTQVKRLVAVETEEMYNARKQAEAERRAPRPPLVVSHHQPPPPALKPAAAAAEGAAATAP

SEQ ID NO: 2123 - protein, 96 aa, Zea mays
  VARIANT 82: note = Ancestral polymorphism is A, Derived polymorphism is V
  VARIANT 77: note = Ancestral polymorphism is G, Derived polymorphism is A
  VARIANT 70: note = Ancestral polymorphism is A, Derived polymorphism is V
  VARIANT 68: note = Ancestral polymorphism is A, Derived polymorphism is S
  VARIANT 62: note = Ancestral polymorphism is A, Derived polymorphism is T
  VARIANT 29: note = Ancestral polymorphism is T, Derived polymorphism is I
METEKEAAAARQAKESLELAFQMSQILETGLDRHTLSLLMALCDRGANPEALAALVRELSSTAPPTAAEAPSPVSNAAAGPAPATASMFSSGLRRP

SEQ ID NO: 2124 - protein, 125 aa, Zea mays
  VARIANT 39: note = Ancestral polymorphism is P, Derived polymorphism is L
  VARIANT 1: note = Ancestral polymorphism is V, Derived polymorphism is M
MVELFHGMLETGVEPDMATRENLMAVCGRSGFHGDATEPYFQGSQLDDAVKAYMDMRKSRWTDAYNLLEEIKTDRASSTHQERGEMEKSTVTRGLPIAKVVYCFLNDPLSVSFHSPKWNKDESYV

SEQ ID NO: 2125 - protein, 55 aa, Zea mays
  VARIANT 11: note = Ancestral polymorphism is A, Derived polymorphism is T
MAASSALRADAILEKMQNNGMMKEILDSQDTTLMITADQVCSLHFFWHALLDNLS

SEQ ID NO: 2126 - protein, 50 aa, Zea mays
  VARIANT 13: note = Ancestral polymorphism is A, Derived polymorphism is V
  VARIANT 12: note = Ancestral polymorphism is T, Derived polymorphism is M
  VARIANT 2: note = Ancestral polymorphism is A, Derived polymorphism is V
MAVGDLAFKALTAGLGVATLYLAATFSVNVYRGLSWHSEQSKLEKAKTED

SEQ ID NO: 2127 - protein, 234 aa, Zea mays
  VARIANT 1: note = Ancestral polymorphism is M, Derived polymorphism is V
  VARIANT 9: note = Ancestral polymorphism is A, Derived polymorphism is V
  VARIANT 20: note = Ancestral polymorphism is Q, Derived polymorphism is L
  VARIANT 41: note = Ancestral polymorphism is R, Derived polymorphism is W
  VARIANT 137: note = Ancestral polymorphism is R, Derived polymorphism is M
  VARIANT 174..234: note = Derived polymorphism lacks residues 174 to 234
  VARIANT 181: note = Ancestral polymorphism is E, Derived polymorphism is K
  VARIANT 185: note = Ancestral polymorphism is R, Derived polymorphism is C
  VARIANT 209..234: note = Derived polymorphism lacks residues 209 to 234
MAAATEKTAEDIRRELQELQRQHREVHLLLCPAHLEASSLRAVCPDPLVVPSQITERLRDPCGLRRGTPGPGPGPGPPRPLRGFVRPVDGSENNEDDTKDADGEGQEAGSGATEGSDRRTFNIGGFRRDGSLWMQRRVDYNSLPEPAPRELPMNEDPSLAEQKVREESERLRQQEREQIAEKRKCDMMLHARVAAKAEEKSMELLYIHWTEHHKRLSNFLRRLLPAGYVLHYPV

SEQ ID NO: 2128 - protein, 380 aa, Zea mays
  VARIANT 191: note = Ancestral polymorphism is R, Derived polymorphism is M
  VARIANT 193: note = Ancestral polymorphism is S, Derived polymorphism is L
  VARIANT 195: note = Ancestral polymorphism is T, Derived polymorphism is I
  VARIANT 206: note = Ancestral polymorphism is S, Derived polymorphism is F
  VARIANT 254..380: note = Derived polymorphism lacks residues 254 to 380
  VARIANT 325..380: note = Derived polymorphism lacks residues 325 to 380
  VARIANT 337..380: note = Derived polymorphism lacks residues 337 to 380
MTFQIYCCPRTTAELEAHVADTSLVSADAPRVLADTVLDISGGERAFIEADEAKELLSPLTKPGNSYKRICFSNRSFGIGAANVAGPILDSVKNQLTEVDISDFVAGRPEDEALDVMRIFSKALEGSVLRYLNISDNALGEKGRKLRKLYLSLFLQLKLKVLHFHNNMTGDEGAMYIAEMVKRSPNVESFRCSATRIGSNGGVALSEALGTCTRLKKLDLRDNLFGVDAGLALSKTLPKLPDLVELYLSDLNLENKGTIAIAKALEQSAPQLEILLKMLPKYYNHVRAYDNTLITKKFGVHRITLKGGRKVRFVVMGNMFCTELRIPRKYDLKGSTQGRSTKKQNINENATLKDLDLSYVFHVDKPWRDTLFRKRLTLFI

SEQ ID NO: 2129 - protein, 486 aa, Zea mays
  VARIANT 89: note = Ancestral polymorphism is A, Derived polymorphism is G
MTPPAAPTMAAGDAVHVGRRRHVLLFPLPYQGHINPMFRLAGLLHARGFAVTVFHTQLNAPDPARHPEYRFVPVPNGSPVPVAIEDVVAHILELGRACEAAFRDRLASVLEEYSRDTVACLVADAHLLPIFEAAARLSVPTLALRTGSAACCACFLAYPMLFQKGYLPVQGKAACMRVCSLLLCPVSTYHHTQSQRDMPVLELPPYRVRDLLVIGEDGGGLARELITRATAAVKTSSGLILNTFDALERRELEGLRRDLAVPVFDIGPLHKFSPAGDSSLLLPDRSCLEWLDAWPPESVLYVSFGSVACMSARDLVETAWGIAGSGVPFLWVVRPGMVSGPADHRQQQLPEGFGAATHGRGMVVTWAPQEDVLGHRAVGGFWTHAGWNSTVESICDGVPMLCSPYFGDQMGNTRYVEHAWRVGIEVGGNIERGSVEAAIFRLMTHEDGAQMRTRAGELKKAAAECTAEGGSSCLAVDKLFTHMMSL

SEQ ID NO: 2130 - protein, 158 aa, Zea mays
  VARIANT 43: note = Ancestral polymorphism is R, Derived polymorphism is H
MEIDGMVNHLYQITKFVVSLFILSINCSLVFLELKLGPEELERWFTKIDHVFEHTRIPPVGEVLTPFYKTTVKKLQHYDLPLVGHVNHNFSVHAIHMGEDVLSVFEHAIKVLSCKDDLVDSRYVVSEYPLFPFCSSSYKCSNSMGYTCIMHTNFFSFF

SEQ ID NO: 2131 - protein, 83 aa, Zea mays
  VARIANT 5: note = Ancestral polymorphism is G, Derived polymorphism is V
MAGKGGSTNLEKEQMFGMAEKEMEYRVDLFNRLTQTCFNKCIEKRYKEAELNMGENSCIDRCVSKYWQVTNLVGQMLGNRPQM

SEQ ID NO: 2132 - protein, 472 aa, Zea mays
  VARIANT 258: note = Ancestral polymorphism is R, Derived polymorphism is H
MAAKPVTVGDLIHRVASSCLSNRLPCNHTFRDSVDSDFDDDDDDPFADAVSSSEKCRRSPPAAEVEEEEDEDEKLKIWEEREQEKERLAAASKGAERARDADALMAEVFDAVSGVRRAYAALQDAHCPWDPDKMRTADAAVVAELRHLARLRDRFRRSAAVGHIPRPNPSAPPLREAVAPYEAALDDLQRQLQSRQAEVDALKEKLAAATSRRNGRHHHVPPSKQNGGAPTAELFTTCAEQARAATRAFAGHLAHLMRAAGLELAAATRSLTKIPVSSPQLAKHALEAHATRALLGGFEHESFYLDGSLSSLLDPAAFRRERYAQFRDMRGMEPAELLGVLPTCAFGRYAAAKFAALLPPRVEEAVLGDAEHRRVVNAGAHPRTPFYGEFLRAAKAVWMLHLLAFALEPPPSHFDAGRGAEFHQEYMESVTGAPPHGGAGLVVGFAVAPGFRLGNGAVVRARVYLVPRGGRP

SEQ ID NO: 2133 - protein, 470 aa, Zea mays
  VARIANT 14: note = Ancestral polymorphism is L, Derived polymorphism is H
MDFHSLSRRELQALCKSNGIRANMSNAAMAEALRCLPAVDRIDEIGSTAPPPVSAMKEQTPDAEEAVGGEQEHGCPLPRGGRARGKRRKAGARKSKTEGDEEEVMVPGPQTLPGPKMTVAREAAAAPVDDAEEAAVGIRTRRSARSKVKVALDQKEEDVQAAAARKEQKVSDKSCEDSEEHAIVVGVVEEEEVRKPQEGQNVTRRAAPYKTHEDLQPDQRTAEELSMAKKRTRRSTRSKVAAAAQKGQKADSSDTTVGPEIDPKYDEVVPKVEEATKPQEGKNVTKRATAYIYKAHEEVQTGQVTAAPEATAEEVATTKRRRRRSTRSKVGAAARKAQKECAADTSDAVNGSTVSDDPKEEQVVEVIEEGTTKHNEEEREQINNVRQFASLPKLEDSPILGIVSKPNTADASDKAPVAHQEASKEDRFTFTGEADVSNLLVNTLDRFAKPVYESRVKEEKKCSECWWMLL

SEQ ID NO: 2134 - protein, 388 aa, Zea mays
  VARIANT 29..388: note = Derived polymorphism lacks residues 29 to 388
MSLEFRSECDDIEEAKSPSNTSVAAVAVKNGDASVYKIIHGYLKQKNNSIIKVAANVARKAASNKLSRKTSDVFDTLLQKQQSKWGNKAGPLLSGICYCIASCSMILLNKVVLSSYNFDAGISLMLYQNLISVLILLILELFRVISTEELTWKLIKVWIPVNLVFIGMLLTGMYSLKYINVAMVTILKNMTNIITAIGEIYIFRKGQNKKVWAALFLMIVSAVCGGITDLSFHLVGYTWQILNCFLTAGYSLTLRRLMDTAKQSTKSGSLNEVSMVLLNNALSIPFALILVIAFNEWEYVYQAEVIREPMFWVVATASGLLGLAISFSSVWFLHQTGPTTYSLVGSLNKVPISVAGILLFNVPVSVENFCSIVFGLFAGIFFAKAKMS

SEQ ID NO: 2135 - protein, 608 aa, Zea mays
  VARIANT 445..608: note = Ancestral polymorphism lacks residues 445 to 608
  VARIANT 395..608: note = Derived polymorphism lacks residues 395 to 608
  VARIANT 162..608: note = Derived polymorphism lacks residues 162 to 608
MATASLALSLRLAPSSRPLSLRRRGAAGVTCRATTATFHQLDAVAVREEESRFRTAAAEGRNLLPLTRCIFSDHLTPVLAYRCLVKEDERDAPSFLFESVEQGSEGTNVGRYSVVGAQPSMEVVAKANHVTVMDHEMKSRREHFVPDPMRIPRTIMEQWNPQIADSLPDAFCGGWVGFFSYDTVRYVETKKLPFSKAPHDDRNLPDIHLGLYSDVIVFDHVEKKTHVIHWVRTDCYRSVDEAYEDGRNRLEALLSRLHCLNVPTLSSGSIKLNVENFGPVMQKSTMSSEEYKNIVVQAKEHILAGDIFQVVLSQRFERRTFADPFEIYRALRIVNPSPYMAYLQARGCILVASSPEILTRVQKRTIINRPLAGTIRRGKTKAEDKTLEQLLLSDEKQCAEHIMLVDLGRNDVGKNLCHLYFFIIFYIRNIEKLLDDKILEWSWLKVSKPGSVKVEKLMNIERYSHVMHISSTVTGELRDDLTCWDALRAALPVGTVSGAPKVRAMELIDQLEVSMRGPYSGGFGGISFRGDMDIALALRTIVFPTASRFDTMYSYTDSKSRQEWVAHLQAGAGIVADSKPDDEHQECINKAAGVARAIDLAESTFLEE

SEQ ID NO: 2136 - protein, 218 aa, Zea mays
  VARIANT 118: note = Ancestral polymorphism is G, Derived polymorphism is E
  VARIANT 137..218: note = Derived polymorphism lacks residues 137 to 218
  VARIANT 176..218: note = Derived polymorphism lacks residues 176 to 218
MALRLSLAPPAAAPAASTCRCSSASFIRPGVAVGSRRGRARGCVVAMADLLGDLGARDPFPEEIESQFGEKVLGNVDTLHQILIPTLSALSLASLPLQPDAEPLSLDDARRLLFKVVGWRLVLSDGDGDEQRPARLQCVWKVRDETCGQELIARINAALHGAGHAPATLAFEAPNQVTAELSTPSAAGDSLTVNDYIVAARIDKVKTLDLIPKKRAWA

SEQ ID NO: 2137 - protein, 219 aa, Zea mays
  VARIANT 9: note = Ancestral polymorphism is R, Derived polymorphism is G
  VARIANT 11: note = Ancestral polymorphism is P, Derived polymorphism is L
  VARIANT 29: note = Ancestral polymorphism is G, Derived polymorphism is D
  VARIANT 31: note = Ancestral polymorphism is A, Derived polymorphism is V
  VARIANT 44: note = Ancestral polymorphism is R, Derived polymorphism is H
  VARIANT 52: note = Ancestral polymorphism is A, Derived polymorphism is V
  VARIANT 100: note = Ancestral polymorphism is L, Derived polymorphism is R
  VARIANT 107: note = Ancestral polymorphism is T, Derived polymorphism is M
  VARIANT 114: note = Ancestral polymorphism is W, Derived polymorphism is C
  VARIANT 121: note = Ancestral polymorphism is G, Derived polymorphism is D
  VARIANT 123: note = Ancestral polymorphism is D, Derived polymorphism is N
  VARIANT 186: note = Ancestral polymorphism is A, Derived polymorphism is T
MEELLGLARDPAAEEARLPPPPAHRRRPGLAVGLMESTVETEVRAAHNVLEACAQTDVMKRVVFTSSVTAVVWSGAGAHREEVADERSWSDLAFCRKFKLWHALAKTLSEKTAWALAMDRGVDMVAINAGMLLAAPGPGLGLGLTAAHPYLKGAPDMYDGGVLATVDVGFLADAHVAAYESPTAYARYLCFSNAVCRPEDAVKLAQMLSPAPPRSSPPR

SEQ ID NO: 2138 - protein, 304 aa, Zea mays
  VARIANT 159: note = Ancestral polymorphism is A, Derived polymorphism is S
MREPGRETFPYGSGPVLLSHSASPSHPQQRRAHMDTAVFSPADLFHGVDDSDDDRDEMQICSDGEKPVALEYQERVHDFPDMKLSVREFSCHELNANLLWPGTFSFATWLVKNRSILDGRRVLELGSGTGALAIFLRKAFEVNITTSDYDDGEIEKNISYNCRANALDVLPHIRHTWGDPFPVCTPNWDIVIASDILLYVKQYDNLVKTVSFLLNEYKQKDHKSGCITITDKSGTQISAKPPVFLMSWRRRIGKGHQSLFFDGCEKTGLQVQHLGDLVYLISNKQEADFVETKSDGGSSEGMIF

SEQ ID NO: 2139 - protein, 438 aa, Zea mays
  VARIANT 86: note = Ancestral polymorphism is W, Derived polymorphism is R
  VARIANT 58: note = Ancestral polymorphism is R, Derived polymorphism is C
  VARIANT 56: note = Ancestral polymorphism is A, Derived polymorphism is D
  VARIANT 41: note = Ancestral polymorphism is R, Derived polymorphism is W
  VARIANT 39: note = Ancestral polymorphism is Y, Derived polymorphism is H
MEWASAAYTAAALVCAAAASVVALAHIYRHLLHYAEPIYQRFIVRIIFMVPVTLSARRSHPQQTLAAKGALAPDLSPAFAGAFPYRVYAVMSFLSLILPDNAIYFNSIREIYDAWVIYNFLSLCLAWVGGPGAVVVSLSGRTLKPSWILMTCCYPAIPLDGRFIRRCKQGCLQFVILKPILVVITFILYAKGKYKDGNFSVNQSYLYITIIYTISYSMALYALALFYAACRDLLRPYNPVPKFIMIKSVVFLTYWQGVLVFLAAKSRFIKNADKAADLQNFVLCVEMLIAAIGHLFAFPYKEYAGPNARPSGGFRESLLHALKFNDFYHDTVHQFAPTYNEYVLYNHNEGDNAETKFPSGSTATSGQGVELAGITVVASNSPVTSSVSCNQADQEETMTTPIKDKVDPGGLYDLTELLDVDLSSYPDKVPAITDVRKQ

SEQ ID NO: 2140 - protein, 115 aa, Zea mays
  VARIANT 4: note = Ancestral polymorphism is R, Derived polymorphism is H
  VARIANT 96: note = Ancestral polymorphism is G, Derived polymorphism is A
MSVRVASVPYLEQMARWERQVERRQLFLRSYHFSRDADAAAALPPRARARRVVWAGMRRLRRAAATGLRRLRARLRLCFGWAARRRSSSRYGRLSGAGRPRAAAAAGAAESACFW

SEQ ID NO: 2141 - protein, 480 aa, Zea mays
  VARIANT 443: note = Ancestral polymorphism is R, Derived polymorphism is L
  VARIANT 426: note = Ancestral polymorphism is P, Derived polymorphism is Q
  VARIANT 118: note = Ancestral polymorphism is Q, Derived polymorphism is L
  VARIANT 47: note = Ancestral polymorphism is G, Derived polymorphism is S
  VARIANT 24: note = Ancestral polymorphism is E, Derived polymorphism is D
  VARIANT 23: note = Ancestral polymorphism is A, Derived polymorphism is D
MARPRPAAATLLLVTFLLAAAAAETTDVISGGGGMVGVDGTRFVVGGAAGGRPVYFSGFNAYWLMLVASEPARRDKVVAAFRQAADHGLNLARTWAFSDGGDTPLQAAPGVYDEAMFQGLDFVVAEARRHGIYLLLCLANNFHDFGGKRQYVQWARDAGHRLATDDDFFNSTVVKGYYKNHVKTVLTRVNTLTGVAYKDDPAILGWELMNEPRCDAEPTGAMVQAWVEEMAPYVKSVDGGHLVTAGLEGFYGAGAHESKDLNPWRIYYGTNFVETHRARGVDFATIHLYPDAWLWGCAADAQRAFLRNWTRAHARDAALYLRKPLLVTEYGKFLWEGVAGANRTQRDAFLRLVLDSIYASAARGGPLVGGAFWQLLDDGMDTLRDGYEIILPDDQLAATIIATHSRQLADLSLVTAEDVREEEAAPLRRRRRKSAHGKIHHVLSVGGGTSSDDSYYTQRLLHIFLLRLISLFESISSLFQ

SEQ ID NO: 2142 - protein, 172 aa, Zea mays
  VARIANT 12: note = Ancestral polymorphism is S, Derived polymorphism is F
MLASPALAGAHSFAASVYGSLLVPSPPVPAPARRAALSVVAKVKVATPQDDRIARHVRLRKKVSGTTERPRLSVFRSNKHLYAQVIDDTKQCTLASASTMHKSLSKEFEYSAGPTIEFDIGFQEIAQKIGEVIAKSCLEKGITKVVFDRGGFLYHGRIKALADSAREHGLEF

SEQ ID NO: 2143 - protein, 280 aa, Zea mays
  VARIANT 106: note = Ancestral polymorphism is S, Derived polymorphism is L
MEAILERPKYECLLFDLDDTLYPFSAGINLACRKNIQDYMRHHLHIEERQVADMCLDLYKEYGTTMAGLKALGYEFDNDEFHATVHGTLPYHNLRPDPVLRTLLLSIPQRKIVFTNSDKAHAEEALCRLGLQGCFDGVICFETLNPCNGPSAFRDGNGMLFPDETFPDSADLNESDGFRPISPILCKPSIEAMEAVTRIANVDPKKTIFFDDSTRNIASGKAAGFHTVIVGRPTLVPGADHALESIHNMKEALPEIWDGQDRSESDALLSPTAVETPVAA

SEQ ID NO: 2144 - protein, 186 aa, Zea mays
  VARIANT 114: note = Ancestral polymorphism is C, Derived polymorphism is Y
MEEAKVVESKDGTISVASAFAGHQEAVQDRDHKFLSKAVEEAYRGVDCGDGGPFGAVVVHNDEVIVSCHNMVLKNTDPTAHAEVTAIREACKKLGKIELSDCEIYASCEPCPMCFGAVHLSRIKRLVYGAKAEAAIAIGFDDFIADALRGTGYYQKANMEIKQADGNGAMIAEQVFEKTKAKFQMY

SEQ ID NO: 2145 - protein, 513 aa, Zea mays
  VARIANT 48: note = Ancestral polymorphism is L, Derived polymorphism is P
MKRSASVSAPPYCPCPCRAPRLPGSREAQGTMDRAVTRHGVPLFQVLLVFTAVIEIQWSTVSSIYCKDMPPNVYRPHSVTITEFGAVGDGVTLNTKAFQNAIFYLNSFADKGGAQLFVPAGRWLTGSFHLISHLTLSLDKDAIIIGSPDSSHWPVIDPLPSYGRGRDLPGKRHQSLIFGLNLTDVIITGANGSIDGQGAIWWGWFHNHTLNYTRPHLVELMYSTNVVISNLTFKNSPFWNIHPVYCSQVLVRHVTILAPLNSPNTDGVTPDSSTNVCINHCYVRNGGDVIVIKSGWDEYGISFAQPSSNISISDITGETRGGSGIAFGSEMSGGISEVRAVGLRIVNSLHGIRIKTAPGRGGYVENVYIADVSMDNVSMAIRITGNYGEHPDDKYDSTALPVISNITIKDVVGVNIGVAGILEGIQGDNFSNICLSNVSLSVQSAHPWNCSLIEGYSNSVIPESCEQLRSNCRQTSICYDGSSSSVMSVQQPRHTSPTSRLLDLFTGVGFILV

SEQ ID NO: 2146 - protein, 262 aa, Zea mays
  VARIANT 165: note = Ancestral polymorphism is V, Derived polymorphism is M
  VARIANT 129: note = Ancestral polymorphism is M, Derived polymorphism is R
  VARIANT 123..262: note = Derived polymorphism lacks residues 123 to 262
MSKPRLDGKVAIVTGGASGIGEAAARLFASSGATVVIADVQDALGEAVAASVGPRCAYARCDVTDEAQVEATVARAVAAHGRLDVMLSNAGVLLPTGSVMDMDLAELDRVMAVNFRGAAACVKHAARAMASGGGAIVCTASVASLQGGFGPASYTASKHALLGLVRAAAGELGRHGVRVNCVSPGGVATPLSCALMGVGPRELEAMTVPHNVLQGKVLRAEDVAEAALFLASDQAAFISGHNLVVDGATTAVNPAVLHTVGL

SEQ ID NO: 2147 - protein, 537 aa, Zea mays
  VARIANT 223: note = Ancestral polymorphism is G, Derived polymorphism is C
MSKAFAKSLSQLNKALVRRLKALVVVTRAQPPAPARPTTWSDALPSPSGGGGGVAVCKVEGGLLRSSSAFPYFMLVALEGGGLARALLLLLLYPALRLLGHDTAVRAMAVVTFLGLRKDAAAFRAGRASLPRLLLEDVSAEVFDAAVAPPRRRCVCVSAMPRAMVQPFLAEYLGVDAVVAPEVREFGGYYLGVMEDESEVLRRLDVDKVIAGDKKGGGCGVFGVAGLGSSFDQLFQNHCKEVYAPTESARRRWHALPRRRYPRPLIFHDGRIAFRPTPGATLAMFMWVPLGVALAVARVATFLALPFSLSVPLLAALGMHSRVIANPASASKSLFACNHRSLLDPLYVAAAAGRKDLAAATYSISRLSEALSPIPTFRLTRDRAADRAAMHARLRSCGGLVVCPEGTTCREPYLLRFSPLFAELGHDVAPVALHSSVGMFHGTTAAGWKALDPLFLLMNPTPAYIVHFLDTVDVECGGPEAARAVANELQRRIAEALGYTCTGLTRKDKYLMLAGNEGIVDVSHGGGGAKKRTTCAT

SEQ ID NO: 2148 - protein, 648 aa, Zea mays
  VARIANT 145: note = Ancestral polymorphism is I, Derived polymorphism is M
  VARIANT 87: note = Ancestral polymorphism is S, Derived polymorphism is F
MDPDTAVASADGGPFLEFVDYAISMLSSSAGDGDGYESPGDGPAPARPPWGWAVAQLLKSCCAYSSGVTAAILLSDLFQSWTEQRKSLTLKRKVKLPKLINTKNKRRRLPNTVTIDSIHEKNFLSPNSVLEVVVIAVFVLPGTNIYMLTLGDMWSASTIDIYLHRRYYDCIGQNGILKKGREVMLTGCCLRTAMEGSGHARILPTEYMVILLDEEQDEDALLLAAQFCNYSFSSLILEESRNNVPYSFYARIEKIESLEPFRCAERMQIILEDNDNAKMKLVLWGEQTSLANLCSVGSMLALDRPFIANFIDNNHEDSQELCLEYGSATQVYMVPIAQQEEQVPFTPTQVKSQGPRLSCVLTDNVASQVTLPRDLYGSVDFSKYPFRAYVSDLHDKMVGISLFGTVTSVCKVSTSGTTFYLELEDTTGVVLMKLIFVGPWSLGRVGVGHMVYISGLTCALSSTNILEVSWREKEPGSLFVNLSLLPALLNSSCLHNLSPLSDLPRSTNRTHISHVRLDGIDCDSLKVSLFHNICGSVVNEHSGVLQCSFCKCACESVCARGFQLHLTIADDSADVLAWCVGQTAVEFLQISPDEYLELPEDERAMYLYTLQNESFVVAIANTRKRVDGCAVGDEAVPAWEITRAQKCE

SEQ ID NO: 2149 - protein, 477 aa, Zea mays
  VARIANT 25..477: note = Derived polymorphism lacks residues 25 to 477
  VARIANT 32: note = Ancestral polymorphism is P, Derived polymorphism is L
  VARIANT 102..477: note = Derived polymorphism lacks residues 102 to 477
  VARIANT 107: note = Ancestral polymorphism is L, Derived polymorphism is Q
  VARIANT 144..477: note = Derived polymorphism lacks residues 144 to 477
  VARIANT 243: note = Ancestral polymorphism is S, Derived polymorphism is L
MFDGDPAAEPFGRLGPADVCSREHQDLALDAPRQGVVLLKNRSGGWLHPYFAATPILCSYLIRSGGRPLPAPLHLAREGKDLAAKFWQLSLCESNDTYRRLWMHVYLRSWSLISPDEVKLSQFSFSILLGETQPQVSSGLKLWEGSLDLVKALNSDIKEYKLRVEGKHVLELGCGHGLRGIFAGLKAGKSAPHSLRHTFVDGSISELFEYCDLVLARSFHCHKAQTLVLVSLTRDSRLDKLCSNLLAQESDEKRHEKGKAEFKKVVESLGHVILGWRLVPTDNSDLGESALETEPVIEQVFVTKSSRSEAEFEQQVLSRKQKEKKQMATLRAAVGMLLGGEDMHRFPVRSPRMDRGDLICSPAARQIVSNYFSMFGPVQDVRIPYQQKHMFGFVTFVYAETVKVIPSKGNPHFVCYARVLVKPYKEKGKIPGRFRKLQHAHHGGAEFGDCASPTRLLDFRDPYALLLLSGAQVFSWA

SEQ ID NO: 2150 - protein, 564 aa, Zea mays
  VARIANT 120: note = Ancestral polymorphism is R, Derived polymorphism is C
MAAAVVVRRAAGLIPLLSSRFGARMPLHRALSQIPPPRFCRLLSQQTKPFSASASNGAATDRTRELRLYNTKSRKKEQFRPRIPGREVGMYVCGVTPYDDSHIGHARAYVAFDVLYRYLRYLDYEVRYVRNFTDIDDKIIARANQLGEDPFSLSKRFSDDFLSDMANLQCLPPSVEPRVSDHVDEIINMIKQILDNRCAYVVGGDVYFSVDNFPEYGELSGRKLDDNRAGERVAVDERKRNPADFALWKAAKDGEPWWDSPWGPGRPGWHIECSAMSAHYLGHSFDIHGGGEDLIFPHHENEIAQSRAACCDSTINYWIHNGFVNVNSQKMSKSLGNFVTIRKVIEMYHPLALRMFLLGTHYRSPINYTIEQLNVASDRLYYTYQTLRDCEEICQHQQSNTGNPLPANTLNYIQKLHDEFETSMSDDLHTSVALAAMSEPLKVMNDLLHTRKGKKQDKRLESLSALEEKIRVVLSVLGLLPSSYHEALQQLRDKALRRASITEELVVQKIEERTAARKAKQYEKSDEIRKELAAVGIALMDGPDGTTWRPSLPLPEEEAVLAKT

SEQ ID NO: 2151 - protein, 379 aa, Zea mays
  VARIANT 338: note = Ancestral polymorphism is D, Derived polymorphism is A
MLGPLLRLLSACGGVWPTSPAPGAAASSSASSGDDSEGRDGLLWWRDLARCHAGDVSVAVAQANQVLEDQCRLDSAPSIGTVVGVFDGHGGPDAARFACDHLVPNLREASSGPRGVTADAIREAFLATEEGFLALVSSLWEAQPDIATAGTCCLVGVVHNRTLFVANLGDSRAVLGKKAGRAGQIAAEQLSSEHNANQEAVRQELMAQHPDDAQIVALKHGVWRVRGLIQVSRSIGDVYLKHAKYNTDQIKPKFRLPESFSKPLLSADPSIISRDLEPNDCFIIFASDGLWEHLSNQEAVEIVHSHQRAGSARRLIKAALQEAARKREMRYSDLTKIDKKVRRHFHDDITVIVLFINYDLLLKGAPQGQPLSIRCALDY

SEQ ID NO: 2152 - protein, 231 aa, Zea mays
  VARIANT 10: note = Ancestral polymorphism is A, Derived polymorphism is V
  VARIANT 25: note = Ancestral polymorphism is R, Derived polymorphism is C
  VARIANT 85: note = Ancestral polymorphism is G, Derived polymorphism is R
  VARIANT 115: note = Ancestral polymorphism is A, Derived polymorphism is G
MPAAMAAAAAQRLLAASTKIIGVGRNYIAHAKELGNPVPKEPVLFLKPTSSFLHAGVATAAVEIPEPLESLHHEVELAVVISRRGRDVPEASAMDFVGGYALALDMTARDLQSVAKSAGLPWTLAKGQDTFTPISAVVPKSAVTNPDDLELWLKVDDELRQKGPTSDMLFKIPFLISYISSIMTLMEGDVILTGTPEGVGPVRVGQKITAGITDLIDVEFDVQRRNRSFST

SEQ ID NO: 2153 - protein, 227 aa, Zea mays
  VARIANT 99: note = Ancestral polymorphism is A, Derived polymorphism is V
  VARIANT 36: note = Ancestral polymorphism is A, Derived polymorphism is V
  VARIANT 33: note = Ancestral polymorphism is A, Derived polymorphism is V
  VARIANT 30: note = Ancestral polymorphism is P, Derived polymorphism is S
  VARIANT 2: note = Ancestral polymorphism is A, Derived polymorphism is T
MAAAVLSVRTTTTSLLAAVVLCLCVVSLSSRGAAAARVSPGASPIVATCMTGPYPELCVAELGQRLLDVQTSIASAAPDQRAARIAGAPGQVDVRALVAVALEAASEAGAVAVSIFEGKLPGFNTGVPDFRRCLGNCTVTMRSAMQKLHGATAALHSGDTQVARTLAMRSAADVSSCTVSCRELNGDVRLIVVQSLTEFTKMLQIAVSFISKMKPLPPSAPARTATP

SEQ ID NO: 2154 - protein, 227 aa, Zea mays; identical to SEQ ID NO: 2153
  VARIANT 99: note = Ancestral polymorphism is A, Derived polymorphism is V
  VARIANT 36: note = Ancestral polymorphism is A, Derived polymorphism is V
  VARIANT 33: note = Ancestral polymorphism is A, Derived polymorphism is V
  VARIANT 30: note = Ancestral polymorphism is P, Derived polymorphism is S
  VARIANT 2: note = Ancestral polymorphism is A, Derived polymorphism is T

SEQ ID NO: 2155 - protein, 218 aa, Zea mays
  VARIANT 12: note = Ancestral polymorphism is K, Derived polymorphism is R
  VARIANT 22: note = Ancestral polymorphism is G, Derived polymorphism is R
  VARIANT 28: note = Ancestral polymorphism is G, Derived polymorphism is V
  VARIANT 40: note = Ancestral polymorphism is H, Derived polymorphism is Y
  VARIANT 42: note = Ancestral polymorphism is G, Derived polymorphism is D
  VARIANT 45: note = Ancestral polymorphism is M, Derived polymorphism is I
  VARIANT 58: note = Ancestral polymorphism is G, Derived polymorphism is R
  VARIANT 103..218: note = Derived polymorphism lacks residues 103 to 218
MVKGSTGGYLERLTYHEVAPSGSVIKPGWLMTKYAIEEEHGGGAMVLCKVYRSPRGPGSEVSSSRCKRKACVVVEEEQPAEQTQRPMKRMNEEDMFLTGNIVQPSEFTIEELLMGSSSSTPGGCSSMAIPAASADDQNTEKTDDERQPLNQEEQLMLPCAPQAENEDDVMAISFKELRGASSSSSSSPCAAQSNSPLHVQPKNVGDEIEFTLEELMGS

SEQ ID NO: 2156 - protein, 300 aa, Zea mays
  VARIANT 235: note = Ancestral polymorphism is E, Derived polymorphism is V
  VARIANT 212: note = Ancestral polymorphism is E, Derived polymorphism is K
  VARIANT 167: note = Ancestral polymorphism is T, Derived polymorphism is M
  VARIANT 91: note = Ancestral polymorphism is G, Derived polymorphism is E
  VARIANT 90: note = Ancestral polymorphism is A, Derived polymorphism is T
  VARIANT 48: note = Ancestral polymorphism is T, Derived polymorphism is A
  VARIANT 44: note = Ancestral polymorphism is A, Derived polymorphism is D
  VARIANT 23..300: note = Derived polymorphism lacks residues 23 to 300
MDDDDVSPDARDVYVANATVSSYFAASDVASADRLFAEVSTDVADVVTWTTMVAGHASSGGLGRARHFFDAMPERNVISWNTMLRAYARAEMLTEARGLFNAMPTRNAATWSCMISGLVLSGRCWEALHDQGLFGDMVRSSGIVPNEPALVSVVSACAQLRSLEHGTWVHAYAEQELHGAMSVVLASAIVDMPCRSGRVMEALYFVKSMPVEPHPGLWGALASACKMHGKVELGEEVAKKLIELEPRHGSRYILLSNLYGSVNRWDDMASVRKILKRSKVPKGTGNAVVGMTSASCMSNG

SEQ ID NO: 2157 - protein, 693 aa, Zea mays
  VARIANT 539..693: note = Derived polymorphism lacks residues 539 to 693
  VARIANT 535..693: note = Derived polymorphism lacks residues 535 to 693
  VARIANT 249..693: note = Derived polymorphism lacks residues 249 to 693
  VARIANT 207..693: note = Derived polymorphism lacks residues 207 to 693
  VARIANT 167..693: note = Derived polymorphism lacks residues 167 to 693
MAGGGLQGAKKRKREHAEGKAKPRKQVKGGGDGAKRKSHSAAGGYTAHGGAGEVVARKKTPVTPKEKRLAAKEMSEARKMKRRQHYSLEKVLQCCFSAPYVPVAKFNACLLCLTLNTGQELTKLWEKMRCHDVSKEERSKAVSQAIHKMDGKYLDIATSHVTARVLQTCVKWCSESERDAIFDVLQPHLLTLSCKKYAVFLVKKLIELASKKQFASFISSLHGRVANLLHHTIGAAVVDYAFQRGTQRQKRQLLVELYSPELQLFKDLTVQSSSCLIDTISKLGLQISSVLLHMTIVIDKILEKGTVEYLIVHTAILEYFTIADKTSASDAICQLIPLLTQGALIIDGDEPTNAPELPKKAKAKKKRSKEPLIVRIMQTREGLKLGISCVKYGSAKDRKKIIKSLKGHIMKLALSDFGCLFLICIISIVDDTKLVNKIVIQELVKHLKQLIFDKNGRRPLLQLLHPFCSRYLSPNDLACLNYNVPSLSSTEVETSESAIGVITENKLDDVTAQDPNGLEGKQIVFESKKDPLQRRHELLIKSELAEALVQSCIENVGELLRTNFGKEVLYEMAVGGKDNVLDGLTDRIHMLHDAIASDAAQPKTEDTEHAFENFFSSRVIRRMVIDCPAFAVTLWRKALQGKCKIWAEGHSSKVVASFLESPSTEVKDLAKPELQPLVDAGILKVPDPKVVQK

SEQ ID NO: 2158 - protein, 163 aa, Zea mays
  VARIANT 15: note = Ancestral polymorphism is P, Derived polymorphism is L
  VARIANT 129: note = Ancestral polymorphism is V, Derived polymorphism is A
MDSSVEKQGSVALDPDERAPASGETKACTECHTTKTPLWRGGPCGPMSLCNACGIRYRKKRREAMGLESSSKAATAGGSEHQQQQRKKKATAAAAAASSKRERERERERNKEADEVTVELRAVGFGKEVVLKQRRRMRRRRRLGEEERAAILLMALSSGVVYA

SEQ ID NO: 2159 - protein, 78 aa, Zea mays
  VARIANT 12: note = Ancestral polymorphism is A, Derived polymorphism is T
  VARIANT 13..78: note = Derived polymorphism lacks residues 13 to 78
  VARIANT 16: note = Ancestral polymorphism is A, Derived polymorphism is E
  VARIANT 21: note = Ancestral polymorphism is G, Derived polymorphism is R
  VARIANT 40: note = Ancestral polymorphism is R, Derived polymorphism is W
  VARIANT 43: note = Ancestral polymorphism is R, Derived polymorphism is S
  VARIANT 46: note = Ancestral polymorphism is G, Derived polymorphism is R
  VARIANT 52: note = Ancestral polymorphism is V, Derived polymorphism is M
  VARIANT 59: note = Ancestral polymorphism is S, Derived polymorphism is W
MRGLQEEFRGGAQPAASHDGGGSEGRAASWWSSGDPEAKRRRRVAGYKAYAVEARVKASLRKGFRWIKDRCTGLVRRY

SEQ ID NO: 2160 - protein, 354 aa, Zea mays
  VARIANT 15: note = Ancestral polymorphism is C, Derived polymorphism is Y
MAAMLVGALRRGSGCRGGLRLIAHSLRRFVSTLVVAEHEGGFVKPSSLSALAAAEAIAKDNKVSVLLGGSGPALHKAADHAACSHPLVSEVLVADSEALAHPLAEPWAELLRSVQQKGGYSHVIASSTSFGKNLLPRAAALLDVSPVTDVTAVKEPHVFVRPIYAGNALCTVKYTGEGPCMMSIRSTSFSPATEAMSETKVAPITQVDLSFLSEGKSTWVNLTSQDTERPDLANAPVVVTGGRGLKSAENFKLLEQLAEKLGAAVGATRAAVDAGYVPNDLQVGQTGKIVAPDLYMAFGVSGAIQHLAGMRDSKVIVAVNKDADAPIFQVADYGLVADLFEVLDELLKKIPEKK

SEQ ID NO: 2161 - protein, 681 aa, Zea mays
  VARIANT 411..681: note = Ancestral polymorphism lacks residues 411 to 681
  VARIANT 95..681: note = Derived polymorphism lacks residues 95 to 681
  VARIANT 84..681: note = Derived polymorphism lacks residues 84 to 681
MASSGLAYPDRFYAAAAYAGFGAGGATSSAAISRFQNDVALLLYGLHQQATVGPCNVPKPRAWNPVEQSKWTSWHGLGSMPSAEAMRLFVKILEEEDPGWYSRVPEFNPEPVVDIQMHKPKDEPQSVPASTNGTSISEPKIISENGSSVETQDKDVILEGLSTVISHDEWTPLSVSGLRPKPRYEHGATVLQNKMYIFGGNHNGRYLSDLQALDLKSLIWSKVDTKFQAEPADSTITTQIAPCAGHSLISWGNKFLSIAGHTKDPSEGITVKEFDPHTCTWSIVKTYGKPPVSRGGQTVTLVGTTLVLFGGEDAKRCLLNDLHILDLETMTWDDVDAIGNPPSPRSDHAAACHADRYLLIFGGGSHATCFNDLHVLDLQTMEWSRPKQQGLTPSPRAGHAGATVGENCDPLSFSSYFYVKHLSITHTLASTGVSETLVLNMSTLTWSVVSTVEGRVPLASEGMTLVHSNYNGYDYLVSFGGYNGRYSNEVYTLKLSLKSDSQPIVEEETVSDTISRVREPETEISQDGRIREIAMDSADSDLNNRNDEASEQLVADLKAQKEELEATINREQLQTVQLKEDIAQAETRNAELTKASSLTLFLLELQAVRGQLASEQSRCFKLEVDVAELRQKLQSMDALEKEVELLRRQKAASEQAALDAKQRQGSGGMWGWLAGSPPPSQ

SEQ ID NO: 2162 - protein, 500 aa, Zea mays
  VARIANT 10: note = Ancestral polymorphism is H, Derived polymorphism is L
  VARIANT 34: note = Ancestral polymorphism is S, Derived polymorphism is I
  VARIANT 41: note = Ancestral polymorphism is V, Derived polymorphism is A
  VARIANT 78..500: note = Derived polymorphism lacks residues 78 to 500
  VARIANT 132..500: note = Derived polymorphism lacks residues 132 to 500
  VARIANT 134..500: note = Derived polymorphism lacks residues 134 to 500
  VARIANT 148: note = Ancestral polymorphism is V, Derived polymorphism is A
MQQLQPKQMHWVRADSSDFGGDRPAPRSGHTAVIIGKSKVVVFGGFADKRFLADVSVYDVENKLWYTPECTGNGSDGQAGPSPRAFHIAVVIDCNMFIFGGRSGGKRLGDFWMLDTDLWQWSEMTGFGDLPSPREFAAASAIGNRKIVMYGGWDGKKWLSDVYIMDTMSLEWTELAVTGSVPPPRCGHSATMIEKRLLIFGGRGGAGPIMGDLWALKGITEEDNEAPGWTQLKLPGQSPSPRCGHSVTSGGPYLLLFGGHGTGGWLSRYDVYYNECIILDRVSVQWKRLPTSNEPPPPRAYHSITSIGSRFLLFGGFDGKNTFGDLWWLVPEDDPIAKRDLVPSIDSNSKPSTVTDDNQLLNLKESQALENPITELAKRLGIALSEEVSASFVDEANDKELVELSSRLAGQSLPASDQVASIQVLRDHWKSSPASSLQLQELGPLLRDYQRLILRHYTGNSLPAFREMEALRFFHLKSASQLRMDDIPVLLSEYGRLLST

SEQ ID NO: 2163 - protein, 392 aa, Zea mays
  VARIANT 316: note = Ancestral polymorphism is L, Derived polymorphism is I
  VARIANT 314: note = Ancestral polymorphism is I, Derived polymorphism is N
  VARIANT 271: note = Ancestral polymorphism is R, Derived polymorphism is S
  VARIANT 165..392: note = Derived polymorphism lacks residues 165 to 392
  VARIANT 161: note = Ancestral polymorphism is K, Derived polymorphism is I
  VARIANT 54: note = Ancestral polymorphism is A, Derived polymorphism is G
MADGEDIQPLVCDNGTGMVKAGFAGDDAPRAVFPSIVGRPRHTGVMVGMGQKDAYVGDEAQSKRGILTLKYPIEHGIVNNWDDMEKIWHHTFYNELRVAPEEHPVLLTEAPLNPKANREKMTQIMFETFNAPAMYVAIQAVLSLYASGRTTGTCPLSPLIKVFLGQRIVLDSGDGVTHTVPIYEGYALPHAILRLDLAGRDLTDCLMKILTERGYSFTTTAEREIVRDIKEKLAFVALDYEQELETAKSSSSVEKSYELPDGQVITIGAERFRCPEVLLQPSLIGMEAPGIHETTYNSIMKCDVDIRKDLYGNIVLSGGTTMFPGIADRMSKEITALAPSSMKIKVVAPPERKYSVWIGGSILASLSTFQQMWISKDEYDESGPAIVHRKCF

SEQ ID NO: 2164 - protein, 216 aa, Zea mays
  VARIANT 210: note = Ancestral polymorphism is R, Derived polymorphism is W
  VARIANT 186: note = Ancestral polymorphism is P, Derived polymorphism is L
  VARIANT 168: note = Ancestral polymorphism is T, Derived polymorphism is M
  VARIANT 130: note = Ancestral polymorphism is L, Derived polymorphism is R
MAFWEGWCGGKGDGCCDDCSWTQLAIWAAAIVVVGGLITVLVLAFGVVFPPKATADDAVLQRFALAPADPASNSTISFNVTATVSLRNPNMYRAIEYGALAVTFSFNGTRFDDSASVPGFKHKARKTATLSVRVGGVGKPIKLTRPGVGEFRAENDTGSFGVEMRLDTVLQYKGRSAKCPLVVVCPLQLQLVDPDVAATAFQRTKCTILRAKKSGC

SEQ ID NO: 2165 - protein, 340 aa, Zea mays
  VARIANT 322: note = Ancestral polymorphism is T, Derived polymorphism is M
  VARIANT 102: note = Ancestral polymorphism is A, Derived polymorphism is S
MSFFLKKGPYAIGVVEPMAQGAAGGAEARPFITYHNSLQRDLYLRIATELHLKRMLVGGLEKVYEIGRIFRNEGISTRHNPEFTTIEMYEAYSDYESMMNMAEEIVTRCAMATHGKLKVDYEGTEISLERPWRRETMHSLVKEATGIDFNSFGQDVESAKRAVRGLPGFVVGNSESTSLQACSSVGHVLNEVFETFVESTLVQPTFVLDYPVEISPLAKPHRSHVGLTERFELFICGREIGNAFSELTDPIDQRSRFENQIKQHNAKRAAMAKEVKSTEGEGDDDYSYEVSLDEDFLTSLEYGMPPASGMGLGIDRLVMLLTNSSSIRDVIAFPVLKIQQ

SEQ ID NO: 2166 - protein, 285 aa, Zea mays
  VARIANT 133..285: note = Derived polymorphism lacks residues 133 to 285
MFLKFLKWRREAAPGGSVPEEQVRRELSQDKLCMGGGDRAGRPILVAFAARHFSVGRDMAEFKSFVVYFFDKICARIPRGQEKFLCIVDLKGWGYSNCDVRAYIAAIEILQVYVHVNKVHTKKAAAPKIAKQESSDDDTSDETFESDEEPAKKPAAKPLAAVAKNGSKTVKQESSSDEDSSEDESDDDSDDGSDIVFNLLNRVYDDVGKRWSSLSDHKWDNANYLEPKQINRYLTRVTFGLFNAKPRGVIDFDDYRNKDEVSVLTEEFKTQLTIREDLFITTKVV

SEQ ID NO: 2167 - protein, 205 aa, Zea mays
  VARIANT 51: note = Ancestral polymorphism is G, Derived polymorphism is C
  VARIANT 60: note = Ancestral polymorphism is A, Derived polymorphism is T
  VARIANT 98..205: note = Derived polymorphism lacks residues 98 to 205
  VARIANT 102: note = Ancestral polymorphism is R, Derived polymorphism is C
  VARIANT 130: note = Ancestral polymorphism is C, Derived polymorphism is Y
MADVDEYRCFIGNLSWSTTDESLKDAFSKFGNLTEAKVVLDKFSGRSRGFGFVTFDEKQAMEDAIEGMNGLDLDGRNITVDKAQPQGPGRDRNGDRDYDRERGSRYERGRDYGGGRAPRGGGGGGGGGDCFKCGKPGHFARECPSGDGGRGDRYGGRDDRYGGGGGGGGGRYGSDRGGDRYSGRSRDGGSYGGGDRYSRDRSGPY

SEQ ID NO: 2168 - protein, 479 aa, Zea mays
  VARIANT 137: note = Ancestral polymorphism is R, Derived polymorphism is W
MAVFGGGPVLVAVALACAGLVVWLRSRSSSSKEMGDIPGTMGWPVVGETFSFISDFSSPAGILSFMRDRQRRFGKVFKTYVLGRVTVFMTGRDAAKILLSSGKDGVVSLNLFYTGKQVLGPTSLLTTNGDEHRKLRRLIGEPLSVDALKKYLGFINDLAVQTLDTWHGRSRVLVLEEASSFTLKVIANMLVSLEPEGEEQEKFRANFKVISSSFASLPLKVPGTAFHRGLKARNRMYAMLDSVIARRRSGSEGEAAAPSDFLQTLLRKHAGDEADKLTDAQLKDNILTLLVAGHDTTTAGLTWLVKFLGENPDVLDKLREEHLEIKESLNGSSRLRWSDVNNMPYTNKVMNETLRRATILPWYSRKAAQDFSIDGYAIKKGTSVNLDVVSIHHDPAVFADPNRFDPNRFDETLKPYSFLGFGSGPRMCPGMSLAKLEICVFVHHLVCRYTWKPLEDDDTVQPTLVRMPKNKYPIMPTAL

SEQ ID NO: 2169 - protein, 843 aa, Zea mays
  VARIANT 760..843: note = Derived polymorphism lacks residues 760 to 843
  VARIANT 705..843: note = Derived polymorphism lacks residues 705 to 843
  VARIANT 16..843: note = Derived polymorphism lacks residues 16 to 843
MVKFTAEELRAIMDKKNNIRNMSVIAHVDHGKSTLTDSLVAAAGIIAQEVAGDVRMTDTRADEAERGITIKSTGISLYYEMTDESLKNYKGERDGNQYLINLIDSPGHVDFSSEVTAALRITDGALVVVDCIEGVCVQTETVLRQALGERIRPVLTVNKMDRCFLELQVEGEEAYQTFSRVIENANVIMATYEDKLLGDVQVYPEKGTVAFSAGLHGWAFTLTNFAKMYASKFGVDESKMMERLWGENFFDPATKKWTTKNTGSPTCKRGFVQFCYEPIKQIIKTCMNDQKEKLWPMLQKLNVTMKADEKELIGKALMKRVMQTWLPASTALLEMMIFHLPSPAKAQKYRVENLYEGPLDDVYATAIRNCDPEGPLMLYVSKMIPASDKGRFFAFGRVFSGKVATGMKVRIMGPNYVPGQKKDLYVKSVQRTVIWMGKKQESVEDVPCGNTVAMVGLDQFITKNATLTNEKETDACPIRAMKFSVSPVVRVAVQCKVASDLPKLVEGLKRLAKSDPMVLCTMEESGEHIIAGAGELHLEICLKDLQEDFMGGAEIIVSPPVVSFRETVLEKSCRTVMSKSPNKHNRLYMEARPLEEGLAEAIDDGRIGPRDDPKVRSQILSQEFGWDKDLAKKIWCFGPETTGPNMVVDMCKGVQYLNEIKDSVVAGFQWASKEGALAEENMRGICFEVCDVVLHADAIHRGGGQVIPTARRVIYASQLTAKPRLLEPVYLVEIQAPENALGGIYGVLNQKRGHVFEEMQRPGTPLYNIKAYLPVIESFGFSSQLRAATSGQAFPQAVFDHWDMMGSDPLEAGSQAAQLVLDIRKRKGLKEQMIPLSEFEDKL

SEQ ID NO: 2170 - protein, 191 aa, Zea mays
  VARIANT 103..191: note = Derived polymorphism lacks residues 103 to 191
MIQVLLEAVCIVWGNKGYVAAYILKRFDYTLSTIATETLAVGDGFCYFGMLSFISMIEQIQNVCTAKVNLSDEIDLEDYVCRPDSTIENTSKNKNVELGFSDEERDQEFPDFPSFIPFLPPLSAANLKVYYATRFTIIVGIMVFGGFLAPIKCTQVIHPVKSKTFESLWANCVAIDASESWLMNSLCLLLE

SEQ ID NO: 2171 - protein, 184 aa, Zea mays
  VARIANT 148: note = Ancestral polymorphism is G, Derived polymorphism is S
  VARIANT 124: note = Ancestral polymorphism is C, Derived polymorphism is F
  VARIANT 118..184: note = Derived polymorphism lacks residues 118 to 184
  VARIANT 113: note = Ancestral polymorphism is D, Derived polymorphism is N
  VARIANT 104..184: note = Derived polymorphism lacks residues 104 to 184
  VARIANT 102: note = Ancestral polymorphism is P, Derived polymorphism is L
  VARIANT 84: note = Ancestral polymorphism is A, Derived polymorphism is V
  VARIANT 81: note = Ancestral polymorphism is D, Derived polymorphism is V
  VARIANT 63: note = Ancestral polymorphism is R, Derived polymorphism is C
  VARIANT 58: note = Ancestral polymorphism is P, Derived polymorphism is L
  VARIANT 56: note = Ancestral polymorphism is G, Derived polymorphism is R
  VARIANT 55: note = Ancestral polymorphism is V, Derived polymorphism is I
  VARIANT 50: note = Ancestral polymorphism is L, Derived polymorphism is V
  VARIANT 47: note = Ancestral polymorphism is R, Derived polymorphism is W
  VARIANT 27: note = Ancestral polymorphism is W, Derived polymorphism is R
  VARIANT 6: note = Ancestral polymorphism is L, Derived polymorphism is P
MLQNPLATVITALLSAANNPFLDQRPREPAAELLQALLPASSEGLVRVTLKKQPVGGPEERQRLLLRGANTLGSGGDDESVVIALKNYMNAQYFGEIGVGSLQQKFTVIFDTDSSNLWVPSSKCYFSIACYFHSRYKSGQSSTYKKNGLTLPFLSCYCIVFPICSLWTEICITFVIRLYFPAGF

SEQ ID NO: 2172 - protein, 557 aa, Zea mays
  VARIANT 38: note = Ancestral polymorphism is A, Derived polymorphism is G
  VARIANT 199..557: note = Derived polymorphism lacks residues 199 to 557
MAAANGDACRSVGGVPRPTNPMVTPLLTDLYQFTMAYAYWKAGKHLDRAVFDLYFRKNPFGGEFTIFGGLEECIRFIANFKFTEEEIKFLRSVMPACEDDFFEYLRSIDCSDVEVYAIPEGYAVFPKVPLMRIEGPVAVVQLLETPFLSLVNYASLVTTNAARHRLVAGKSKNLLEFGLRRAQGPDGGISASRYCYMGGFDATSNVAAGRLFGIPIRGTHSHAFVSSFMGLDEITDKTLTSSDGSNTCEDFISLVQNWLIRIQDSSSLHGTFGETSQSELAAFTSYALAFPNSFLALVDTYDVMRSGVPNFCAVALALNDMGYKAVGIRLDSGDLAYLSVEARKFFHAVEKEFVVVGFGKTSITASNDLNEETIDALNKQGHEVDAFGIGTYLVTCYAQAALGCVFKLVEINKQPRIKLSEDVMKVSIPCKKKCYRLYGKEGYPLVDIMTGEDEPGPKIGERLLCRHPFNESKRAYVVPQHVEELLKCYWPGNSSNSREELPSIHEIRTRCIHHLDRMRPDHMRRLNPTPYKVSVSAKLYDFIHFLWLNEAPVGELQ

SEQ ID NO: 2173 - protein, 222 aa, Zea mays
  VARIANT 118: note = Ancestral polymorphism is N, Derived polymorphism is I
MSSSAKAKAKASGGKRAAAAKDPAEAVVSDKRRRERGGMDDSDHEFDSDMKEIVTLLKHIKDKAHKDGQKKTEQAISSVATEIQTMVQDTKNRLEKERQSFLKALSKTSKECESLLKNEYTKFLATHDKFCKDKVAHIQNFKDLFSKFEDDKEKLLVQYELQRKKEKATLSELEKTFSEKIANAEESLKKMKQDDKSIHILRKSIGSFLSGDPDDQSGQDDD

SEQ ID NO: 2174 - protein, 852 aa, Zea mays
  VARIANT 436..852: note = Derived polymorphism lacks residues 436 to 852
  VARIANT 76: note = Ancestral polymorphism is P, Derived polymorphism is S
MRPLRRSSGGLAALGCCLFLLPLLSRGADMPLGSTLSPGNSATWTSPNSTFSLGFTASASSPSLFVAAITYAGGVPVWSAGNGAAVDSGSSFRLSSNGDLQLVNGSGAVLWSSNTGGQNVSAAAVQETGNLVLKDKTGAALWQSFDHPTDTVVMSQNFTSGMNLTSGSYAFSVDRATGNLTLRWTGAGSTVTYFNRGYNTSFTGNKTLTAPTLTMQTNGIVSLTDGTLTSPAVVAYSSNYGESGDMMRFVRLDADGNFRAYSAARGSNAATEEWSAVADQCQVFGYCGSMGVCSYNGTSPVCGCPSLNFQLSDPSKPRAGCTRKLELASCPGNSTMLELDNTQFLTYPPEITTEQFFVGITACRLNCLSGGSCVASTALSDGSGLCFLKVSSFVSGYQSAALPSTSFVKVCSPPLPNPAPGSAAAPSAGGSGFRAWVVAVVVLGVVSALVLCEWALWWFLCRHSPKYGPASAQYALLEYASGAPVQFSYRELQRSTKGFKEKLGAGGFGAVYRGVLANRTVVAVKQLEGIEQGEKQFRMEVATISSTHHLNLVRLIGFCSEGRHRLLVYEFMKNGSLDAFLFGDAPPGGKMPWPTRFAVAVGTARGITYLHEECRDCIVHCDIKPENILLDEHFNAKVSDFGLAKLVNPKDHRHRTLTSVRGTRGYLAPEWLANLPITAKSDVYSYGMVLLETVSGRRNFDVSEETRGKKFSVWAYEEYERGNLAGIIDRRLPAEDLDMAQVERALQVSFWCIQEQPGQRPSMGKVVQMLDGVMELERPPPPKSSDSFFSTTTASGGNSSMVSTVASSAAPPVAPSTSPNLEQEMALGRSESARNRDRVTRQLLSPQPYMTM

SEQ ID NO: 2175 - protein, 226 aa, Zea mays
  VARIANT 98: note = Ancestral polymorphism is R, Derived polymorphism is W
  VARIANT 62: note = Ancestral polymorphism is Q, Derived polymorphism is K
  VARIANT 40: note = Ancestral polymorphism is S, Derived polymorphism is L
  VARIANT 8: note = Ancestral polymorphism is L, Derived polymorphism is S
  VARIANT 7: note = Ancestral polymorphism is I, Derived polymorphism is N
  VARIANT 5: note = Ancestral polymorphism is N, Derived polymorphism is D
MAAEDKILGFVRMLARPSAPPLVTAQTPEVGIFITARNVSGALVAKLPGNKNKCGGRSNVRQRNIQPGKRGCRREWRALSAADQAQASTLDVDEECKRVLTPLGFSSEDAEKMLKKAFGWTHSPYWSEEREKEVPTAEAVAGVLDYIRSLGLSDEDLGRLLKKFPEVLGCDLDGEVRPNVGKLDSDWGINGKTLRSLLLRNPKVLGYNVDCRGDCMAQCTRCWVRF

SEQ ID NO: 2176 - protein, 80 aa, Zea mays
  VARIANT 18: note = Ancestral polymorphism is I, Derived polymorphism is M
  VARIANT 28: note = Ancestral polymorphism is S, Derived polymorphism is L
  VARIANT 64: note = Ancestral polymorphism is V, Derived polymorphism is M
MIQLIKAWKDVFSRTNVIVFPNYIWPHSEAFQVDSFIAKSYHEDVKISLHVKINFIAKSYHEYVIEWLTQISMSTTTALQ

SEQ ID NO: 2177 - protein, 118 aa, Zea mays
  VARIANT 26..118: note = Derived polymorphism lacks residues 26 to 118
MTLDESFKRPGTVPFKWEVQPGIPKQQGAAGDVPPPPTSPRLALPPAARVAAPLATPHPQPSHSHRRSMSARFVTSLALMPFVTRRGRGGGGGGGGRAGAGAGNCEDEFCLLYGDKAA

SEQ ID NO: 2178 - protein, 247 aa, Zea mays
  VARIANT 188: note = Ancestral polymorphism is E, Derived polymorphism is D
  VARIANT 126: note = Ancestral polymorphism is G, Derived polymorphism is S
  VARIANT 115..247: note = Derived polymorphism lacks residues 115 to 247
  VARIANT 112..247: note = Derived polymorphism lacks residues 112 to 247
  VARIANT 110: note = Ancestral polymorphism is S, Derived polymorphism is Y
  VARIANT 104: note = Ancestral polymorphism is K, Derived polymorphism is M
  VARIANT 39: note = Ancestral polymorphism is T, Derived polymorphism is N
  VARIANT 7: note = Ancestral polymorphism is G, Derived polymorphism is R
  VARIANT 4: note = Ancestral polymorphism is K, Derived polymorphism is N
MLDKLGGAFAPKPSSGPHKSRECLPLILIIRNRLKYALNYREVISILMQRHVLVDGKVRTDKTYPAGFMDVISIPKTMENYRLLYDTKGRFRLHPIRDEDAKFKLCKVRSVQFGQKGIPYLNTYDGRTIRYPDPLIKANDTIKIDLETNKIMDFIKFDVGNVVMVTGGRNTGRVGVIKNREKHKGGFDTIHVEDSMGHQFATRMGNVFTIGKGNKPWVSLPKGKGIKLSIIEEQRRRDFAAQAAAKA

SEQ ID NO: 2179 - protein, 350 aa, Zea mays
  VARIANT 9: note = Ancestral polymorphism is S, Derived polymorphism is L
  VARIANT 54..350: note = Derived polymorphism lacks residues 54 to 350
  VARIANT 70..350: note = Derived polymorphism lacks residues 70 to 350
  VARIANT 76..350: note = Derived polymorphism lacks residues 76 to 350
  VARIANT 81: note = Ancestral polymorphism is A, Derived polymorphism is T
  VARIANT 138: note = Ancestral polymorphism is S, Derived polymorphism is L
  VARIANT 142: note = Ancestral polymorphism is A, Derived polymorphism is E
  VARIANT 147..350: note = Derived polymorphism lacks residues 147 to 350
  VARIANT 178: note = Ancestral polymorphism is M, Derived polymorphism is I
  VARIANT 186: note = Ancestral polymorphism is G, Derived polymorphism is R
  VARIANT 201: note = Ancestral polymorphism is A, Derived polymorphism is S
  VARIANT 203: note = Ancestral polymorphism is P, Derived polymorphism is S
  VARIANT 237: note = Ancestral polymorphism is K, Derived polymorphism is E
  VARIANT 247..350: note = Derived polymorphism lacks residues 247 to 350
  VARIANT 261: note = Ancestral polymorphism is S, Derived polymorphism is L
  VARIANT 333..350: note = Derived polymorphism lacks residues 333 to 350
  VARIANT 336: note = Ancestral polymorphism is L, Derived polymorphism is S
MESPTSTASRPDFYDFLDRMRRPAAADLFRSIKSFLVSFSFHAPNAEEDGSKVQAFLAEMESAIRDHPLWANATDQEIDHALEGLEKYVITKLFDRTFGTSTEDAVTDMDISEKIGLLQQFVKPHHLDIPKVLHNEASWLLAVKELQKINSFKAPREKLLCIMNCCQVINNLLLNISMSNDRTLSGADEFLPILIYVTIKANPPQLHSNLKFIQLFRRETKLISEVEYYLTNLISAKMFIIDVSAHSLSMEESEFQKHMESARLATQVSVASPSSSQGLPTSARANQEETDMAGSRFPFMDSETESLTPGEVKQLHDLYKRVVTRYTLLSEALRKSSIDEDQLLNSVHDP

SEQ ID NO: 2180 - protein, 536 aa, Zea mays
  VARIANT 14: note = Ancestral polymorphism is T, Derived polymorphism is I
MEADIAFRYEIPRTAQFLRDGAYTRVALQFPDEMLKDAAAVARALRRELASGGADSGVRVFVMADTAYNSCCVDEVGASHIDAQCVVHYGHACMSPTSNLPAFFVFGKAPLDVHACAGTLLECSRKSNKRILVLYGLEYAYALDDLRQTFMESCKSNSGNHEVQYAEVLCSVMSPSSSTTEENKIPQSSGPSCNGDISRNSESATFLNNRNGMECSSSTQKYSLAGMTWNISVEEKMEDYFIFWIGQDSSAFANIVLTFNKCEIDLIALSFTTATAYISHSVIDHLLQYDAIENQLTADVSHLMKILRRRYYLVEKAKDANIIGILVGTLGVAGYLHIIEQMKDLIKAAGKKSYTLVMGRPNSAKLANFPECEVFIYVSCAQTALLDSKDFLAPVITPFEAVLAFGRGREWTGEYLLDFKDLITSEKQEAASTTGEARFSFIKGVYVEDNCPQENEEQSETSLALAEVTEKALSIQNQHNDAVLYQGRAMSSIDYLKARSYRGLTGEYEGPVPDSVLVGRMGRAAGYSDEKTESAQ

SEQ ID NO: 2181 - protein, 360 aa, Zea mays
  VARIANT 73: note = Ancestral polymorphism is I, Derived polymorphism is T
  VARIANT 86: note = Ancestral polymorphism is P, Derived polymorphism is L
  VARIANT 149: note = Ancestral polymorphism is G, Derived polymorphism is D
  VARIANT 242: note = Ancestral polymorphism is S, Derived polymorphism is R
MATYDHAATPTPQSPGVGGVPFSSCIGDLLRFVLSSHAAAYPGDDTVAFPLSPSYCARLLNDGELFEKLEACIQQCLEEGRLPGPPAVVGIPAEEEGPEERGWKLLLPEKGAELKRMYDAVEFELHVQEPYFTQLRAGVKKVEGRLATGNYNRITQGSLLLFNKCLLLNVEAVRKYNSFSEMLKGEKISNVLPGISSIVEGVKVYRKFYAEEKENSYGVLAISVSKPTSQPYITMNNILAVSSYSISFLYLVRDWGMMDWVDSLVWRKQLELFQMDYLLQDLHCCHLVWDWFNQMSRKGWWGSFNGSDSSKNQAASETIESLLRVCCWMNVHLTQPYGPVFEIRVHEGYGARWSQDGSKV

SEQ ID NO: 2182 - protein, 229 aa, Zea mays
  VARIANT 74..229: note = Derived polymorphism lacks residues 74 to 229
  VARIANT 36..229: note = Derived polymorphism lacks residues 36 to 229
MDISRVGEKLLSSVRSLGLLPPTPVAPPSRPEVPERAAAAAAAARAIAGLPPHERINLPSNSEDLVSIYGSNPQGQAVEELEEVFYEEEFDPIKYILQSIPDEGSDATYFDEQDSMPYNLYAFDTEVAGASYATGFVVDKSRGIILTNRHVVKPGPVVAEAMFVNREEIPVYPLYRDPVHDFGFFRYDPGAIKFLKYDEIQLAPEAASVGLEIWVVGNDSGENVPRIIS

SEQ ID NO: 2183 - protein, 234 aa, Zea mays
  VARIANT 81: note = Ancestral polymorphism is Y, Derived polymorphism is C
MSGRRPATWDQAADDYDYLFKVVLVGDSGVGKSNLLSRFTRNAFSLDSKSTIGVEFATRTIQVDGKTIKAQIWDTAGQERYRAITSAYYRGAAGALLVYDVTRADTFESAARWLRELRDHADGRGAAVMLVGNKTDLARSGSRSRHHHPRAVPRGDAAALAEREGLSFVETSALDATNVDAAFETLLTEIYRAVSRKALAASSAGDDAAAVGEGQAIQVSAGDSAGLTTRCCAF

SEQ ID NO: 2184 - protein, 234 aa, Zea mays
  VARIANT 195: note = Ancestral polymorphism is S, Derived polymorphism is I
MSGRRPATWDQAADDYDYLFKVVLVGDSGVGKSNLLSRFTRNAFSLDSKSTIGVEFATRTIQVDGKTIKAQIWDTAGQERYRAITSAYYRGAAGALLVYDVTRADTFESAARWLRELRDHADGRGAAVMLVGNKTDLARSGSRSRHHHPRAVPRGDAAALAEREGLSFVETSALDATNVDAAFETLLTEIYRAVSRKALAASSAGDDAGAVGEGQAIQVSASDSAGLTTRCCAF

SEQ ID NO: 2185 - protein, 320 aa, Zea mays
  VARIANT 262: note = Ancestral polymorphism is G, Derived polymorphism is S
  VARIANT 310: note = Ancestral polymorphism is T, Derived polymorphism is I
MDELNKWRHLHPDPEDELAYMYRQQEEDHAGMQQQHHHFAERLPEQQQYYTPPPPAAAPPTSSSPFLPRLHHTSSFPGFGDPAVPPRLPFRPAKEEPGQPSSLSNRILSFGGQPPSTLNFSGSDWTEAGVEAVQQMPPERRSRMHWNTQEHVIAERKRREKMQQQFVTLATIVPDLTKVLNWKLGIADGKDKISLLGSTIEYVKHLEEKVKALEGRRERRTYEPTDFESKCHISTDIDASSSSGSAFGAGGFNPTVDASIHGDTVLLKICCKERRGVLVMIISEIENQGLAIINTSVLPFTDSCLNITITAKAMHSLSHV

SEQ ID NO: 2186 - protein, 222 aa, Zea mays
  VARIANT 160: note = Ancestral polymorphism is P, Derived polymorphism is T
MPPPMALLPLSSASASAALPPFRSCPPAAMLLRLPSPAPSHFARPRAVSTGYAASFYGGSAMSAAGGADEEEEVGYESGFGPGLGLGGGGLGMSAAEAALALEEREMPPCPPGLRQYETMVVLRPDMSEEERLAFIQRYEELLVAGGAMYVEVFNRGVIPLAYSIRKRNSRTGLPSTYYDGIYLLITYFTKPESMDALQLKLNADDDVIRSTSFKVRQRKAV

SEQ ID NO: 2187 - protein, 440 aa, Zea mays
  VARIANT 235: note = Ancestral polymorphism is P, Derived polymorphism is L
  VARIANT 51..440: note = Ancestral polymorphism lacks residues 51 to 440
MDAFRKQLDVLMGANRNGDVEEVSRNYYDRDVCRLFLAGLCPHDLFQLTMWFSLSRCLKTYLSGDCRKWILVLVLRFTRFNCGKNFEGRTDDKIKAQEVVEELRTKRADMQATLLLDAFNKDRASLTQPAQPPQVAAAPPPAPPDARTQEMINEKLKKAEELGEQGMVDEAQKALEEAEALKKLARRPEPPSDPSKYTAADVWITDQKLRLCDICGAFLSVYDKCNLSGAECNVPFSALKSYSVLGLLASVSFLISRASRSRETKGGQAKLKMIGDLESRARIETARRPGIEIQKGETGLSLEMEEEIMIGNAIGVTIGTVAMTATGIGIMTAPADMTQGEESVHAPGSAAGAMRDTKCYSMADRFWIAGVCSGLCCALCLIFRSFLFLLEKSESQSAFCIMSCPSVVLFSYMPRTSLSSNEYLETPTHLTLNGNEVWSI

SEQ ID NO: 2188 - protein, 470 aa, Zea mays
  VARIANT 3..470: note = Derived polymorphism lacks residues 3 to 470
  VARIANT 9..470: note = Derived polymorphism lacks residues 9 to 470
  VARIANT 28..470: note = Derived polymorphism lacks residues 28 to 470
  VARIANT 92..470: note = Derived polymorphism lacks residues 92 to 470
  VARIANT 111..470: note = Derived polymorphism lacks residues 111 to 470
  VARIANT 283..470: note = Derived polymorphism lacks residues 283 to 470
MARALLLLRVAVARYPPLPASPALLQPQPLLRCHAPSQYKSQLRFLSSLSSSVPNSSDAPSDGGGDRDGEEDGAKSGSHVDYLGMSDEELMEQCDMGTFKASGPGGQHCNKRESAVRLKHLPIGIIAQAVEDRSQHKNRASALSRLRTLIALKALEEMMLAPKSGMQALLDLLFAVEDSVSDAAKILGLSTGALSRLILSDDSLRTAANELRASKCFFDCRAPVLYYVLLTLQDSVHKVFYAVVEAAAVRADNSHLGGLARYPVSATLPQIGSRLFLTWGVFWSFPEVLNAGDDMIGVECLEEDCDGKFAQTTAILENDYCCECARYLIPILYVSVELVKALQAHIINWDIHMFDEEIGNTTQGGKFDHADRLFQSIENAYINSLSNTSDVKELIPEFFYMPEFLENSNSYHLGVKQDGEPIGDVALPPWAKDDNSSDEFDKDSIESDDRSLEELSWETLELLVVPHIFR

SEQ ID NO: 2189 - protein, 518 aa, Zea mays
  VARIANT 306: note = Ancestral polymorphism is S, Derived polymorphism is C
  VARIANT 85: note = Ancestral polymorphism is A, Derived polymorphism is V
MEEPAAASALEARGDLRSALPFLPVVLRGGALFWPPAAQESLRALALGPDVSRVASGDVLADALTDLRLALALPALPPRAADGLALFFDDLLSRAQARGWFSEVVPNLARLLLRLPTLLEDHYAKAGHGASGLRVMASQDAGVVLLSQELVAALLTCALFCLFPTAGRAQACLPTINFDGLFAPLIHNARQSQEQKVRCLVHYFERVTDSMPTGLVSFERKVLPRRAFSDGVPYPDIHAWVASSAPLCQFTVFSSGFIEDEEQEALQVDFANKYLGGGALSWGCVQEEIRFMINPELIVGMLFLSCMEDNEAIEIFGAERFSQYMGYGSSFRFVGDYLDTKPFDSMGRRRTRIVAIDALDCPARLHYESGCLLREVNKAFCGFFDQSKHHLYAKLFQDLHNKDDFSSINSSEYVGVSTGNWGCGAFGGNPEIKSMIQWIAASQALRPFVNYYTFEDVSLQRLEEVIQWIRLHGWTVGELWHMLMEYSSQRLGGETHKGFLAWLLPSDRPKNQVHYMSE

SEQ ID NO: 2190 - protein, 140 aa, Zea mays
  VARIANT 18: note = Ancestral polymorphism is T, Derived polymorphism is I
  VARIANT 30: note = Ancestral polymorphism is T, Derived polymorphism is M
  VARIANT 39: note = Ancestral polymorphism is K, Derived polymorphism is E
  VARIANT 43: note = Ancestral polymorphism is S, Derived polymorphism is G
MAGEEERKQVLLSYVVPTVSSWNTTTSSTTGSGSRMGHKRSRSVWARSAEEEDCRPNRVYLWFVVVFTSRVYTTILQDLGTDFLINGQMAKREATVVDRTRSPWRNHLSNGEWKRMDPVCPRKPEKGPGTVKKKVLVTNR

SEQ ID NO: 2191 - protein, 594 aa, Zea mays
  VARIANT 71: note = Ancestral polymorphism is S, Derived polymorphism is C
  VARIANT 282..594: note = Derived polymorphism lacks residues 282 to 594
MRGGASAVNERSLDPERRRKWPYVPGLAEAGVLHSPGLAQISVQATASAIRKPTSVVSEVFQVSVGWRCYCGCDNMIKQFLGRLPKKPSKSGDKDPIGRPSPSVSHQPLGPRAGDRATNLSSHPPVISSSGLSYGSGMHVGNAYTKAHVNGDSAASAFRSLPSFKDVPNTEKQNLFNEKLNLCCAQFDFTDPTKNIKEKEIKRQTLVELVDYIASASGKFSEASMQEITKMVSANLFRTLSTPPRDNKVDGFDVDEEEPVMDPAWPHLQIVYELFLRFIQSQETDAKLAKRYIDHSFVLRLLDLFDSEDPREREYLKMILHRVYGKFMVHRPYIRKAINNIFYQFIYETEKHNGIAELLEILGSIINGFALPLKEEHKLFLVRALIPLHKPKCIAMYHQQLSYCITQFVEKDCKLADTVIRGLLKYWPITNSSKEVLFLGELEEILEATQPAEFQKCMVPLFRQIARCLNSSHFQVAERALFLWNNDHIESLIKQNSRVILPIIFPALERNASGHWNQAVQSLTLNVRKLFSDNDPGLFTESLRKYEEEKAREKEVKSKQEATWRRLEEMASAKATSGAAVLVSRPLSRQSSAV

SEQ ID NO: 2192 - protein, 126 aa, Zea mays
  VARIANT 22: note = Ancestral polymorphism is A, Derived polymorphism is S
MASHRALLLLLLAAALVAALASVASADDANAMPTILTPVAHTPLGSFDGDKPASDEDAVDDDEDAAPVGAPNGATMTEPRDDVPAPPGAEATAGGAAASNAPVALASAAARVCAAAAVAAGAFASF

SEQ ID NO: 2193 - protein, 300 aa, Zea mays
  VARIANT 110: note = Ancestral polymorphism is P, Derived polymorphism is L
MAHGATVPLGKSMRRALRTAIGIPKKNKPPPPPLLPNGSGRDPGVSMELSSSSSVAARKEAVVRVVMRGGVVEVYPGVVLACTVIRNHPPGLCLAHPDVFRNPHGAVVRPLEPLFPGQKFLLLPETTVVRLKQRIPESSIGAFADEEEYGDEDETSSSSSSSEADEVGAMTACSARDYFVARDRWSECRFRRLVEQGFAVEPSKDGDDDDDEPAEREKDRARATTKKGNRKRRKGRRRRDRRSSPVPQLLPVGLRGFATARRTWEPSLPSVEEEEEEAAVSPRHRPPSGANKRSCMNRYQ

SEQ ID NO: 2194 - protein, 375 aa, Zea mays
  VARIANT 196..375: note = Derived polymorphism lacks residues 196 to 375
MLAASLRPGPSLAAFPGTAQRSPVPFLPFPARLHHRPVLLSATAEGTGAPAGQGDASAAPLDEVRLPQFAADWESARACKDQGRIFSLPVLRANSGGLIVRFNSLQGFVPNPLLSPAHWCKAKLADPKRPIQDVTKDLVGTSISVKVAEVNEEEKKLVFSEKDASWSTYSSRIKIGDIYDGIVGSVFHYGAFVHLRFPDATNSIGLYHLTGLVHISEVSWDLVQDVKDFLNEGDAVKVIVVNIDMTKSRIALSIRQLEEDPLLETLDKVIPLEADQSPNRMMSPSEVELLPGLDGICNELLQEDGITDVQFGRQALEKRVVSQDLELWISNVQAKDNRFTLLARAGRQVQEVYLTTSLDQEGIKKAVQRVLGRVP

SEQ ID NO: 2195 - protein, 379 aa, Zea mays
  VARIANT 359: note = Ancestral polymorphism is M, Derived polymorphism is T
  VARIANT 356..379: note = Derived polymorphism lacks residues 356 to 379
  VARIANT 340: note = Ancestral polymorphism is P, Derived polymorphism is L
  VARIANT 333: note = Ancestral polymorphism is A, Derived polymorphism is V
  VARIANT 332: note = Ancestral polymorphism is V, Derived polymorphism is D
  VARIANT 210..379: note = Derived polymorphism lacks residues 210 to 379
  VARIANT 169..379: note = Derived polymorphism lacks residues 169 to 379
  VARIANT 7: note = Ancestral polymorphism is R, Derived polymorphism is K
MTTTMMRLRQHLGLVSSPSIYTSAIARFGNNTPHRRRTSTSTTTHITQKQFLLLVILLLLLLLLLFSVVFLIPTVSLPPARSRTMSSSASDAAPFEKPRAVVKKVLAESQPEGQGATVRRSIGRHELRNLDPFLLLDEFTVYKPAGFPDHPHRGFETVTYMLEGAFTHQDFAGHKGTIKTGDVQWMTAGRGIVHSEMPAGDGVHKGLQLWINLSSKDKMIEPRYQELESKDISRGESEDGGVEARVIAGEALGAASPVYTRTPTMYVDFTMRPGSRLHQPVPEGWNAFVYVVDGEGVFGRETATAHYCLVLGPGDGVSVWNRSTRPLRFVLVAGQPLGEPVVQHGPFVMNSRAQIQKAMEDYYYGKNGFERAGQWSSSA

SEQ ID NO: 2196 - protein, 310 aa, Zea mays
  VARIANT 196: note = Ancestral polymorphism is A, Derived polymorphism is T
  VARIANT 132: note = Ancestral polymorphism is T, Derived polymorphism is R
  VARIANT 53: note = Ancestral polymorphism is L, Derived polymorphism is F
MAAAVAAVAAATTAEDEARLLRLEEQAEHGGGGAWDYLCLARRLRARRPAHVLRVGLALLNNASARSGLASEQWTLYEQVATAAMDCQRLDVAKDCIGVLSKQFPGSTRVARLEALLFEAKSEWAEAERAYTQILEINPFDQIVHKRKIAIAKAQGNMSLAIGYLNKYLELFMADHDAWRELAETYVSLQMYKQAAFCYEELILSQPTIPLYHIAYAEVLYTMGGLENLQTAKKYYASTIQLTGGKNTRALFGVCLCTSAINQLTKGRNKEEEGSELQRLAAEVLLNNYKQQAPSKAPLISSLLKNMKLS

SEQ ID NO: 2197 - protein, 424 aa, Zea mays
  VARIANT 42..424: note = Derived polymorphism lacks residues 42 to 424
  VARIANT 49..424: note = Derived polymorphism lacks residues 49 to 424
MERYKLIRKIGDGTCGNVFMASNVETNEIVAVKKMKRKFCHWEECISLREVKALQKLFHPNIVKLKEVTMENHELFFIFEHMECNLYDVIRERQVAFPERDIRNFMVQILQGLAYMHNNGYFHRDLKPENLLVTNGIIKIADFGLAREISSNPPYTDYVSTRWYRAPEVLLQSSVYTPAIDMWAVGAILAELFTLSPLFPGESETDQLYKICTVLGTPDCTIWPEGMNLPRSCSFKFFQNPPRNLWELIPNASSEAIDLIQQLCSWDPRRRPTAEQALQHPFFNVCNWVPRPVHDAYHTKTNGPKAEPRLELNLWDFSTEPDDCVLDLTLSLKPSFSGTDLGKHVPRRTEEEILLYPGFENTPVKSGFWPLVPSDRPVGDVPAIPSWQQAYMVDSQGAFSGSPFLQSNLLENRSLAPIRQVNFF

SEQ ID NO: 2198 - protein, 126 aa, Zea mays
  VARIANT 62: note = Ancestral polymorphism is P, Derived polymorphism is L
  VARIANT 71: note = Ancestral polymorphism is Q, Derived polymorphism is P
MELFPQSVGFSIKDAAAPREEQGDKEKPKQLTIFYGGKVLVFDDFPADKAKDLMQLASKGSPVVQNVVLPQPSAAAAVSTDKAVLDPVISLAAAKKPARTNASDALHQEKDLVKLFRKLLMILMLG

SEQ ID NO: 2199 - protein, 468 aa, Zea mays
  VARIANT 92..468: note = Derived polymorphism lacks residues 92 to 468
  VARIANT 343..468: note = Derived polymorphism lacks residues 343 to 468
  VARIANT 369: note = Ancestral polymorphism is G, Derived polymorphism is E
  VARIANT 383: note = Ancestral polymorphism is E, Derived polymorphism is K
  VARIANT 400: note = Ancestral polymorphism is I, Derived polymorphism is N
MPPYRPPANFACAVASAISSSPHSLSQICVHDILCPRSRVRDILRPGSPRPAISASALSMEPRPCLHPRERPLPSPPPRCDIQHEEGRRRHWIFEAERWWLLEHGTLPQTDVLADALAGKLDNSGCSLSELKRKVRSLQSQYAKAVKKGAPPSKDQDRRLFDLCKNVWPSVSNTKASANGGAGREPDEMCELYPYLVEEVRALQRPHPGLFKREFGMIDDSKACALDERTTQLCTFHVFLGGICFLETITPSIGLTTLQHSESKETIRTAEQHFCYIYTDGVHSAPNILINMCLKKNPVVPLVMPFVETNITKPDWHCRGAASFAFGSILEGPYVGKLAPLVQAGLDFLLNTMNDANSQVKDTTAWTLERVFELLHSPVDLAETTHFRLRASAYEALNEIVRAHDVSAILNFSENCTPEFLTPYLDRIVNKLLVILQNGKQMVHGGALTALASVADSSHALFTWEFYA

SEQ ID NO: 2200 - protein, 623 aa, Zea mays
  VARIANT 245: note = Ancestral polymorphism is R, Derived polymorphism is W
  VARIANT 217..623: note = Derived polymorphism lacks residues 217 to 623
  VARIANT 110..623: note = Derived polymorphism lacks residues 110 to 623
  VARIANT 9: note = Ancestral polymorphism is L, Derived polymorphism is P
MSSCSEPALHLAAIAFVLMNDFSSLFWNPPVLVRSQYSRFSVGFRGDARWCFRSACPTLESVVSGSVLEVEGLPTELPQLVCGIALKLSLDCEPPKHLEFESSRRSAVVQCGTASSTPAISGTGPSSSGSSGLVQDCTAPLVCALQLTARQDVSCFHFPGHNRGKAAPSSLSKLIGSGAFLHDLPELPELDDLFSPKGVILDAQRRAAQLFGSSKTWFLVNGTTCGIQASVMATCSPGDYLIVPRNCHLSVISALVLSGVVPKYIIPEYNSGWDIAGGITPLQLDEAVKELEEDGKRVGAVLVTSPTYHGVCSNVQGIVSVCHPRGIPVIVDEAHGAHFRFHDSLPSTAIEQGADLAVQSTHKVLCSLTQSSMLHMSGDLVDVDKVSQCLQLLQSSSPSYLLLSSLDAARDQLSQNTNIFDEPLAIASETKDLLARIPGISVLDLPCFASDFPAIDPLRITLSASDLQLSGYEADDILYEGHQIVSELVGTRAVTFAVNLGTRVQDAEKLVQSAKHLSEKHFFANSLKPVKENRVHGPLENISVHLSPREAFFTEKRRVKIEDSLGEICGELICPYPPGIPVLIPGEVVTHDSLSYLMSVRHQGITISGAADAELNSILVCDL

SEQ ID NO: 2201 - protein, 187 aa, Zea mays
  VARIANT 94: note = Ancestral polymorphism is N, Derived polymorphism is K
  VARIANT 141: note = Ancestral polymorphism is S, Derived polymorphism is C
MDELNKWRHLHPDPEDELAYMYRQQEEDHAGMQQQHHHFAERLPEQQQYYTPPPPVAPPTSSSPFLPRLHHTSNFPGFGDPAVPPRLPFRPAKNEPGQPSSSSNRILSFGGQPPSTLNFSGGDWTEAGVEAVQQMPPDRRSRTHWNTQEHVIAERKRREKMQQQFVTLATIVPDLTKVMHISCLVVL

SEQ ID NO: 2202 - protein, 707 aa, Zea mays
  VARIANT 522: note = Ancestral polymorphism is A, Derived polymorphism is V
MAHWVSDSDGSDNFEWDSDGNGEEPANFNAAGAGSSALRSTNTDAPGPSTRVIHLTDPYICYYMFFSSLATIVMFLFVCGAAFKVANGNGKAGPSASLVQKYMDMGFTEEIVRKAMKDNGDNGADSLVELLLTYQELGNDLKVDNGFASGCAPQTVDDSDDDDILENWDDEDADGGRSTRVANSIDDSEDEVFSCAPLVTVFVYFILLRNLLCIYFASIIYTSALNMFNVNPVIAMLVYVACQHRISQCSPVLSTQDFLNEMSQKDKKVDSLVKMGFPEDEAALAITRCGQDASISVLVDSIYASQTAGDGYCGNLSDYEGNSNGGRNKGRFMDGNKKKRKRYGGQAQGNRGPLDGSCEEPMPLPNPMVGFNLPDHWTRPVDRSLPTQAIGPPYFYYENVALAPKGVWTTISRFLYDIQPEFVDSKYFCAAARKRGYIHNLPLERRSPLLPLPPKTIFEAFPRTKRWWPSWDPRRQFNCLQTCTSSAKLLERIRVTLANSSDPPPPLVQKFVLEECRKWNLAWVGLNKVAPLEPDEMEFLLGFPKDHTRGISRTERYRSLGNSFQVDTVAYHLSVLKDRYPQGMNVLSLFTGIGGAEVALHRLGIRMNTVVSVEKSEVNRTILKSWWDQTQTGTLIEINDVQTLTADRIEAYIRRIGGFDLVIGGSPCNNLAGSNRHHRDGLEGEHSSLFYHYFRILDSVKSIMERL

SEQ ID NO: 2203 - protein, 217 aa, Zea mays
  VARIANT 155..217: note = Derived polymorphism lacks residues 155 to 217
  VARIANT 22: note = Ancestral polymorphism is K, Derived polymorphism is N
MIQLLFLVLFAEGAVALLLMVKVGPLRELAMRGVDQVKTGKGPATVKTLACTLSVILMSSVASILKIQNRGLKLGTVSPMDQVLWRTHLLEASLIGYTLFLAFVIDRLHHYLRKLMTLRKTSSTSREEVEKLQMENRSLREKEEKSSSETKRLQREIARLNEGMKKLKSETEEHERKASVAEAHVDALQKQSEELLLEYDRLLEDNQILQTQLLSRG

SEQ ID NO: 2204 - protein, 135 aa, Zea mays
  VARIANT 18: note = Ancestral polymorphism is V, Derived polymorphism is M
  VARIANT 34: note = Ancestral polymorphism is R, Derived polymorphism is K
  VARIANT 36: note = Ancestral polymorphism is T, Derived polymorphism is M
  VARIANT 38: note = Ancestral polymorphism is E, Derived polymorphism is A
  VARIANT 40: note = Ancestral polymorphism is T, Derived polymorphism is S
  VARIANT 45: note = Ancestral polymorphism is K, Derived polymorphism is E
  VARIANT 54: note = Ancestral polymorphism is A, Derived polymorphism is T
  VARIANT 55: note = Ancestral polymorphism is S, Derived polymorphism is L
  VARIANT 59: note = Ancestral polymorphism is G, Derived polymorphism is E
  VARIANT 70: note = Ancestral polymorphism is T, Derived polymorphism is I
  VARIANT 107: note = Ancestral polymorphism is I, Derived polymorphism is M
  VARIANT 122: note = Ancestral polymorphism is I, Derived polymorphism is N
MTFQTDKISLLGSTIEYVKHLEEKVKALEGRREKRTYAPTDFESECHISTDTDALCSSGSAFGAGGFNPTVDASVHGDTVLLKICCKERRGVLVMIISELENQGLAMINTSVLPFTESCLNITITAKAMHSLSQV

SEQ ID NO: 2205 - protein, 795 aa, Zea mays
  VARIANT 289..795: note = Derived polymorphism lacks residues 289 to 795
  VARIANT 98: note = Ancestral polymorphism is R, Derived polymorphism is L
  VARIANT 96: note = Ancestral polymorphism is R, Derived polymorphism is W
MADLVMAPPPAMDLFGEPIEAHPPWFKPDAFLRAGFDADAYVAELRSYVPLDSLAAELRAHLAALRAELVGLINRDYADFVGLSAHLKGVDAAAARMRAPLADLRDKVAAFRAGASAALAALREGLQQRAAATAARELLELLLDTSHVVSKVEKLIKELPTAPSDSSNAEIPINDTGTPNGKAGTGVRETQSILLERIASEMNRLKFYISHAENLPFIENMEKRIQGATKLLDGSLERCFVDGLEHRDAKVIYNCLRAYAAIDNTSSAEELFRTTVVSPLIQKIVPQNYARAVAGASSDELEEDYQQIKACVEKDCKFILEISSSENSGLHVFDFLGNSILKEVLSAIQKGKPGAFSPGKPKEFLRNYKVSLGFLDFLEGYCFSKSAVTKLRYEPAYTDFMRQWNVGVYFSLRFQEIAGGLDSTLTNTFSPTGLNEAQQKPLLLKQSIKLLESLDSCWSDEVLVFSHCDKFLRLSLQLISRYTTWLSCGLSARKASDRSPNSPADAEWALSIPIEDFIYFMLSLKFLEFRSSYKMTSCFRSAQETCTGVGSVEKELQFVLCSPICGNSEIMHDVHAVIGELSESGSFIGHVNQSLGSCPIEVFNLVKGSILQAAEPLKELLPAIMDVMIGIIVKKSNEDLKHLKGITATYRMTSKLPVRHSPYVSGILHPLKVFLEGDRMHYLSEDDKTKLCRGSANKITATYYDLVSEVVTVARKTESSLQRLRQGAQRRVGASTDASDSIISDTDKICMQLFLDIQEYARNLRAIGIDAREIDSYRALWQCVAPKDRHENIQF

SEQ ID NO: 2206 - protein, 83 aa, Zea mays
  VARIANT 8: note = Ancestral polymorphism is T, Derived polymorphism is A
  VARIANT 29: note = Ancestral polymorphism is D, Derived polymorphism is H
  VARIANT 32: note = Ancestral polymorphism is I, Derived polymorphism is T
  VARIANT 35: note = Ancestral polymorphism is G, Derived polymorphism is A
  VARIANT 73: note = Ancestral polymorphism is T, Derived polymorphism is S
MSLYIISAYGDLSLSQALDEFNNDPLHWHQQTKVAMVRGLLRDHSLHCKAYSHKKAVNWASAREAHDLHDAPSPEIKGTSILF

SEQ ID NO: 2207 - protein, 554 aa, Zea mays
  VARIANT 19: note = Ancestral polymorphism is R, Derived polymorphism is W
MAAQVVAAGDGGSWPQQWRLTLVLAALVPLLSLCLLLARTTRRARASSWSSSSKGRRLDVHRLPPGPPRLPLLGNLHQLGSLPHRSLRELARRHGPVMLLRLGSVPTLVVSSADAAREVMKARDADCCSRPDTPGARRLSYGHKDVAFAPYTDYWRQMRKLFVVELLSARRVRAADHAREAEVDKLIARLSSAGGKPVQLEDHMFALMDGVIGTVAFGNIYGAEQFAHRNHFHDVLDEALSAKAGFSAEDYYPNAAGRLVDRLTGAAARRERVFRDLDAFFDTIIDQHLVDPSSSLSSATTTPDLIDVFVDLMEESRRQPQVHGSLRFTRDHIKGLLSNVFTAGVDTSSVTMVWAMAELIRRPAMLRKAQEEVRSVVGGDRERVHPDDVPKLRYLKAVVKETLRLHPAAPLLLPRETMRHVSVCGYDVPAKTRVLVNAWAIGRDPRSWGPRPEEFDPARFEDGGDVGFNGTHFELIPFGAGRRMCPGIAMGVATMEFTLANLLYCFDWELPEGVGVEDVSMEEAGSLTVHKKTPLLLVPTRYKANCQSRHSFQF

SEQ ID NO: 2208 - protein, 182 aa, Zea mays
  VARIANT 131: note = Ancestral polymorphism is R, Derived polymorphism is C
MDPNYESAEETDEKRIVGKSVDRTRPDTTISRRISRYLSTMQNHPQKVSDCSHHPKNLSTESTICGSGARSLENSTANRTMYEAGSLSSSGVTMSNDTEPEKVWHYKDPSGKVQGPFTLLQLSKWTSYFPCDLRVWLTFESEERTLLLTEVLSKQQKRFHSGCITYKQQGNVGWHWTNKEQP

SEQ ID NO: 2209 - protein, 426 aa, Zea mays
  VARIANT 101: note = Ancestral polymorphism is R, Derived polymorphism is Q
  VARIANT 102..426: note = Derived polymorphism lacks residues 102 to 426
  VARIANT 105: note = Ancestral polymorphism is G, Derived polymorphism is S
  VARIANT 111: note = Ancestral polymorphism is P, Derived polymorphism is L
  VARIANT 213: note = Ancestral polymorphism is A, Derived polymorphism is S
  VARIANT 255: note = Ancestral polymorphism is L, Derived polymorphism is Q
MAAALRFPGVARESLSLDAPVAASKLGRERRPAPASANPGPQCWRRRRGLAVRCQTGSTAPPVLRTEEAPAAAAGARNAQAGFTVVMKFGGSSLASAERMREVAGLILSFPDETPVVVLSAMGKTTNNLLLAGEKAVSCGAPKASEIPELAVIKDLHLRTVDELGLDRSIVSGLLDELEQLLKGVAMMKELTLRTRDYLVSFGECMSTRIFAAYLNKLGKKARQYDAFDIGFITTDDFTNADILEATYPAVAKRLHEDWMDDPAIPIVTGFLGKVWKDVDGVLTCDPNIYANAIPVPYLTFDEAAELAYFGAQVLHPQSMRPARDGDIPVRVKNSYNRHAPGTVITKSRDMSKSILTSIVLKSNVTMLDIVSTRMLGQYGFLAKVFSIFEDLGISVDCVATSEVSISLTLDPSKLWSRELIQQVSI

SEQ ID NO: 2210 - protein, 290 aa, Zea mays
  VARIANT 126: note = Ancestral polymorphism is G, Derived polymorphism is R
  VARIANT 124: note = Ancestral polymorphism is G, Derived polymorphism is R
  VARIANT 121: note = Ancestral polymorphism is G, Derived polymorphism is D
MAASALLLSPRLVSFPPHPSLAPLFTKRPPPYPLGGAGARLRAVGDGPGAGLPPEQATVYDGAYGPWTLEDSDVREVLLYRSGLVTAAASFVAASSAAFLPEGNPAASAVTGAADLLYAAGAAGLGLSLVLIHIYVTPIKRFLQALWAAGALGSVGTYLVAARPLDEGLVQYVLDHPAALWFVGPTFAALTGLVFKEGLCYGKLEAGILTFLIPGLLLGHLSGLMDNSTKAGLLGLWMLLFTIFAARKFQQPIKDDVGDKSVFMFNALPEEEKKAWIQKLERQKGQELFE

SEQ ID NO: 2211 - protein, 115 aa, Zea mays
  VARIANT 18: note = Ancestral polymorphism is R, Derived polymorphism is H
  VARIANT 34: note = Ancestral polymorphism is R, Derived polymorphism is H
  VARIANT 47: note = Ancestral polymorphism is R, Derived polymorphism is H
  VARIANT 49..115: note = Derived polymorphism lacks residues 49 to 115
  VARIANT 53: note = Ancestral polymorphism is E, Derived polymorphism is G
  VARIANT 55: note = Ancestral polymorphism is E, Derived polymorphism is K
  VARIANT 57: note = Ancestral polymorphism is A, Derived polymorphism is T
  VARIANT 60: note = Ancestral polymorphism is R, Derived polymorphism is H
  VARIANT 68: note = Ancestral polymorphism is G, Derived polymorphism is S
  VARIANT 91: note = Ancestral polymorphism is R, Derived polymorphism is Q
MDAAKAVQRLADLEALRRHNTEVRVCREADVKVRALDAISSHDFRYRKYHINEIEMATKRFSDDLQFGEGEYDPVYCASMGHTPIAIKGLRPDARSPSASGATPQRTTTTTRSSS

SEQ ID NO: 2212 - protein, 231 aa, Zea mays
  VARIANT 9: note = Ancestral polymorphism is N, Derived polymorphism is K
  VARIANT 6: note = Ancestral polymorphism is L, Derived polymorphism is H
MTPPHHPVNFAVLLLFLCLPAVPPAAAAADPTPTPWPPQFHATLVMDYHGNMSVADLWYDWPGGRNLHVIRYQLAADAPYYDNEWNNGTSFFYTPALRTCRSAAVGVGILRPDWLRPGAVYLGRRDAGGFDCHVWAKADFITYYEDVNTKRPVKWVFYTDAAMVGMKIVAVGTHVKGRTAYVMSFEVGAVLEDAAWQAPEYCFTNNGGLGLADETTTTIAGGSSFVPRSVL

SEQ ID NO: 2213 - protein, 158 aa, Zea mays
  VARIANT 99: note = Ancestral polymorphism is G, Derived polymorphism is A
  VARIANT 116: note = Ancestral polymorphism is A, Derived polymorphism is S
MNKERLMKMAGAVRTGGKGTMRRKKKAVHKTVTTDDKRLQGTLKRVGVNTIPAIEEVNIFKDDLVIQFLNPKVQASIAANTWVVSGSPQTKKLQDVLPGIINQLGPDNMEHLKRIAEEMQKQVAAAGAAAQVKEDNDDDVPELVPGETFEEVAQETKA

SEQ ID NO: 2214 - protein, 172 aa, Zea mays
  VARIANT 122: note = Ancestral polymorphism is E, Derived polymorphism is D
MAASATAARPLAGTAVPLPLSTRTRPARVALLSLIPPAPAQRLALRRGAWLSPPERSRSVRCLAAMSPEMRATLDKVVGSSKVVLFMKGTKDFPQCGFSHTVVQILRSLDVPFETLDVLANEALRQGLKEYSSWPTFPQLYIDGEFFGGCDITVEAYKSGELQETLEKAMCS

SEQ ID NO: 2215 - protein, 719 aa, Zea mays
  VARIANT 682..719: note = Derived polymorphism lacks residues 682 to 719
MVRLTADLIWKSPHFFNAVKERELDLRGNKIAVIENVGATEDQFDTIDLSDNEIVKLENFPYLNRLGTLLVNNNRITRINPNLGEFLPKLHTLVLTNNRLTNLAEIDPLASLPKLQFLSLLDNTVTKQPDYRLYVIHKLKHLRLLDFKKVKQQERVAAAKKFHSKEAEEEAKKVPAKTFTPGLPDAQDITMEPQGPKVVAPTPEQITAIKAAIANAHTLEEAARLEQLWLLTMYLYLLCAQVLSTGQVPAEFAVPRPDANMAEASDGAEKMDTDGENQEGDQWNSVILDVASIGATFAALFPGPGSDPKPYHPAPEPDREPEPPLAPQPEPGPNAAPAPEPRWEREPSPSPGPGSDPKPYLPAPAPEPDREPEPTLAPPQSEPGLNAAAAPEPRWEREPSPSPEPAPAPNPDRERKDGGGAGAASAADLEHRCKQMNCGGVRRFVIVHLRDGGGEWLRQVVPGALRRAPDPAALVFHAVGRYYIRAESPDAEAACALLLELYVRAGCPRLRRGRGSEAAELLLRQEAREAALTWRSRLLRVSGAVGDAPGAAGARGLALFMAAFGVPAEFPAQELCDLVDAAQASACVQVLKASKLFAKKMRDVVIEMINKAMYLQAMRIILVFEFQEAFPLAPTLALIIEKLEHDTKDENEGQASERDEDDLALLSSISKCMEDHKLSPSEFTTFAAKIALLEERVGKARRQACSTGAKRKRPEECVE

SEQ ID NO: 2216 - protein, 618 aa, Zea mays
  VARIANT 356: note = Ancestral polymorphism is R, Derived polymorphism is C
  VARIANT 334: note = Ancestral polymorphism is V, Derived polymorphism is L
  VARIANT 57..618: note = Derived polymorphism lacks residues 57 to 618
  VARIANT 33..618: note = Derived polymorphism lacks residues 33 to 618
MGVLRRAVPVPCPPRRGRLRYTRPARGAPLELEKRAGRWTPTDFAFLSSAVVQYQDQPLSGRLSSSTGRHIVHALAHRIASAAAFVHQATIPFPSAAQMPSCPAPAPAVATFLLVALLSCGTRAIRTHGGYVSAVGDPGMRRDGLRVAWEAWNFCNEVGQEAPGMGSPRGADCFDLLETSSDEEGRPVYSVAHLVSDADNRLGAGDPFPGSPPGAARVTDADLYAPAKELYLGDRCQVADTPAPWQFWMVMLKNGNLDTTAAACPENGRPARPFPQTSRFPCPAGAGCMNQPLLFHNRTALDDAGRRLRGGLFGTYDLDAAAGLGAGDVSFYSVTWEKDVAASGRGGGWAFHHKLCTSTKYPWLMLYLRSDATRGFSGGYHYDTRGMTKTVPESPDFKVRLTLDVKQGGGRNSQFYLMDMGSCWKNDGRACDGDTATDVTRYSEMIINPATPAWCSPSRIDQCPPWHTFRNGSRVHRRDGARFPYGAYHVYCSPGNAARAEQPTTYCDAYSNPQAQEILQLLPHPVWGEFGYPTARGQGWVGDPRAWDLDVGAMSQALYFYQDPGTPPARRRWTSLDVGTEIYVSDRAEEAEWTLSGFDILVPDKCIKSQQRASNSCW

SEQ ID NO: 2217 - protein, 323 aa, Zea mays
  VARIANT 8: note = Ancestral polymorphism is E, Derived polymorphism is V
  VARIANT 58: note = Ancestral polymorphism is G, Derived polymorphism is D
MAAAAVHEPEVIRDKAAMRAWSRRRRAEGKAVALVPTMGFLHEGHLSLVSAAVAASAGPVAVVVSIYVNPSQFAPTEDLATYPSDFAGDLGKLAATGVVAAVFCPPDLYVRGSADRPSAASASGGAVSCLEDAGGHAHETWIRVERLEKGLCGSSRPVFFRGVATVVAKLFNIVEPDVAVFGKKDYQQWRVICRMVRDLDFAIQIVGSEVVREADGLAMSSRNVNLSEEDRKKALSISRSLVDARTATLSGSNRSQEIKDQIVRTITEAGGQVDYVEIVEQESLVPVERMDRPCVICVAAWFGKVRLIDNIEIHVDSSTVLSI

SEQ ID NO: 2218 - protein, 322 aa, Zea mays
  VARIANT 306: note = Ancestral polymorphism is S, Derived polymorphism is Y
  VARIANT 275: note = Ancestral polymorphism is I, Derived polymorphism is T
  VARIANT 234: note = Ancestral polymorphism is Y, Derived polymorphism is C
  VARIANT 213: note = Ancestral polymorphism is P, Derived polymorphism is A
  VARIANT 139: note = Ancestral polymorphism is G, Derived polymorphism is R
  VARIANT 129: note = Ancestral polymorphism is G, Derived polymorphism is R
MDGLWHLGDELRGQPKVVEDRQWSLMTSKLAEITRSRGERTNDLDYARMNAAPDAKQWGKAASYQHHDEGRMDHHVGLSLKMNDLKMNEAAAAAVMKLPFRGVPYNVNPMYPKGSNANANVNAFKMNVGVNKYSSSTNGKDSGGKSGGGSNNNSGGGGNGNGTANGSSAVDKRFKTLPTSEMLPKNEVLGGYIFVCNNDTMQEDLKRQLFGLPARYRDSVRAITPGLPLFLYNYTTHQLHGVFEAASFGGSNIDPTAWEDKKCKGESRFPAQVRIRVRKLCKPLEEDSFRPVLHHYDGPKFRLELSIAETLSLLDLCEKEGI

SEQ ID NO: 2219 - protein, 405 aa, Zea mays
  VARIANT 223: note = Ancestral polymorphism is S, Derived polymorphism is L
  VARIANT 207: note = Ancestral polymorphism is I, Derived polymorphism is T
  VARIANT 197: note = Ancestral polymorphism is Y, Derived polymorphism is N
  VARIANT 193: note = Ancestral polymorphism is G, Derived polymorphism is R
  VARIANT 147: note = Ancestral polymorphism is H, Derived polymorphism is L
  VARIANT 133: note = Ancestral polymorphism is P, Derived polymorphism is A
  VARIANT 27..405: note = Derived polymorphism lacks residues 27 to 405
MGQRPKPPSPTPARAPAGAAAAATATQSTPRSRARDGLPAFCGARHQREEESLATTLPAGRTVMPAASSGGGVAVEEKRGKAAAGLGAARVAPRGSDASVGRPWDIVLELGYVYNLDLTTYLLYCWQVHYFWPATSDARSMYEAMWHDITDQSGENIVSVTIPVMFGRSIEIPQSCNGVARFDFEYLCGRPVGAADYIAIARNYHTIFISEIPAMSMKIRDKSVWAEEIGGREHERSNLDFKVLIWLAGMKISDAAVLIHTRIPAVTSLNKPARRFITLIDELYNHHCRLICLAASSIDDLFQGTEEGPLFDLESFQFETESEGTKLRRDVLAEGNAGSGPSTTGLVAILSGQEEMFAFRRAISRLIEMQTPLYLERVLAVHPSFRRPGLARNNRPAVPQPAPAV

SEQ ID NO: 2220 - protein, 249 aa, Zea mays
  VARIANT 2: note = Ancestral polymorphism is A, Derived polymorphism is V
MAQAVEEWYRQMPIITRSYLTAAVVTTVGCTLEIISPYHLYLNPKLVVQHYEIWRLVTNFLYFRKMDLDFLFHMFFLARYCKLLEENSFRGRTADFFYMLLFGATVLTGIVLIGGMIPYISETFARILFLSNSLTFMMVYVWSKHNPFIHMSFLGLFTFTAAYLPWVLLGFSILVGSSTWVDLLGMIAGHVYYFLEDVYPRMTGRRPLKTPSFIKALFADDNVVVAQPPNAGIGAGARFGAIGVDPQAQ

SEQ ID NO: 2221 - protein, 130 aa, Zea mays
  VARIANT 32: note = Ancestral polymorphism is R, Derived polymorphism is C
  VARIANT 59..130: note = Derived polymorphism lacks residues 59 to 130
MGRSRADHDRGCGCSAETHARRGARLREGAGCLAPCCVDALPRWLAAAQAREHAAGEAQSCASSDEAEARRAARVAGAGRCAKLQWHVREKRATLPRHCAGRTSIHHERKGWAASGTTTTTAALQIWASV

SEQ ID NO: 2222 - protein, 489 aa, Zea mays
  VARIANT 42: note = Ancestral polymorphism is M, Derived polymorphism is I
  VARIANT 353: note = Ancestral polymorphism is L, Derived polymorphism is R
MAAAEPVPVPVPAAAAGTNNKIKTVVVLVQENRSFDHMLGWMKSLNPDIDGVTGAETNHVDASDPASHAVRFSDGAEYVDPDPGHSMQAIYEQVYGTPFVDAATTPATPPGVAPSMSGFAQQAEKERPGMSATVMSGFRPDAVPVYRDLVREFAVCDRWFASNPASTQPNRLFVHSATSHGLVSNDSRALVAGLPQRTIFDALHDEGLSFGVYYQYPPSTLFYRSLRQLKYAASFHAFDLHFARHCREGRLPSYVVVEQRYFDLRFLPGNDDHPSHDVAEGQRFVKEVYEALRSGPQWPQTLLVVTYDEHGGFYDHVPTPAGAGVVPSPDGIVSAKPFSFAFDRLGVRVPALLVIGTDRHGTVDAVHAVTLPEPVKLRRTAAAEHAPLSEFQEELVQLAAVLNGDHTKESYPQGLVEGMTVAEAARYCVDAFKAFLDECEKCKDRGGEDGSHIPTVKPTTTGKEKDKSKSSFASKSLSCLPCCVRPSSS

SEQ ID NO: 2223 - protein, 959 aa, Zea mays
  VARIANT 495..959: note = Derived polymorphism lacks residues 495 to 959
  VARIANT 463..959: note = Derived polymorphism lacks residues 463 to 959
  VARIANT 376..959: note = Derived polymorphism lacks residues 376 to 959
  VARIANT 247..959: note = Derived polymorphism lacks residues 247 to 959
  VARIANT 166..959: note = Derived polymorphism lacks residues 166 to 959
  VARIANT 141..959: note = Derived polymorphism lacks residues 141 to 959
MSSHRKNFRRRGDDAEDANGDGGSHPKPSTTTATKTKTLTVPKPKSPPRRQGASRLSFADDEDEDDAEAGPFAQRRLPPTASVRPARTASPAAGALHRLTPARERIKSSPAPAGAAVSAPKPSNFQSHAGEYTPERLRELQKNARPLPGSLLRAQPRAPATEPRSQKLSGTPASSTPATTTAAATETVVVLKGLVKPMSEASIGPRIPKHDKEEDKSEEEGKGDEEDEGPVIPDRATIEAIRAKRQQRQQPRHAAPDYISLDAGGVLSSRNAAGESSDEDDNEITDRIAMYTDKPGDGPRSTKGVFSGISNRGPATSLGAFSDGSRNVEDDRDDDDDEEEERKWEEEQFRKGLGRRMDDASTQRSANGVPAAMQVQPQPFGYPVSTHYQPSLSGVVPAASVFASGTAEFLSIAQQADVANKALQDNIRKLRETHKTTVSALVKTDTHLNEALSEISSLESGLQDAEKRFVYMQELRDYISVMCDFLNDKAFLIEELEENIQQLHEKRALAISERRAADLADESGVIEAAVSAAVSILSKGSSSTCLSAASNAAQAAAAAARGSSNLQPELDEFGRDINMQKRMDLKRREEDRRRRKTQSETKRLASAAKNKDIEKIEGELSTDESDSESTAYVSSRDEFLKAADHVFIDAKEEYSSLRIVKDKFEGWKAQYPSAYRDAHVALSAPSVFSPYVRLELLKWDPLHETTDFFDMDWHKVLFDYGVQDDESPSGSNDSDVVPVLVEKVALPILHHRIERCWDVLSTQGTRKAVEASRMVIGYLPTSSKDLHRLLAAVSSRLTQAVADLSVPAWGSMVTRTVPGASQYAAYRFGVAVRLLKNVCLWKDILADHVVEKLALDELLRGKILPHMKSIILDVHDAITRAERVAAALSEVWPKQNQKLRPFADLVAELGNKLERRHASGISEDETRGLARRLKNILAVLNEYDKARAISKAFHLREAL

SEQ ID NO: 2224 - protein, 201 aa, Zea mays
  VARIANT 41: note = Ancestral polymorphism is G, Derived polymorphism is S
MGTTGDAPAPAGDPQDRHRTHPPATKQRTTLVFTYGTLKRGFSNHRLLEELFASGDASLVGPAVTSARLPLVCGPYRVPFLLNLPGAGAGAHRVRGEAYAVTARGLARLDELEGVETGHYERLAVAVDLEGGGAVDAIAYFAHRSYANDMWRRSGEKGVPEYTHGVAAGYVRRKDRPQGQTFLEQIRIFNSSPPNPLNNPS

SEQ ID NO: 2225 - protein, 527 aa, Zea mays
  VARIANT 280..527: note = Derived polymorphism lacks residues 280 to 527
MQGGVMAHAAAAAAAASTVTTAVAPPVTAHAVAVAPPVTAHAAAAAGNGSATAAPPPPFLMKTYEVVDDPATDDVISWGPGNNSFIVWNTPEFARDLLPKYFKHSNFSSFVRQLNTYGFRKVDPDRWEFANEGFLRGQKHLLKTINRRKPSLQGNSQPQQPQSQNAPVPSCVEVGKFGLEEEIERLKRDKNVLMQELVRLRQQQQTTDHQLQTLGKRLQGMESRQQQMMSFLAKAMQSPGFLAQFVQQNEKSRRRIVAANKKRRLPRQDGGLDSESAAASLDGQIIKYQPLINEAAKAMLRKILKLDSSHRLESMGNSENGNFLLENYMPGAQAFESSSSTRNSGVTLSEVSANPGLPYGGGGGTSSGLSAICPPEIQCPVVMDNMSSNQVPSMSAVPPVSKATIDMGIPEFSALADLVNEGSVDIPGGAFEMPGPEFPLPEGDDSVPIETDETMYNNNDETQSLPGIIDSFWEQFLVGSPLSADNDEVDSGSPQENGWSKVGNIGDLTEQMGLLSSTNHRDSGNGL

SEQ ID NO: 2226 - protein, 306 aa, Zea mays
  VARIANT 112: note = Ancestral polymorphism is V, Derived polymorphism is D
  VARIANT 61: note = Ancestral polymorphism is V, Derived polymorphism is A
MANGRPDPRCVVLTADTARSLVDSVDAFLFDCDGVIWKGDKLIEGVPETMELLRKLGKKLVFVTNNSRKSRRQYSKKFRSLGLEVTEEEIFTSSFAAAMFLKLNNFPPEKKVYVVGEDGILEELKLAGFECFGGPEDGKKNIKLEADFYFEHDKSVGAVIVGLDQYFNYYKMQYARTCISENPDCLFIATNRDPTGHMTSAQEWPGAGAMVAAVSCSVQKEPIVVGKPSGFLMDFLLKSFNLETSRMCMVGDRLDTDILFGQNTGCKTLLVLSGCTALPEVQDARNNIHPDLYTNSVYDLVGLLQK

SEQ ID NO: 2227 - protein, 220 aa, Zea mays
  VARIANT 49: note = Ancestral polymorphism is L, Derived polymorphism is F
  VARIANT 154: note = Ancestral polymorphism is W, Derived polymorphism is C
MKATLKGRYEGDKATAATSLAAPAGDLRLKASATEAVFANGPSLRGLTLTLEKPGAFLVDLKPHNQDVRFQFMKSALVLDKRVSLTYTHSTSLAAPAPPSRTTLDCTATFDPANKVSLSHTLGSGGCRVKYTYAHGVERLTTIEPLFDTNKNAWEFAVTRKLAGGDAVKGTYAATTKLLGLEWSRDSIAGGSLKVATMFDLSDQPKAPKLIAESTWNYEI

SEQ ID NO: 2228 - protein, 147 aa, Zea mays
  VARIANT 39: note = Ancestral polymorphism is S, Derived polymorphism is A
  VARIANT 30..147: note = Derived polymorphism lacks residues 30 to 147
  VARIANT 21: note = Ancestral polymorphism is G, Derived polymorphism is E
  VARIANT 18..147: note = Derived polymorphism lacks residues 18 to 147
  VARIANT 5: note = Ancestral polymorphism is V, Derived polymorphism is M
  VARIANT 4: note = Ancestral polymorphism is A, Derived polymorphism is V
MILAVLFANSDGNILVERFHGVPAEERLHWRSFLVKLGSENLKGSKNEELHVASHKSVSIVYTTVGDVCLYIVGKDEYDELALAEVIFAITSAVKDVCAKPPTERLFLDKYGRICLCLDEIVWKGLLENTEKDRVRRLIRLKPPVEP

SEQ ID NO: 2229 - protein, 540 aa, Zea mays
  VARIANT 28: note = Ancestral polymorphism is I, Derived polymorphism is T
  VARIANT 397: note = Ancestral polymorphism is P, Derived polymorphism is L
MHIDRFMPLLCSFNGCSINVIYLMSCMIGNHSLLNQCSSPQTWGYISYLSLRGQGRIVWLYFSLPFANLQYPLNCCYSAVPKSYAFCRRWSEHLPMSPVEGCPTVFQAICSLSPGIHEYKFYVDGEWRHDERQPTISGEFGIVNTLYLTREFNQINALLNPSTPGSRMNMDVDNENFQHTVTLSDGTIPEGTVRVSEAAIQISRCRVSEYLNLHTCYDLLPDSGKVIALDINLPVKQSFHILHEQGIPVAPLWDSFRGQFVGLLSPLDFILILRELETHGSNLTEDQLETHTISAWKEAKRQTCGRNDGQWRAHQHLVHATPYESLRDIAVKLLQNDISTVPVIYSSSSDGSFPQLLHLASLSGILKCIFRYFKNSTGNLPILNQPVCSIPLGSWVPKIGDPNSRPLAMLRPNASLSSALNMLVQAGVSSIPIVDENDSLLDTYSRSDITALAKDKVYTHVRLDEMTIHQALQLGQDANTPFGFFNGQRCQMCLRSDPLLKVMERLANPGVRRVFIVEAGSKRVEGIISLSDIFKFLLSL

SEQ ID NO: 2230 - protein, 307 aa, Zea mays
  VARIANT 65..307: note = Derived polymorphism lacks residues 65 to 307
  VARIANT 77..307: note = Derived polymorphism lacks residues 77 to 307
MAATAMCPSPSAAITRHIHARRSCAAASLSLRRSGFLGRVVLAAVPVAVDATRRRRVSVSVRMAWDGPLSSVRLIMQSRNAKLSEKLKEHIEDKVGRAVSKHCHLVREVDVRLSARGGELGRGPKTSRCEITLFTKRHGVLRAEEDAESTYASIDLAAAIVKRKLRKIKEKETEVRRGGDADGVWDEIPPADLLPPAEADDLEAAVGAEDEQTVLAKVVRTKVFEMPPLTVEEALEQLENVDHDFYCFRDEATGQVNILYRRKEGGYGLIIPKNDGKVDTVGVVPPPAVAAEPEPSYAVHAADNNNS

SEQ ID NO: 2231 - protein, 107 aa, Zea mays
  VARIANT 94: note = Ancestral polymorphism is S, Derived polymorphism is L
  VARIANT 76: note = Ancestral polymorphism is T, Derived polymorphism is N
  VARIANT 55: note = Ancestral polymorphism is T, Derived polymorphism is I
  VARIANT 48: note = Ancestral polymorphism is T, Derived polymorphism is A
  VARIANT 44: note = Ancestral polymorphism is F, Derived polymorphism is L
  VARIANT 33: note = Ancestral polymorphism is A, Derived polymorphism is T
  VARIANT 27: note = Ancestral polymorphism is N, Derived polymorphism is D
  VARIANT 25: note = Ancestral polymorphism is N, Derived polymorphism is K
MFSRLSVQKTKGSLPLDGEVSWRVKGNQIETAARPYAFIKFDTFIHKTKKLYLDTRTQRNLAKLNDELYEVHQIMTLNVQEVLGVGEKLDYKISIIFCQRLVMSIAV

SEQ ID NO: 2232 - protein, 271 aa, Zea mays
  VARIANT 59: note = Ancestral polymorphism is P, Derived polymorphism is H
  VARIANT 65: note = Ancestral polymorphism is P, Derived polymorphism is S
  VARIANT 71: note = Ancestral polymorphism is S, Derived polymorphism is P
  VARIANT 221: note = Ancestral polymorphism is E, Derived polymorphism is G
MLLLLLLPPPFLLLAAPTVPAEAAATASTPTLVFLLAGQSNMGGRGGATNGTWDGVVPPACAPSPRILRLSPSLRWEEAREPLHAGIDLHNVLGVGPGMPFAHALLRSWRRSGRRPAVVGLIPCAQGATPIASWSRGTPLYDRMLARARAAVARGPATRLAALLWYQGEADTIRRQDADAYTPRMEALVRDVRRDLGMPDLLVIQVGLATGQGRFVDIVREAQRRVSLRNVRYVDAKGLPVANDYTHLTTPAQVKLGNMLAAAYMAATHTH

SEQ ID NO: 2233 - protein, 183 aa, Zea mays
  VARIANT 12: note = Ancestral polymorphism is I, Derived polymorphism is T
  VARIANT 42: note = Ancestral polymorphism is K, Derived polymorphism is M
  VARIANT 70: note = Ancestral polymorphism is E, Derived polymorphism is D
MTAAEVEAAKDIAEEKAVVPLPPSPAKPADDDSKAIVALVVKDAAAGKPSTAIIGGSTERDAYLAKIVSEKRLSLITAWEESQKARADNRAAKKLAFITSWENAKKAEMEAELRKIEEQLQKKKAAYEEKLKNKLAMLHRTAEERRAQTEARRGEETILAEEMAAKYRAKGEGPTKLFGLLKA

SEQ ID NO: 2234 - protein, 229 aa, Zea mays
  VARIANT 80: note = Ancestral polymorphism is S, Derived polymorphism is I
MASEVQEQDDEVVDRNILPYCSIDRKQKKTLGEMEQEFLQALQAFYYDQKAIMSNEEFDNLKEELMWEGSSVVIAKQTNSVIVKEGPRCSLRSHKVYSDLNVDYIKMFLLNVPATTVALGLFFFIDELTGFEINVFQLPEPFGFIFTWFAALPLILFLAQSLTKAIVQDFLILKGPCPNCGTENLSFFGTILSVSSGGTTNKVKCANCSAELEYDSKSRVITLPEASNA

SEQ ID NO: 2235 - protein, 177 aa, Zea mays
  VARIANT 136: note = Ancestral polymorphism is F, Derived polymorphism is V
  VARIANT 155: note = Ancestral polymorphism is A, Derived polymorphism is V
MLNPHGVMHALSLNVGHFNLTRQQDASEAFLHLLISLRDEFAHCYVPHRSSLADITLSDSKVYKQREGNLPECKRWKQNLFGPFDGTVGSILSCRNCSSVLSLDFENFHCLPLLPVLNANGDITSGCSLVDCLKYFTVVEHLDNYRCDRCWHIIAAKYLSLRSEVDEEKVSKASILF

SEQ ID NO: 2236 - protein, 376 aa, Zea mays
  VARIANT 316: note = Ancestral polymorphism is T, Derived polymorphism is I
MRWWWWRRQRSTMATTAPLVLLLPLVLLLLQARWSSQQQQQVVTAVIVFGDSIVDPGNNNGLHTLIKANHPPYGMDMLNHEATGRYSNGLIPTDLIAQQLGVKQLLPPYLGVDLSPDDLLTGVSFASGATGFDPLTPVVVSVISMDQQLAYFDEYRGRLVDIAGEAETARIIEGALFLVCAGTDDVANTYFTTPFRSAEYDIPGYVDLLVGHAEEFLRELVVSSRGARRIGFVGMPPVGCVPSQRTLGGGLATRACEPKRNEAALLYNARAQEMIAAFNNNNNADADADVLVVFLDIYRILDHLMERGEEYGFSETTRGCCGTGTIEVTGLCDSRFVSVCDDVSQHVFFDSYHPTERAYRIIVNDIFQNYGHVLFS

SEQ ID NO: 2237 - protein, 99 aa, Zea mays
  VARIANT 73: note = Ancestral polymorphism is R, Derived polymorphism is W
  VARIANT 39: note = Ancestral polymorphism is V, Derived polymorphism is L
  VARIANT 18: note = Ancestral polymorphism is R, Derived polymorphism is H
  VARIANT 17: note = Ancestral polymorphism is R, Derived polymorphism is C
MAVSAPRSGAATSFLERRESERALHFVKYQGFGNDFIMVDNRDSSVPKVMPEEAAKLCDRNFGISADGSLSCRGSMMCGNGVCCFARFIAEIENLQGTN

SEQ ID NO: 2238 - protein, 791 aa, Zea mays
  VARIANT 233: note = Ancestral polymorphism is H, Derived polymorphism is Q
  VARIANT 231: note = Ancestral polymorphism is G, Derived polymorphism is R
  VARIANT 228..791: note = Derived polymorphism lacks residues 228 to 791
MATRWRRSLLWVAVVQFLTLCVAEHLVVEAYKKSYIVYLGSHAYGRDASAEEHARATQSHHHLLASILGGDDHHHHETARQSIFYSYTKSSINGFAAHLEESVAQQIAEHPEVVAVLESKMLKLHTTRSWDFMDLERDGHVLPGSIWNHARFGQDVIIASLDSGVWPESHSFQDDGGQVPARWKGSCQDTVKYGVACNRKLIGARFFNKDMLFSNPAVVNANWTRDTEGHGTHTLSTAAGGFVPRASLFGYATGTAKGGAPRARVAAYKVCWSGECAAADVLAGFESAIHDGADVISVSFGQDAPLADDVKSLFHEPAMLGSLHAAIHGVSVICSAGNSGPYDDTVVNAAPWVTTVAATTVDRDFPNVLTLGNSVRLRGTSLESTTLHSSMLYPMIDAARAARTTSNPYDAASCGLGTLDPAAIRGKIVVCRRGGGGGGDVSRVTKGMAVLEAGGAGMILANDRMDGDDIVADPHVLPATMITYSEAVSLYGYMESTSNPVANISPAKTEVGVKNSPSVAGFSSRGPSGTLPYVLKPDIAAPGVDILAAFTEYVGPTELASDKRRSEYAILSGTSMACPHVSGVIALLKAARPEWSPAAMRSAIMTTARTQDNTGAPMRDHDGKEANAFAYGAGNVHPNRAVDPGLVYDAGPDDYFTFLCAMGISAADMKRLSAGKFACPANSAKEAPAMEDLNYPSIVVPSLRGTQTVTRRLKNVGRPAKYLASWRAPVGITMEVKPRVLEFSKVGEEKEFKVTVTSQQDKLGMGYVFGRLVWTDGTHYVRSPVVVNALA

SEQ ID NO: 2239 - protein, 1494 aa, Zea mays
  VARIANT 72..1494: note = Derived polymorphism lacks residues 72 to 1494
  VARIANT 53..1494: note = Derived polymorphism lacks residues 53 to 1494
MASKSRFVVGSHVWVEDPDEAWMDGLVEQINGDELVVNCTSGKKVTANVSSAYPKDTESPRGGVEDMTRLAYLHEPGVLQNLKSRFMLNEIYTYTGNILIAVNPFQRLPHLYNNDMMGIYKGAEFGELSPHPFAIADRSYRLMINDHISQAILVSGESGAGKTESTKSLMQYLAFMGGKPQAEGRSVQQQILESNPVLEAFGNAKTVRNNNSSRFGKFVEIQFDANGKISGAAIRTYLLERSRVCQISDPERNYHCFYMLCSAPPEDCKKYKLGDPRSFHYLNQSNCIALDGLDDSKEYTETRRAMGIVGMSTDEQDAIFRVVAAILHLGNIEFAEGSEDDSSVPKDEKSQFHLKTAAELFMCDEKGLEESLCKRVMATRGESITKNLDPRAAALSRDALSRIVYSRLFDWIVNKINSSIGQDPDSKILIGVLDIYGFESFLTNSFEQFCINLTNEKLQQHFNQHVFKMEQEEYTKEEIDWSYIQFVDNQEILDLIEKKPGGIIALLDETCMLRNSTHETFAEKLYQKFKDNPHFSKPKFSRSGFTVHHYAGNVTYQTDLFLDKNIDYAVNEHQVLLNASKCSFVSSLFPPCEESTKSTKFTSIGSSFKQQLQSLLETLSATEPHYIRCIKPNNVLKPAIFENSNVLQQLRCGGVLEAIRISCLGYPTRRTFYEFVNRFGILQPKVLGRSHDEVTAAKMLLDKANLAGYQIGKTKVFLRAGQMAELDALRTEVLGLSAKKIQSKLRSFLARKKYIELQQCATQIQAICRGTTARRRYENLRRDVASLKMQTCYRMHYARKNYVEICSASTNIQSGLRGMGARIKLRLKRQTKAAVIIQSRCRCYLVRSRYVRLVKATITAQCGWRRRVARKELRNLKMAAKETGALQAAKSKLEKEVEELTWRLQLEKRIRADLEEAKSQENKKLQLQLQELQLQLKDTKDLLKREHEAAKEASEKAAAVPEILADTAQVNELTAENEKLKSLVASFEEKLQNAEQKFEETEKAREELVKKATDAESKINELKNTMQSLQEKLTSTEAENHVLRQQSMKARPDNMPLLNMHRKSNLANGSLHSDEQTPHGTPMEFGRRSIIERHNESVDALINCVVENVGFSEGKPVAAITIYKCLLHWRIFETDKTNVFDRLIQIFGSAMQKQDNNADLAYWLSNSSSLLIILQKSLKPPGSSVTTPMKRPQTQTSFLGRMGFRASSITVDMDLVRQVEAKYPALLFKQQLTAFVEGLYGMIRDNVKKEISSVISLVIQVTPSIESHPQAPRNAKAGLITDQGSYWQTIVKHLNDLLEILQENCVPTVFARKIFTQIFSFINAQLLNSLLVRRECCSFSNGEYVKQGLDELETWCTVAKPEYAGSAWDELKHICQAVGFLVIFKKFRISYDEIISDLCPVLSVQQIYKICTQYWDDKYNTESVSEEVLDEMKKVVNEGSGQGTSSDNTFLLNEEISLPLSLEEIANSMDAKEFQNVSPPQELLDNAAFQFLRS

SEQ ID NO: 2240 - protein, 754 aa, Zea mays
  VARIANT 252..754: note = Derived polymorphism lacks residues 252 to 754
MARTNWEADKMLDVYIYDYLVKRNLQATAKAFIAEGKVATDPVAIDAPGGFLFEWWSIFWDIFHSSTAKASSTSTAAAFIDHTAKQQQPIGAGTGAPPPHPLHDSREHQMRLQQLLHQHNPHLHTTRDASPPASINALNSDVSAVLASKMMQDRVRNPNPIDSDASQHLLDANRIALLKSPPPSHTGPMPMQQQLHPRNQQLDIKPDVGMPQRTMPADPSSMYASGMMHPKPALLATGLNQGGVGSVPLKGWPLTVPGIDQLRSNLGVQKQLVPSSNQFQLLSPQQQLLAQAQTQNDLTRMGSPAPSASPNVRPDDPDYLMKLKMAQMQQSSGHRPMELQQPHQQNTRKRKPTSSGAANSSGTGNTVGPSPPSTPSTHTPGGGVPVASNVNILQKSSMICGVDATGGLASSSNQMDALDSFVDFDENVDSFLSNDDVDGRGMFAALEKGSSEHNTESLKGLSLSEVGNNRTSNNKVVCCHFSSDGKLLASAGHEKKVFLWNMDNFKMDTKIEDHTNFITDIRFRTNSTQLATSSSDGTVRLWNAADESGALQTFHGHRSHVTSVDFHPRLTEVLCSCDDNGEILFWTVGQTTSTHVLRVKQGGTGRVRFEPRSGQLLAVAAGSMVNIFDVEKQSSLPCPPKGHNSEVNFVSWDENGEYLASVSQDTVKVWSVSSGVCIHELRSNGNQYQSCTFHPRYPKVLIVGGYQTLELWSLSDNQRIPIQAHEGLIAALAHSPFTGMIASASHDRCVKLWK

SEQ ID NO: 2241 - protein, 522 aa, Zea mays
  VARIANT 362..522: note = Derived polymorphism lacks residues 362 to 522
  VARIANT 314: note = Ancestral polymorphism is C, Derived polymorphism is W
  VARIANT 307..522: note = Derived polymorphism lacks residues 307 to 522
  VARIANT 175: note = Ancestral polymorphism is D, Derived polymorphism is Y
  VARIANT 112: note = Ancestral polymorphism is P, Derived polymorphism is L
  VARIANT 16: note = Ancestral polymorphism is A, Derived polymorphism is V
  VARIANT 6: note = Ancestral polymorphism is I, Derived polymorphism is N
MEFTLNPDLVPQNRHAVIKVYVSRKWIFRGAMDNGPIHHIDLVLIDKEGNGISAEIPGNLAEEKGSIIEENEIYEISRFIISSARQMFKPVHIDKMIHFTYHTIIKASLDSPSTFPRYVYHLTPLHQIESYIQKNEYFLDVLGVITQVSALKPVRTQTQESSNVIKEIIIKDINDVTMRLTLWAERAKAFKLDDVYNPLEQKPIVTLFVGCLAKNFQGAYLNGGTACRWYFNPGIKEAAPYYQRFGSQKIKLQIPSEQEQQLSVAKETHVEHKTLHELLALDPYAFPKQGYECTVTIIEVPTTNRWWFPSCTKCSRACRPQDGGYYCSYCKSEAYTLRYKLTFMGSDATATAQMFCFDTVARHIVGRPCETVLKQATEAAPIPPDLAQIVSLKFTFRVTASNQTFAQREKQPTVLQINSIVVVHGRQHSLPSGIQNTIDQGPSTPNKEATLKLLEESPSTAMERLSTKVSKDVGKKLTYSTQDEDIIGSQVLDVAQGTNADKGIPTDKGKEIEPHLQSPPKR

SEQ ID NO: 2242 - protein, 270 aa, Zea mays
  VARIANT 192: note = Ancestral polymorphism is W, Derived polymorphism is L
MKSTLPSMSFQSPCFKIQPATQQSLWPPRRQSTRKPGLPLKLIRAALGPDANGGLLNADRRGATLPSSPLSDVVQEFYSSLNERNSKRLDKLMAPDCIIEDTAYYKPLDAKCTHIYFKRLMESMGEKVKFAIDEVCQGAGRTAAVMWHLEWNGYIIPFSRGCSFYICSVNGAVLLIRKIHIFNESPLKPGKWALEILNIVTNLFNVFPKPAEGFLKDPEAVAQPFINLYKFYVEPFIIPFLAYYTHFWTYVGRGLSMVLHILYNLYKRLM

SEQ ID NO: 2243 - protein, 249 aa, Zea mays
  VARIANT 188: note = Ancestral polymorphism is R, Derived polymorphism is H
  VARIANT 183: note = Ancestral polymorphism is L, Derived polymorphism is F
MQPVKVYADRRSQPSRAVIIFCRVNQIDFEEVTVDLFKSQHLTPEFKKINPMGQVPAIVDGRFKLFESHAILRYLASVFPGVADHWYPSDLFTRAKIESILDWHHSNLRRGAATLVMHTALAPFLGLTTSHEAVKQAEKLVMQSLGVIESVWLKGDAKFLLGIPQPSIADLSLVCEIMQLEILGDEVRDRFLGAHERILVWMDKVKKATSPHFEEAHELLFQVKKARMVQGSSSKAFESSTKLKTASKL

SEQ ID NO: 2244 - protein, 100 aa, Zea mays
  VARIANT 81: note = Ancestral polymorphism is G, Derived polymorphism is D
MPPREPPARRLPAAIPSPSPPRTPPHTPPPSVGKQAQTLTAGDASTMARYDRAITVFNPDGHLFQVEYALQAVRKGNTVVGVRGTDTIVLSVEKKSTPKL

SEQ ID NO: 2245 - protein, 242 aa, Zea mays
  VARIANT 1: note = Ancestral polymorphism is M, Derived polymorphism is T
  VARIANT 3: note = Ancestral polymorphism is K, Derived polymorphism is N
  VARIANT 5: note = Ancestral polymorphism is A, Derived polymorphism is P
  VARIANT 7: note = Ancestral polymorphism is G, Derived polymorphism is E
  VARIANT 21: note = Ancestral polymorphism is R, Derived polymorphism is H
  VARIANT 23..242: note = Derived polymorphism lacks residues 23 to 242
  VARIANT 43: note = Ancestral polymorphism is E, Derived polymorphism is K
  VARIANT 54: note = Ancestral polymorphism is R, Derived polymorphism is H
  VARIANT 60: note = Ancestral polymorphism is K, Derived polymorphism is E
  VARIANT 76: note = Ancestral polymorphism is P, Derived polymorphism is H
  VARIANT 77: note = Ancestral polymorphism is V, Derived polymorphism is I
  VARIANT 79: note = Ancestral polymorphism is S, Derived polymorphism is N
  VARIANT 92: note = Ancestral polymorphism is V, Derived polymorphism is I
  VARIANT 133: note = Ancestral polymorphism is P, Derived polymorphism is A
  VARIANT 150: note = Ancestral polymorphism is I, Derived polymorphism is T
  VARIANT 156: note = Ancestral polymorphism is R, Derived polymorphism is W
  VARIANT 175: note = Ancestral polymorphism is A, Derived polymorphism is T
MDKMAVGTKAMFAPYISDELRLQVMSLLYVGIPVETIMQRHTKMVEKQEFKICRSNSSLKFTHSSVAFSFTILQYPVHSILVFDQHKNAIPIAWIITPILHMVKYINGWVLFYDRAHTKDPTWQLGGFIIDGPLADVRTIREVFHCPVLISLWRIRHAWHKNLLNKCSDIEKRSTMAKRLGDAISIICRGTGDVELFESFLQDFVECVGFLDYFKVVWLPRLGQFMCLSCIIFCFSISGFLL

SEQ ID NO: 2246 - protein, 1490 aa, Zea mays
  VARIANT 548..1490: note = Derived polymorphism lacks residues 548 to 1490
MPMPESHPHAVAAAAAGLALASTSSRRSLSLGSSISQSFRQMDTEDPFGRAQSDHDDEENLRWAALEKLPTYDRMRQGILRRALDNDQQQQQRQSVEVVDIHKLAAGGDGGRALLDRLFQEDSERFLRRLRDRIDMVGIDLPTVEVRYHQLTVEADVITAGRALPTLWNAATNFLQGLIGRFGSSNKKNITILKNVNGILKPSRMTLLLGPPSSGKSTLMRALAGKLDKNLKVSGSITYCGHPISEFYPERTSAYVGQYDLHNAEMTVRETLDFSRRCLGIGARYEMIAELARRERDAGIKPDPEIDAFMKATAVQGQETNIITDLTLKVLGLDICADVIIGDEMIRGISGGQKKRVTTGEMLTGPARALFMDEISTGLDSSSTFEIVKFMRQLVHVMSETVMISLLQPPPETYNLFDDIILLSEGYIVYHGPRENILEFFESAGFRCPDRKGVADFLQEVTSKKDQQQYWYLDQEQYHYVSVPDFAERFKSFHACQQMQKELQIPFEKSKTHPAALTTRKYGLSSWESLKAVMSREQLLMKRNSFIYIFKVTQLIILALMSMTVFLRIKMPHGQIADGTKFFGALTFGLITIMFNGFAELQLTIKKLPVFYKHRDFLFFPAWTLGVANIILKVPVSFVESAVWVVLTYYVMGFAPAAGSSFMSHLSFGNRFFRQFIAFFATHQMAMALFRFLGAVLKTMVVANTFGMFVLLIIFIFGGFVIRRNDIRPWWIWGYWASPMMYSQNAISVNEFLASRWAIPNNDTTIDAPTVGKAILKSKGLFTGEWGFWLSIGALIGFIILFNMLYLWALTYLSPSSGSNALVSEGEDDVNEMALEGRRKDARRSKDEISQVVSSDPGTNGGTNTLAQSRVTLPFQPLALCFNHVNYYVDMPAEMKEQGFTESRLQLLSDISGTFRPGVLTALVGVSGAGKTTLMDVLAGRKTSGAIEGDITLSGYPKKQETFARISGYCEQTDIHSPNVTVFESITYSAWLRLSSDIDDGTKKMFVEEVMALVELDVLRDALVGLPGVSGLSTEQRKRLTIAVELVANPSIIFMDEPTSGLDARAAAIVMRTVRNTVNTGRTVVCTIHQPSIDIFESFDELLLLKRGGQVIYAGELGRHSHKLVEYFEAIPGVPKITEGYNPATWVLEVSSPLSEARLNMNFAEIYASSVLYRKNQEVIKELSIPRSDNQDLSFPTKYSQNFYGQCAANFWKQYRSYWKNPPYNAMRYLMTCLFGLVFGTVFWQKGKNIDSQQDLYNLLGATYAATFFLGASNCITVQPVVSIERAVFYREKAAGMYSPLSYAFAQGSFDIWFWQTCVEVIYTILQGILYTVIIYAMIGYDWKADKFFYFLFFITASFNYFTLFGMMLVACTPSALLANILITFALPLWNLFAGFLIVRPAIPIWWRWYYWANPVSWTIYGVVASQFGENEGELSVPGGTPVVVKQFLKDNLGIQHDLLGYVVLVHFAYVIVFFFVFGYSIKFFNFQKR

SEQ ID NO: 2247 - protein, 440 aa, Zea mays
  VARIANT 379: note = Ancestral polymorphism is S, Derived polymorphism is L
MKRWGSSGQAADSFYQVRPDCSQNVPNTKFKIKAGKTLSVRKWHAAFTRDGCLDIASVLSRIQRGGVHPTIRGEVWEFLLGCFDPGSTFDERDQIRERRRMQYARWKEECKEMDSHVGSGKIITAPIITEDGFPIKDPLVLLEATSDTQGTSIATGNSGNGIENRVLDKQIIDWKLTLHQIGLDVLRTDRTMVFYENKDNISKLWDILAVYAWIDKEVGYCQGMSDLCSPMIVLLHNEADAFWCFERLMRRLRGNFRCTQQSVGVENQLQHLASIIQVLDPKLHGHLERLGGGDYLFAFRMFMVLFRRELSFGDSLYLWEMMWALEYDPGICSTYEEDNTGAVVHKIEGKVKSIRQFGKYERENMKKRANDGDGPVPISVFLVASVLKENSTKLLQEARGIDDIIRILNNVNGNLDAKRACVVALKLHRKYHKKLQEKKS

SEQ ID NO: 2248 - protein, 171 aa, Zea mays
  VARIANT 149: note = Ancestral polymorphism is A, Derived polymorphism is T
  VARIANT 115: note = Ancestral polymorphism is L, Derived polymorphism is F
  VARIANT 114..171: note = Derived polymorphism lacks residues 114 to 171
  VARIANT 98..171: note = Derived polymorphism lacks residues 98 to 171
  VARIANT 69..171: note = Derived polymorphism lacks residues 69 to 171
  VARIANT 48: note = Ancestral polymorphism is D, Derived polymorphism is E
MAAAAVKSSAGMAGKKSRKPYVVSRPREKWTADEHGRFLHALLLFGRDWKRVQAFVATKTGTQIRSHAQKHFLRADKKLGLAVPPRHPHRSAAGCPAWCADDGGTLAPDVETVQFPLSPDDLRLAQVYRFVGDVLGSSVEAQLHRLLGADPVVVDTVLRVLANLQDNLDIL

SEQ ID NO: 2249 - protein, 168 aa, Zea mays
  VARIANT 24: note = Ancestral polymorphism is P, Derived polymorphism is L
MSAAVNKSSAGTKKSRKPYVVSRPRERWTADEHGRFLHALLLFGRDWKRVQAFVATKTGTQIRSHAQKHFLRADKKLGLAVPPPHPRRSAADYGGALAPDVETVQLPLSQDDLRFAQVYRFVGDVFGCGAMWPVEAQLQRLLGADPVVVDTILRVLANLQDNFPPCSL

SEQ ID NO: 2250 - protein, 168 aa, Zea mays; identical to SEQ ID NO: 2249
  VARIANT 24: note = Ancestral polymorphism is P, Derived polymorphism is L

SEQ ID NO: 2251 - protein, 248 aa, Zea mays
  VARIANT 16..248: note = Derived polymorphism lacks residues 16 to 248
MNHIPPTEHGNGGSKQLEIPQPGSFSCGLISSEARPQFRHQPSNSMAANFGNKIRNAKLVLLGDVGAGKSSLVLRFVKGQFVEFQESTIGAAFFSQTLAVNDETVKFEIWDTAGQERYHSLAPMYYRGAAAAIVVYDITNPASFTRAKKWVQELQAQGNPNTIVALAGNKVDMLDARHVAVEEAKTYAQENGLFFMETSAKTAINVNDIFYEIAKRLLQGQEAPSPQAGIVLNQRPDERMVSTSSCCS

SEQ ID NO: 2252 - protein, 274 aa, Zea mays
  VARIANT 1: note = Ancestral polymorphism is M, Derived polymorphism is I
  VARIANT 35: note = Ancestral polymorphism is S, Derived polymorphism is F
MEWLQMNKYFHVVVKRVERDGWKFVLLARFSDLPSYIINYSLSAIDARYYEIIIHTICSLETKLLRDRIFHALAVLYRISLFFTLLALWFCISVPLTLIGGLLGTRAASIDYPVRTNQIPREIPERKFPPWLLVLGAGTLPFGTLFIELFFILSSIWLGRFYYVFGFLFIVLFLLVIVCGEVSLVLTYMHLCVEDWKWWWKAFFASGSVAFYVFLYSINYLVFDLRSLSGPVSATLYLGYSLIMALAIMLSTGAIGFLLSFYFVHYLFSSVKID

SEQ ID NO: 2253 - protein, 204 aa, Zea mays
  VARIANT 155: note = Ancestral polymorphism is R, Derived polymorphism is W
  VARIANT 84: note = Ancestral polymorphism is R, Derived polymorphism is C
  VARIANT 72..204: note = Derived polymorphism lacks residues 72 to 204
  VARIANT 35..204: note = Derived polymorphism lacks residues 35 to 204
  VARIANT 32: note = Ancestral polymorphism is V, Derived polymorphism is M
  VARIANT 26: note = Ancestral polymorphism is A, Derived polymorphism is S
MDDTRGLLIGQARDDEQARNVMVVGSTSALAVVREYRRGNWTLPETMMLIEAKQKVHEERHPGDQGLARWRWVEDYCWRAGCRRSQNQCNDRWDNLMRDYKKVRAYELSAAGANAAAAGRPLSYWAMGRAERKERGLPNNLLREIYDAIAEVIGRRTSMGCAAGAAFTATTASLLDVPMQASPLAQVLPRPLLALGTRSFVIHV

SEQ ID NO: 2254 - protein, 203 aa, Zea mays
  VARIANT 150..203: note = Derived polymorphism lacks residues 150 to 203
  VARIANT 86..203: note = Derived polymorphism lacks residues 86 to 203
  VARIANT 46: note = Ancestral polymorphism is P, Derived polymorphism is S
  VARIANT 42: note = Ancestral polymorphism is D, Derived polymorphism is N
  VARIANT 37: note = Ancestral polymorphism is T, Derived polymorphism is M
  VARIANT 31: note = Ancestral polymorphism is P, Derived polymorphism is T
  VARIANT 28: note = Ancestral polymorphism is A, Derived polymorphism is V
  VARIANT 7: note = Ancestral polymorphism is P, Derived polymorphism is L
MAELGVLLTKHLGFHQYDVYGDLLGLLASHPVAPIVMLHHLDVVKPLFPDARSRPSAVRRLFDGPVKLDTAGLMQQSICYDSANRWTVSVAWGFTVLVVRGIMSPREMEMSARTFLNWYRRADYTAYAFNTRPLARSPCQKPVVYYLSSEQREALHGGETTVTRYERWRHPNETRPACRWDITDPDAHLDHIIVLKKPDPRLW

SEQ ID NO: 2255 - protein, 110 aa, Zea mays
  VARIANT 15..110: note = Derived polymorphism lacks residues 15 to 110
MSRASWAAEGCAGAWAAEKVERALDQRRMKVVEIGGAQELLNVLEGAKDDKTRKETLKALAALSKSEEAAGFLDKVGAYAIVSSTPDSQEYAEIQTYKTSLLTAFDQLKS

SEQ ID NO: 2256 - protein, 286 aa, Zea mays
  VARIANT 39: note = Ancestral polymorphism is P, Derived polymorphism is L
MPAAAAAQRLLAASTKIIGVGRNYIAHSKELGNPVPKEPVLFLKPTSSFLHAGVATAAVEIPEPLESLHHEVELAVVISRRLLSPPSATAAARRAAPVAAEAVSSGGGVLLPRGGVAGVAANGWSGSGPGLRLARRLCTYDERDDRALEEEVEKKFGWILKIIFLGTAGLVGYQFFPYMEDLPGDVWVTSPAMAVLGAELPQGNYVPVEELVPVEIEAKLEGGLCSGRRTAGQAWSAAWSGGLEYLDSGVRLSTGDEVERLSTGDEAERLSTGRRRQPGVAWTGGL

SEQ ID NO: 2257 - protein, 193 aa, Zea mays
  VARIANT 18..193: note = Derived polymorphism lacks residues 18 to 193
  VARIANT 19: note = Ancestral polymorphism is R, Derived polymorphism is H
  VARIANT 26: note = Ancestral polymorphism is N, Derived polymorphism is D
  VARIANT 34: note = Ancestral polymorphism is R, Derived polymorphism is W
  VARIANT 35: note = Ancestral polymorphism is V, Derived polymorphism is I
  VARIANT 47: note = Ancestral polymorphism is D, Derived polymorphism is N
  VARIANT 69: note = Ancestral polymorphism is C, Derived polymorphism is S
  VARIANT 97: note = Ancestral polymorphism is E, Derived polymorphism is K
  VARIANT 98: note = Ancestral polymorphism is R, Derived polymorphism is H
  VARIANT 118: note = Ancestral polymorphism is V, Derived polymorphism is A
  VARIANT 120: note = Ancestral polymorphism is V, Derived polymorphism is I
  VARIANT 151..193: note = Derived polymorphism lacks residues 151 to 193
MDQAADSSELLRRIEELQRKKDEKQNSLELLLRRIEGLQYEMDEKVNLVEVLTRQVENLQRVISGSSSSLRAFLFNDFIIVYVLVVQGVLIDTLFVERDELRKDIEQLCMQQAGPGYVSVATRMLTQRTAALEQDIENLQKKLGGCLRENQNLQEELAEAYRIKSQLAELHGAALSKVSHFDLKYVAILFNKL

SEQ ID NO: 2258 - protein, 882 aa, Zea mays
  VARIANT 466..882: note = Derived polymorphism lacks residues 466 to 882
  VARIANT 412..882: note = Derived polymorphism lacks residues 412 to 882
  VARIANT 176: note = Ancestral polymorphism is D, Derived polymorphism is Y
MHNSIPAMAVSSPPPPRLHLSLHLRKPIQNSPPSGKKARPAPTAETLRRRFLRRGVSPTPKILHTLRKKEALKALRRARKDTAAAATASRNPCDEEETRFRAAAAEYHALAGRPWDAGTRGMAPPRGLDGEEGGLEGLREMLAARRGDGFRWLLDDDIEAEAAERKQQRRPGAGWDVGTEDEERRIQLLVSRTSIQLVLESNDPTLPQPEDRISGVEKGLAGLQPNCGPPWNKKRLNGDYLSFRDWRLTRVMKRADIIYSEDNLLRILDGLEARGNWRQALSIIEWVYNENSYRHRKSRFVYTKLLSILGKSLRATEALHIFTIMRGDAQIYPDMPAYHCIAVTLGRAGLLKELIKIIEYMRQKPSKLVMKMRRKDWDPSLEPDVLVYNSVLNACVLSQQWKGVFWVFQQMRIGGLPPTGATYGLAMEVMLKAKKYDFVQKFYEKMQKNGVPPRAITYKVLVRSFWEQDKINEAVEAVNDMEQRGVVGAASVYYELACCLCNNGRWRDAMLQVEKLKQLPLTKPLEYAFTGMILASFNGGYIYDCISIFELMKDHCMPNIGTVNVMLKVYGHCDMFGKAKDLFETTKACFLNSQTYIHEHSSFKADTYTYNSMLEASASAQQWEYFEYVYREMALSHHCLDQSKYSWLLIKACRAGKPYLLEHALDSILERGEIPDVQLITESICQSIAHRDYGRTLQLLNIMTQASIKIKEVEWDYLLQQNMHQFSIDALEGLIKYLSTNGTTNADPAVDLVRALQSQCRDDTSTQQFELSFHGSGNKYSCSSLAELDQLTCKNLCTDIILDVPGSDREMPQLGVSALMCRDISLNGQRVENKHELSDLGQRGPQVSAIDKVLDSMNSYGDNSYGEMPSASKILELWEHER

SEQ ID NO: 2259 - protein, 122 aa, Zea mays
  VARIANT 51: note = Ancestral polymorphism is S, Derived polymorphism is Y
  VARIANT 49: note = Ancestral polymorphism is T, Derived polymorphism is M
  VARIANT 45..122: note = Derived polymorphism lacks residues 45 to 122
  VARIANT 33: note = Ancestral polymorphism is D, Derived polymorphism is N
  VARIANT 20: note = Ancestral polymorphism is R, Derived polymorphism is C
MVAMMRNGFAWVLYCLVAGCIMNLIPTQGSLMNMMWLKAVNEMEQRLLTPSMMARDLKVAVIYAVLFCFLMVSCYAALYLKWFRLSAMFVTFGILLPVSLKISRHRRLKRKRERRLLLPLSM

SEQ ID NO: 2260 - protein, 540 aa, Zea mays
  VARIANT 346..540: note = Derived polymorphism lacks residues 346 to 540
  VARIANT 334..540: note = Derived polymorphism lacks residues 334 to 540
  VARIANT 268..540: note = Derived polymorphism lacks residues 268 to 540
  VARIANT 96..540: note = Derived polymorphism lacks residues 96 to 540
  VARIANT 44..540: note = Derived polymorphism lacks residues 44 to 540
  VARIANT 32: note = Ancestral polymorphism is C, Derived polymorphism is R
MGLEAAMALGDPPADYASIATVGLFVAFMCVCIVVGHLLEENRWMNESITMLFIGLGTRAVILFASSEKHSRVLVFSEDLLFIYLLPLIIFNAGFQVKKKQFFRNFITITLFGAVGTLISFTVISLGALGLISRLNIGALELGDYLALGAIFSATDSVCTLQVLSQDETPFLYSLVFGEGVVNDTTSVVLFNAIQNFDHGNISGAKLLNFIGSFLYLFGSSTILGVASGLLSAYTIKKLYFGRHSTDHEVSIMMLMAYLSYMLAEKVRGSQPSKHAFATLSFIFETFLFLYVGMDALDIEKWKIVGQTYRHTLSLFLSLHCSTRRSFFWICIFYHVQPGKVYRFEQHHFSLGAGFKSCFCFPTILSIKFDQKTPNGKISFRQQVIVWWAGLMRGVVSIVLAYNKAFDLMFPRFCGSARHFGRCARHFGRDIIMPNLKSSVTTTASAVEYMDEVLKALSPGMLFIHLGDSGFGFGAMEVEVNRGFNSDAVLAMETIHSLSASKSSYPMADLTQLFMTATQEGKRSESQGQILRVECYSLMP

SEQ ID NO: 2261 - protein, 520 aa, Zea mays
  VARIANT 74..520: note = Derived polymorphism lacks residues 74 to 520
  VARIANT 171: note = Ancestral polymorphism is P, Derived polymorphism is A
MDSRSFRSTAAASGTSDLSVAPVVAARRSSSPEMSELKPRTAFHQSPIAACVAGVLQTRDARSRGQRGGGWRGWGEDPGDDAVSGRGGRRSEGERRRWRRSEGRGGASQSFIGVNYGTIADNLPPPASTASLLMSTSIAKLRLYEPQPDLVAALAGSNISILLGIPNGAVPNLASSPAAAASWAAANIPTTLPVSSISVGNELLNSGDPTLAPQLLPAMQNLLAALPAGSTTKACIGILSSHTCISTVHSMAVLSASDPPSSGAFHPDLAGSLDPVLDFLHQNGAPFMINPYPYFAYASDTRPETLAFCLFQPNAGRVDAVSGLTYTNMFDAQLDAIRAALDAKGYSDVEIVIAETGWPYKGDADEAGATVDNAKAYNSNLVAHLKSQVGTPRTPGKSVDTYIFALYDEDLKGGPESERSFGLYKTDLTANYDVGLAKDNGTAAPTSLTPVPAQGTPQPSKGTMPTGYCETTSAVPGTTQGQQLPQSSSCYIPGGAESRHATWQLVLLGVLMCLVKVAGI

SEQ ID NO: 2262 - protein, 899 aa, Zea mays
  VARIANT 321..899: note = Derived polymorphism lacks residues 321 to 899
MPRSLVVGDLAVPEMAHPYMKKDDDDEDVEYSPFFGIEKGSVLQEARAFHDPQLDVRRCSQVIIKLLYLLNQGETFTKVEATEVFFAVTKLFQSSDAGLRRLVYLMIKELSPSSDEVIIVTSSLMKDMNSKTDMYRANAIRVLCRIIDGTLLTQIERYLKQAIVDKNPVVASASLVSGIHLAQANPEIVKRWSNEVQEAVQSRAPLVQFHGLALLHQIRQNDRLAVSKLVSSLTRGSVRSPLAQCLLIRYTSQVMCESSMNTQNGDRPFFDFLESSLRHKAEMVALEAARKITEMDVTSRELAPAITLLQLYLSSSKPVLRFAAVRTLNKVARTRPLAVTNCNVDLESLLSDQNRSIATLAITTLLKTGNESSVDRLIKQITLFMSDIADEFKIVVVEAIRSLCLKFPLKYRSMLNFLSNSLREEGGFEYKKAIVDSIVTLVSEIPDAKEIGLLHLCEFIEDCEFTYLSSQILHFLGNEGPRTSDPSRYIRYIYNRVILENATVRASAVSTLAKFGALVDTLKPQIFVLLQRCLFDTEDEVRDRATLYLQTLSGEVAIGNDEKDVKDFLFGSFDVPLANLEASLRTYEPSEEPFDISLVSREVRSLPPKEKAAPGKRPPAGAAAAAAPVSTVDAYQKMLSFIPEFSGFGRLFKSSEPMELTEAETEYAVSVVKHIYDGYIVLQYNCANTIEEQLLEDVTVCVDASDAEEFSEICSKPLASLPYNSPGQVFVAFEKPERVPVVGKFLNLLKFTVKEVDTTTGEADEDGVEDEYQLEDFEIVSADYMLRVVVSNFRNAWENMDPDSERVDEYGLGVRESLAEAVNAVINILGMQPCEGTEVVPKNARSHTCLLSGVFIGNMKVLVRLSFGLSGPNEVAMKLAVRSDDPEVSDKIHEIVASG

SEQ ID NO: 2263 - protein, 1581 aa, Zea mays
  VARIANT 1375..1581: note = Derived polymorphism lacks residues 1375 to 1581
  VARIANT 1285..1581: note = Derived polymorphism lacks residues 1285 to 1581
  VARIANT 942..1581: note = Derived polymorphism lacks residues 942 to 1581
  VARIANT 549..1581: note = Derived polymorphism lacks residues 549 to 1581
  VARIANT 517..1581: note = Derived polymorphism lacks residues 517 to 1581
  VARIANT 513..1581: note = Derived polymorphism lacks residues 513 to 1581
  VARIANT 479..1581: note = Derived polymorphism lacks residues 479 to 1581
MDSTGPIDPMEYTMGTRRQTALTDISNQIITGPSDEHERHREERNRKQREYRARRKAEETNEEREARNKRMRDYRAMKKADTAITASTMGNLIMNRARYINMDDADREILLHKRREYKKLRQCVQDDTITDTLSGAPLSIQTQQHIVHDTPTHEPELRDYDTVLIEPTQPSLEGHMEHPITPHDFNIAQHNEYTRSREFHGEDDAFESYRLLGYSSHTEDPYDYVYHKLPDRHHVLRKIPDCCYCGAMKFEFEPHGMCCRKGKIKVHIPDVPTELKRLFTSQGDDDAKYFRKNIRYFNSHFSFTSLGVTLDRRVSTAANTGIYTFRVQGALYHRLDHLVPGSQGPRHLQLYFYDTEDATLAHRARRSPDLDINIIKNILTILEGNPYVQTFNRLGSIPNLDDYVIELNTNVTPDQRRYNAPTASQVAAIWFEGNDPQRSFDRSVIIYATGDRPTCIKAYHGCYDPLAYPLFFPRGQTGWNRFMPYNETPTVNATFNAPDHNDTRSVNNEHTGRLFQQWVVDMYIKIESMRLDWYSNPVNQKIIRAELYQGLVDVISAGENRASEVGKRIVLPRTFQGGDRDMQQRFLNAMAIVQRLGKPDYFITMTCNPYWEEITNNLLPGQTPQDRPELVTRVYRAKLRDMKDLLIKKAYFGQVAGYVHVTEFQKRGLPHEHILLIMNLHNKLTSPDAYDKVICAEIPEKDKYHVLHNLVIKHMLHGPCGVLNKKCPCMVNEECRFRYPRQFCAATQQGKDSYPLYRRRDDGRCVKVRGCVLDNRWVVPYNPGLLMRYNCHINVEACSSIKAIKYMCKYVYKGHDRASFSVDPAHKEDGVINEIRQYRDARYISPPEAVHRILGFPLFGVNPSVLQLQCHLPGMQSVIIDETAKLQDIVNEPTSSMTTLTEYFTKNRADSFARTLLYKDFPEYYRWIHGSKRWQRRKQRGQIGRIVYAHPAEGERYFLRVLINHVRGAYSFEDLRTLGDITCSTFREACEKRGLIEADMSLDDCLSEAATFQMPPALRRLFATILVFCEATNVRGLWDKHNDSMSEDYNRDNPKSTCVQQMVLKDIRELVRSMGKDIKSYDLPEINDTGEFCNDIMRELREELAIGVDQEHLDIYTCLNNEQRAGFDEIIDHVLNKKNRLFFVDGPGGTGKTFLYKALLARVRSEGLIAIATATSGIAASILPGGRTAHSRFKIPIKLADNSTCNFTKQSGTAELLCTASLIIWDEVAMTKHQAVECLDRSLQDIMTCSLPFGGKVIVFGGDFRQVLPVVTRGTRAQITDATLQRSYLWDSIRKIRLTMNMRAQSDKWFSEYLLRIGNGTEETIGSDYVRLPEEIVIGYTDTEDSINKLIVDVFPSLEENARSIAYMSTRAILSTKNQHVDQLNAKMIDKFPGNGKVYHSFDCVDDDSRNNYPIEFLNSMTPNGLPPHVLKVKINSPVILLRNLDPNNGLCNGTRLMVRALQDNAIDAEIVGGHNAGTRVFIPRIPMCPSDDISLPFKLKRKQFPIRLSFAMTINKAQGQTIPNVGIYLPEPVFSHGQLYVALSRGVSRQTTRILARPKKELDPTGKSTKNIVYKDVLNC

SEQ ID NO: 2264 - protein, 105 aa, Zea mays
  VARIANT 8: note = Ancestral polymorphism is R, Derived polymorphism is C
  VARIANT 14: note = Ancestral polymorphism is R, Derived polymorphism is C
  VARIANT 29: note = Ancestral polymorphism is L, Derived polymorphism is S
  VARIANT 39: note = Ancestral polymorphism is G, Derived polymorphism is D
  VARIANT 79: note = Ancestral polymorphism is W, Derived polymorphism is G
MAALPIVRHYVRLRRGLLVLFTTTTLSSSEVIMNLLPDGVIYQVQSKKEGMKNDNGSGRVGGDDGAAGGRGRVQPLHSWFSIFHLPTFDPSVLEFRPVWIQGAKF

SEQ ID NO: 2265 - protein, 583 aa, Zea mays
  VARIANT 248..583: note = Derived polymorphism lacks residues 248 to 583
MATPPDGAPAGPDDTSPPPSSNSSTPPPSDSSTPPPKSSGSGSPSPSPPAPSLSPPPPASPQDSTAPAARGSPAAPSRDSPSPPAPKRSDSDSDNSGSSKSGSGSGSRSRSSGSTQVDVILAGVVIGVLAFSLLMCIAACVCCAKKKRRKKPPHMNMPYYTDEHGNVFYANSMPKWQSSAMDHGWHAPYSPASGDMSGSHGPGLGQMPPSPGMPSLGFSKSSFSYEELAAATGGFSSTNLLGQGGFGYVYKGVLAGSGKEVAVKQLKAGSGQGEREFQAEVEIISRVHHRHLVSLVGYCIAGSSQRLLVYEFVPNNTLEHHLHGKGVPVMAWPARLAIALGSAKGLAYLHEDCHPRIIHRDIKAANILLDENFEAKVADFGLAKLTTDTNTHVSTRVMGTFGYLAPEYASSGKLTDKSDVFSFGVMLLELITGRRPVDPTNYMEDSLVDWARPLLARALSEDNFDELLDPRLENRVDRLELERMCSSAAAAVRHSAKRRPKMKQIVRALEGDASLDDLNEGVKPGQSMMFSSGSEYDGANYAANISKFRKVAFESSEFSNDYSGTSEYGADSGEAATQRQQHR

SEQ ID NO: 2266 - protein, 402 aa, Zea mays
  VARIANT 35: note = Ancestral polymorphism is V, Derived polymorphism is I
  VARIANT 73: note = Ancestral polymorphism is R, Derived polymorphism is Q
  VARIANT 81: note = Ancestral polymorphism is D, Derived polymorphism is Y
  VARIANT 86: note = Ancestral polymorphism is P, Derived polymorphism is L
  VARIANT 135..402: note = Derived polymorphism lacks residues 135 to 402
  VARIANT 138: note = Ancestral polymorphism is F, Derived polymorphism is S
  VARIANT 141..402: note = Derived polymorphism lacks residues 141 to 402
  VARIANT 169..402: note = Derived polymorphism lacks residues 169 to 402
  VARIANT 246: note = Ancestral polymorphism is P, Derived polymorphism is L
  VARIANT 274..402: note = Derived polymorphism lacks residues 274 to 402
  VARIANT 300..402: note = Derived polymorphism lacks residues 300 to 402
  VARIANT 344..402: note = Derived polymorphism lacks residues 344 to 402
  VARIANT 346..402: note = Derived polymorphism lacks residues 346 to 402
  VARIANT 363..402: note = Derived polymorphism lacks residues 363 to 402
MAAVCQAWLTAVARAMALKFQLPSLLLLPADVTGVYCYLSGCRKHNMLPGPCYFGSYDGGWFFLAYGQTCGHRLLNIRTGDSRALPDVLFGLAAHKIHRMVVLATTLSFPPEDLRLRCIVAGIVTYQPDIDASRRRHFAFWRPGAKVVVCDVLPAVPVGSGWEQEDVVYYRDSFHFLTQGGHILMCGPIYGPYGDGGILVVLSALSCFQEGRCSCSDEQFVRARYLVVSRGELLMVVRLAAHHHVPTSSFKVFRMIIIEPDDNGEDADEYTRTWIELGELNMLLLKNVISLNPNAEDVSQQRLLLLVAERLVPTFLDRFGPKSPEIWMFVFYASMREWRCVRMQRQFVSWHVIVWFVVCGISWRVNHFDSKVKDEGYVNTREQNITDAIDLFLHLTTGIASA

SEQ ID NO: 2267 - protein, 402 aa, Zea mays
  VARIANT 15: note = Ancestral polymorphism is P, Derived polymorphism is L
MDANGCGENDDARAPLLAGPGRRRNSVASMRGEFVSRLPKKVLDAVDPERPSHVDFSRSKGLLEGEREYYEKQFATLRSFEEVDSLEESNEINEDEELAEQIQSEFAMKISNYANIVLLALKVYATIKSGSIAIAASTLDSLLDLMAGGILWFTHLSMKSINVYKYPIGKLRVQPVGIIIFAAVMATLGFQVFIQAVEKLVVNEAPDKLNQVQLLWLYSIMIFATIVKLGLWLYCRTSGNKIVRAYAKDHYFDVVTNVVGLAAAVLGDRFYWWIDPIGAIVLAVYTISNWSGTVWENAVSLVGESAPPEMLQKLTYLAIRHHPQIKRVDTVRAYTFGVLYFVEVDIELPEDLPLKEAHAIGESLQIKIEELPEVERAFVHLDFECDHKPEHSILNKLPSSQP

SEQ ID NO: 2268 - protein, 335 aa, Zea mays
  VARIANT 1: note = Ancestral polymorphism is M, Derived polymorphism is T
  VARIANT 22: note = Ancestral polymorphism is A, Derived polymorphism is V
MAFPTAMAAVAVALCAAFALAALGGAEAQQLSPAYYDDSCPHVYDTVRRVIQEARASDPRILASLLRLHFHDCFVNGCDASLLLDETPTMRSEKEANPNKGSARGFPVVDDIKAALENACPGVVSCADVLALAAEVSVELAGGPYWRVMLGRTDGMAANFDGAQNLPNPTEPLNDLKQKFADLGLDDTDFVALQGAHTIGRAQCRFFQDRLYNFSDTERSDPTLDRSYLAALRESCPAAVSDNTCLNNLDPATPDTFDNRYYANILSNRGLLRSDQAMLSAPEEGAVSTAPIVGRFANSQVEFFQSFATAMVKMGNIAPMTGGLREVRRNCRVVN

SEQ ID NO: 2269 - protein, 336 aa, Zea mays
  VARIANT 299..336: note = Derived polymorphism lacks residues 299 to 336
  VARIANT 200: note = Ancestral polymorphism is H, Derived polymorphism is P
  VARIANT 31: note = Ancestral polymorphism is E, Derived polymorphism is K
  VARIANT 18: note = Ancestral polymorphism is S, Derived polymorphism is F
MASRGSMTCSLQLAVLVSAAIALGFGVRAGEAQLSSEYYGQTCPVVHRVARRVLKKAHEADVRIYASLTRLHFHDCFVQGCDGSILLDNSSSIVSEKFATPNNNSARGYPVVDAVKAALEEACPGVVSCADILAIAAKISVELSGGPRWRVPLGRRDGTTANITAANNLPSPFDNLTTLQQKFGAVGLDDTDLVALSGAHTFGRVQCQFVTARLYNFSGTNRPDPTLDRGYRAFLSLRCPRAGNASALNDLDPTTPDTFDNNYYTNIEARRGTLQSDQELLSTPGAPTAPIVGRFAASQKEFFRSFARSMVNMGNIQVLTGSQGEIRKNCRMVNGS

SEQ ID NO: 2270 - protein, 334 aa, Zea mays
  VARIANT 29: note = Ancestral polymorphism is V, Derived polymorphism is A
MERKSFSCRDTASCLALLAVALCLGAATVARGQLTDDFYDDCCPQAENIVRARVSAAMKAEPRMGASLLRLHFHDCFVNGCDGSILLDGNNTEKLAGPNLNSARGFDVVDAIKADLEKACPGVVSCADILAIAAKYGVLLSGGPDYDVLLGRRDGLVANQSGANSNLPSPFDPISTITKKFSDVGLNTTDVVVLSGGHTIGRARCVLFSGRLANFSATSSVDPTLNASLASSLQALCRGGDGNQTAALDDGSADAFDNHYYQNLLGQRGLLSSDQGLFSSTDGSAATTRALVQAYSASSERFFCDFGRSMLKMGNILPLTGSAGQIRSNCRAIN

SEQ ID NO: 2271 - protein, 555 aa, Zea mays
  VARIANT 452..555: note = Derived polymorphism lacks residues 452 to 555
  VARIANT 438: note = Ancestral polymorphism is G, Derived polymorphism is S
  VARIANT 386..555: note = Derived polymorphism lacks residues 386 to 555
  VARIANT 348..555: note = Derived polymorphism lacks residues 348 to 555
  VARIANT 344..555: note = Derived polymorphism lacks residues 344 to 555
  VARIANT 299..555: note = Derived polymorphism lacks residues 299 to 555
  VARIANT 268..555: note = Derived polymorphism lacks residues 268 to 555
  VARIANT 264..555: note = Derived polymorphism lacks residues 264 to 555
  VARIANT 214..555: note = Derived polymorphism lacks residues 214 to 555
MVDSLLPSIVRTGTDLVDGMEDAAKVFDEIHQQRHRGGEMLTNCARRGVRLRSDQRLALSSHPRAFPSVPWSLRGPRPGLTFVCIATMSSVEYQPSTIAVASILVARGRETPAGNLDALKAILGSSFPQLDIGHVYSCYSAIIREDDKSPTQSTSTSTGVASSGVSVVAHAGGSGSPSLGASVSVGANNAAGTAPPATTDNRNKRRQLRSPQRQGGPKCLEFERGEIGFFGLVRCRRVIWVPPSAYWGRRGCCFAEQPSGHRHQDWSWCAPAAGAHSQDQELHHLVRIFDKGHCDLLEQQDYDLHQTHSAIRSDWHRDTEQCNSYCGRDEFILENDVFKNSAPQVSGQAATVRVTADRCAFYGCRFLGWPETLHLHGGKQLLKNCYVEGSCDFIFGDSAALLEHCHIHYKSTGYITAHGQKSSSEPTGFVFFKCIITGNEEATYMYLGRPWEPFGRVVFAKTFMELCIEPVGWHNWDKPENEQTACFYEYRSQPCAPVQDQAYQDGYLGAKNCSVMKLCRSFYRLSLIQISRIHGWSTGWELRSQFQRLRLSDSM

SEQ ID NO: 2272 - protein, 292 aa, Zea mays
  VARIANT 208..292: note = Derived polymorphism lacks residues 208 to 292
  VARIANT 241: note = Ancestral polymorphism is N, Derived polymorphism is Y
MPSRPQSILGLSAVPFPRRNPSSSPRRRAVRCPSPRLRAPSLLPSHLMFFSRNAFRDLDPIDSPASMASSKKVATRDEWERKLRDVKIRKEDMNRLVMNFLVTEGFVDAADKFRIESGTQPEIDLAIIADRMEVKRAVQSGNVQEAIEKINDLNPTILDMNPQLYFHLQQQKLIELIREGKTNEALEFAQEELAPRGEENQTFLEEIEKTVALLIFKGVKNCPYRELLDVSQRLKTASEVNAAILASQSHGKDSKLPSLLKMLKWTQNHLDERAAYPAINDFTTAVVEDPSI

SEQ ID NO: 2273 - protein, 592 aa, Zea mays
  VARIANT 457..592: note = Derived polymorphism lacks residues 457 to 592
MDEAAGLLLQEEGGGGDQEALLLPLPQDVGLYTGDGSVDVKGRPALKGTTGNWKACFFILGNECCERLAYYGIAKNLVTYLKVKLHLGNLEAARHVTTWQGTCYLTPLVGGILADSRWGKYWTIAVFSSVYFIGLAILTLSASVPALQPPSCLRTVCPEASLLQYGIFFGGLYMIALGTGGIKPCVSSFGADQFDDTDQAERAKKGSFFNWFYFCINIGSFISGTMIVWIQDNTGWGIGFAIPTIFMALAISFFFSASNKYRFQKPGGSPLTRVCQVVIAAFRKWHIEVPHDTSLLYEVDGQTSAIEGSRKLEHTNELEFLDRAAVISSADLKSESFTDPWKLCTVTQVEELKILIRMFPIWATTIIFSAVYAQNSSMFIEQGMVLDKRIGSFNIPPASLSTFDVISVIMWVPLYDRILVPLARKFTGREKGFSELQRMGIGLVLSILAMVSAALVELKRLEIARSEGLIHEKAAVPMSILWQIPQYFLVGAAEVFTCIGQVEFFYDQAPDAMRSLCSALALITVSLGNYISSIILTLVSYITTQGGDPGWIPDNLNEGHLDRFFWLIAGISFVNLIVYMGCAVRYRYKKAS

SEQ ID NO: 2274 - protein, 173 aa, Zea mays
  VARIANT 3: note = Ancestral polymorphism is F, Derived polymorphism is S
  VARIANT 108: note = Ancestral polymorphism is M, Derived polymorphism is T
MAFSASVVQVSAVVVLAVLFATATTEAGANNAAVAMNTAALPTAASSLQYTCYLCHKRKSLMMKRCPIAKDGCHVACVTLPTPSTPSPPPPVTAPGGSGRDADDCYVMKVYPDGSWVVVDVVSCRQAAPACYLTCNDDDEPGRDGAAGTTPVAPRGALPSLLADFERCGNHAI

SEQ ID NO: 2275 - protein, 588 aa, Zea mays
  VARIANT 171: note = Ancestral polymorphism is L, Derived polymorphism is R
  VARIANT 194: note = Ancestral polymorphism is A, Derived polymorphism is E
MRNSNFGFPRVPPTSSAAAAAAEPSSKRRRIGETTDPPSEMREEALERLRGVVRDSAGKHLYTSAIFLADKVAAATGDPGDVYMLAQALFLGRQFRHALHLLNNSRLLRDLRFRFLAAKCLEELKEWHQCLLMLGDAKVDEHGNVLDHDDDSDIYFDKDAEDHEINIKSALCFLRGKAYEALDNRDLARQWYKAAVKADPLCYEVGRTVTQWQYYSFYEKKNMQLLNVIHLYMFQALERLVDNYMLTCEEGNIKHEKEYLVEAKFKKLEEEACNILSSSSGETMKNNIDVLVCKAEYYHQSGEYQKCFKLTSSLLERDPFHLKCTLVHLATAMELGHSNDLYLLACNLVKDYPEKALSWFAVGCYYYCIKKYDQARRYFGKATGLDGTFPPAWIGTGIAYAAQEEGDQAMAAFRTAARLFPGCHLPTLYMGMQYVRMHNFKLAEQFFTQAKSICPSDPLIYNELGVVAYNMKEYRKAVQLFELTLDHTSSSLNEMWEPTLVNLGHALRKLKEYQKAVSCYEKALTFPTKSLSAFAGLAYSYHLMDNFEAAINYYHKALWLKPDDQFCTEMLTYALESICQSTARRRPS

SEQ ID NO: 2276 - protein, 314 aa, Zea mays
  VARIANT 232: note = Ancestral polymorphism is K, Derived polymorphism is M
MSATGRAPCGLPRIGLGTAVQGPRPDPVRAAVLRAIQLGYRHFDTAAHYATEAPIGEAAAEAVRTGLVASREDLFVTSKVWCADAHRDRVLPALRRTLSNLQMEYVDLYMVHWPVTMKAGRFTAPFTPEDFEPFDMRAVWEAMEECHRLGLAKAIGVCNFSCKKLETLLSFATIPPVVNQVEINPVWQQRKLREFCRAKGIQLCAYSPLGAKGTHWGSDSVMDSGVLHEIAKSKGKTVAQVCLRWVYEQGDCLIVKSFDEGRMKENLDIVDWELSEEERQRISKIPQRKINQGRRYVSEHGPYKSFEELWDGEI

SEQ ID NO: 2277 - protein, 611 aa, Zea mays
  VARIANT 8: note = Ancestral polymorphism is G, Derived polymorphism is R
MGEMVVAGYGMDKALRASVSFDTPCGALLRELEQIWTEIGEREQDKDRMFLELETECMRVYRRKVDSANAERAQLRQSLMAKEAELKALVASIGENGPRFTVDEKHTSLKDQLAAVAPLLEDLRVKKQDRVKQISNVQCQIEKIKAQISDHNYQDSDGSIKQLNDDHDLSTRRISDLQMQLRNLQKEKSDRLQKVFIYVDEVHSLCAVLGMDFPKTVKEVHPSLHGSNSENSTNISDSTLEGLTQTILKLKAEKKTRVLKLQETVEKLHKLWNLMESTEKERIHFSEVAAILGSTEEEINSPGILSLETIQKTEEEVEKLTVQKTSRMKELVLKKRLELEGICRNAHMEPDMSTAPEKITALIDSGLVDPCELLSSIEVQITKANEESLTRKDIMERVDKWLSACDEETWLEEYNQDDNRYSAGRGAHLNLKRAEKARITVQKIPTMIDSLIAKTFAWEDERNVPFLYDGIRLVAILEEQKLRRAQREEEKRRSRDQRKLHSLLLKEKELIFGSKPSPRKTSSFNRRTSNHHPNANGAGFMTPVPRRVSAGSATPELLTPRSYSGRYNNYFKENRRLTAAPLNFSVGSKEDSMSSFASISGSEPDSPLFLH

SEQ ID NO: 2278 - protein, 266 aa, Zea mays
  VARIANT 182: note = Ancestral polymorphism is L, Derived polymorphism is P
  VARIANT 55: note = Ancestral polymorphism is P, Derived polymorphism is L
  VARIANT 25: note = Ancestral polymorphism is L, Derived polymorphism is I
  VARIANT 22: note = Ancestral polymorphism is R, Derived polymorphism is S
  VARIANT 8: note = Ancestral polymorphism is N, Derived polymorphism is S
MEVEDDDNTAAPSAWPSSSRRRHLLQFLLHASMRLDLRPIVKYAALTFFAGRFLPALPRKMGFCGARSGRIVRSWLLEPLRDSNLELFALVAVWIASKIHDQKPMSVKSLKALGDRIIADQHFMCRDFASAELVFLEVVEHNIGFSSICFIYLEELLMHFREISKIGELLDLDVCMEILDILYETEDTSLLFNCPCSLAASTLVAAYAISVPKQTWEFPILPWVRFATSYDEEEIMKIVLTILLHVLKLDGIEEKGKGRFDARCLS

SEQ ID NO: 2279 - protein, 335 aa, Zea mays
  VARIANT 2: note = Ancestral polymorphism is A, Derived polymorphism is E
  VARIANT 214: note = Ancestral polymorphism is V, Derived polymorphism is A
  VARIANT 295..335: note = Derived polymorphism lacks residues 295 to 335
MANRSVAMGLALAFVAMTALCCAPGAAELPRLDHPARSDGSLKLLVVGDWGRKGTHNQSRVADQMGRVGEKLDIDFVISTGDNFYKNGLKGVRDQAFEESFVDIYTAQSLQKPCYPFSVLGNHDYRGNALAQLSPVLRKIDDRFICMRSFIVNAELVDFFFVDTTPFQLEYWTHPGKHRYDWRGVAPRGNYLANLLKDLDVAMKKSTARWKIVVGHHTMRSVSEHRDTEELLELLLPVLKVTFQKLSQTQSVSTFRKVHNNNTVSVGKKFTPFRTMASTSTSMDTITVWSTLAAETVHSSISRAEAVPRHGEESSIQTRTSSDSSTTGKGSCPSS

SEQ ID NO: 2280 - protein, 239 aa, Zea mays
  VARIANT 17: note = Ancestral polymorphism is S, Derived polymorphism is F
  VARIANT 23: note = Ancestral polymorphism is R, Derived polymorphism is L
  VARIANT 47: note = Ancestral polymorphism is A, Derived polymorphism is G
  VARIANT 66: note = Ancestral polymorphism is A, Derived polymorphism is V
  VARIANT 71: note = Ancestral polymorphism is R, Derived polymorphism is C
  VARIANT 72: note = Ancestral polymorphism is R, Derived polymorphism is W
  VARIANT 73: note = Ancestral polymorphism is V, Derived polymorphism is I
  VARIANT 86: note = Ancestral polymorphism is A, Derived polymorphism is S
  VARIANT 90: note = Ancestral polymorphism is A, Derived polymorphism is T
  VARIANT 117: note = Ancestral polymorphism is W, Derived polymorphism is C
  VARIANT 120: note = Ancestral polymorphism is E, Derived polymorphism is G
  VARIANT 124: note = Ancestral polymorphism is A, Derived polymorphism is T
  VARIANT 146: note = Ancestral polymorphism is R, Derived polymorphism is W
  VARIANT 158: note = Ancestral polymorphism is R, Derived polymorphism is W
  VARIANT 179..239: note = Derived polymorphism lacks residues 179 to 239
MCRATAIEGGFLRPPPSRRLDIRAFYLRLSSCSATTPAELTLAYHPAIGGAALGLNGRALPPAAPAKVTLRRVAADAYASADRVAAAEGARFEVLAAAAGEEVAAEGVFSARREGGWRVECRRAPASPEVCVAEVVVLAEGGVLMRDRARAAGRGRMRCGATRLEGIPEEDATTGLGGWCRCECDDDGWEVVGDAEEEEEQEVEMETVRWAMEVGVWAVCLGVGLLATARRFRRKRAFW

SEQ ID NO: 2281 - protein, 349 aa, Zea mays
  VARIANT 24: note = Ancestral polymorphism is A, Derived polymorphism is D
  VARIANT 167: note = Ancestral polymorphism is F, Derived polymorphism is Y
MAQGSRSAAVPAAASFFALLAVAAPLLLCCAPAAAELARLEHPPKDGGSLSLLVVGDWGRKGTFNQSRVAHQMGRVGEQLSIDFVISTGDNFYENGLTGTDDEAFEQSFTDIYTAKSLQKPWYLVLGNHDYRGDALAQLSPVLRKIDSRFICIKSFVVNAEIVEFFFVDTTPFQLKYWTHPKDDHYDWRGVAPRENYINNLLKDLDGAMKTSTAAWKVAVGHHTMRSVSDHGDTKELLQLLLPVLQANGVDFYINGHDHCLEHISSRDSPIQYFTSGGGSKAWRGVQNPTEDDLKFFYDGQGFMSLQLDRSQAKFTFYDVDGKALYSYTRSSLMETGHHLQASGYVNEE

SEQ ID NO: 2282 - protein, 170 aa, Zea mays
  VARIANT 29: note = Ancestral polymorphism is V, Derived polymorphism is L
  VARIANT 26: note = Ancestral polymorphism is I, Derived polymorphism is S
  VARIANT 19: note = Ancestral polymorphism is T, Derived polymorphism is M
  VARIANT 1: note = Ancestral polymorphism is M, Derived polymorphism is K
MKAGRKNLRRACDEGAAVTLAEGESIMQVLTLRGSNVIEVMDGVGVRSLALFPAKFQKSFWIKNGSFVVVDASGRDQALESGSKIACVVSRVLFHEQVRALQKSGNWPAIFNSAPTPNEASEAGAEAQAAQVDEEPDSDEEDDDLPPLEANTNRNRPYELYSDSDSGSDA

SEQ ID NO: 2283 - protein, 653 aa, Zea mays
  VARIANT 62..653: note = Derived polymorphism lacks residues 62 to 653
  VARIANT 70..653: note = Derived polymorphism lacks residues 70 to 653
  VARIANT 84..653: note = Derived polymorphism lacks residues 84 to 653
  VARIANT 96..653: note = Derived polymorphism lacks residues 96 to 653
  VARIANT 100..653: note = Derived polymorphism lacks residues 100 to 653
MASAAAVIASPAPGAAAAEPAAWLVDERDGFITWLRGEFAAANAIVDHLIFHLRSISEPGEYDHVFSLVQQRRHHWPHVIHMQQFFPVSDIAFALQQASWRRHAPPAQALGAGASPAALPPPPPRRASFSQSHHSHQHHRHGAHYRPDPARGAATAATGSEKDGREVHNNKEGRGLKEAGNVVDTKSLRLDSPITDEGEEKSKLQAVSEESSKMVATPVEYSTNEIIDGSMVNTVEGLKVYEGLLNVTEANKILSLVNETRASYRRGGLEARQKVIIAKRPMKGHGREIVQLGVPIIDGPPDDENLRETRVEAIPGLLNDLFDRLSQQEIIPFKPDYCVIDIFNEGDYSHPHQSPSWYGRPLCTLCLTDCDMVFGRYISGEKGDHRGPLKLSLATGSLLLMQGRSIDCAKRAIPATRKQRVILNFGKSVARKHIPAESAWSTPLTPPMPWGQSSRPVNGSRHPQSPKHYGYAPISGVLPAPPVGAHHVPPSDGMQPLFVAPAPISAAAIPFTPTVPLQNTSAAWIQEVTPRPAPPRFPGPGTGVFLPPGSGHPLPHQMMPASHGHGEPNSPQGSSAYLHSKVNGKETSNGNLSPKNSPRKTSCTAEEKPECNGSLNGGGGSADEKSTVGMEQQNGVQKNVGSSKVQPHGHATE

SEQ ID NO: 2284 - protein, 606 aa, Zea mays
  VARIANT 425..606: note = Derived polymorphism lacks residues 425 to 606
  VARIANT 329..606: note = Derived polymorphism lacks residues 329 to 606
MGKGDVATRSKSQKSPAIQNEQSTPANPPTAYPDWSQFQAYYNAAGTAPVTPPFFHPSVAPSHQGHPYMWGPQMMSPYGTPPPYAAMYAQGTPYQQAPMPPGSHPYSPYPMQLPNGTVQTPTSGAGGTATDKSNKNKRKASLKRSKGSLGSLDVVAVKNNKSPAKPSTSSSNEGSSQSESGSGSSSEGSSTNSKSGSRVKDNSEQGQGNDARSKCTQSSVVEPTQPSSGSVVLNPMMPFWPVPPPMAGPATTLNMGVDYWGTPASVPMHGKVIAAPTSAPSSNSRDIVLSDPTIQDGRELKRQKRKQSNRESARRSRLRKQVFCISANCLFRSDHLVTDGSYGMGVAVWGLSHQFGSSIDQSPLMLSQFRIGLDKICKKAEWEEVANRADLLKQENSSLKEELKQLQEKCDGLTSENTSLHRHIQQPTSMAGAWHKRPCRLRCGLLQRVAEQSSSGPFSGGAGHFGRGVFGNGCAQWAELVMGAVLGGTRLTLEGDEVSARLGAVLGHGQRFSTMLGVSKRGKMGNGWRYRMGRGTPPIIGTEDKGEEGLMVGPNLSLSSVVAKTTETSIKGVRGGQICLVYTIEWPKEKLKALEDEKSNGNWYKD

SEQ ID NO: 2285 - protein, 145 aa, Zea mays
  VARIANT 20: note = Ancestral polymorphism is A, Derived polymorphism is G
MALQWMILACVVAVEAAVAALVTLPVPRAVRGQIVALTSLFLQPLSSVIPFAAFQILDLYWKKEHRLMCTSEICTAEERIRFEKSVTFPDLSSMFLDFVLFMFKAQRNVILCVSACLLYWCIYRIVKLNKDIKALEETEKRLKEE

SEQ ID NO: 2286 - protein, 115 aa, Zea mays
  VARIANT 7: note = Ancestral polymorphism is I, Derived polymorphism is T
MSRSLGIPVKLLHEAAGHVVTVELKTGEVYRGSLVECEDNWNCQLENITFTAKDGKVSQLEHVFIRGSRVRFMIIPDMLKNAPMFKRLEARIRGKGSAIGVGRGRAVAMRARKMQ

SEQ ID NO: 2287 - protein, 90 aa, Zea mays
  VARIANT 60: note = Ancestral polymorphism is A, Derived polymorphism is T
  VARIANT 35: note = Ancestral polymorphism is S, Derived polymorphism is F
MFDGFNLCFRRQSATLGCAMTFSIYLPPSPASNLSVLYWLSGLTCTDENFIIKSSAQRAAAAHDIALVAPDTSPRMSKLSHLLPLTVQGF

SEQ ID NO: 2288 - protein, 184 aa, Zea mays
  VARIANT 35: note = Ancestral polymorphism is S, Derived polymorphism is N
MYVNSPRGSVTAGMAIFVNIKISNLERPLDNLCLSRMALVKIHVTCALVYGPSPTGRIHQGVCSTWMKERLALKQSGAELGTSILFFGCRNHNMDYIYEDELQTFLEEGALSELIVAFSREGPTKEYVQHKMVEKAIEIWNIISNGGYLYVCGDAKGMATYVQKMLHTIVQEQVDDNRNSSSNT

SEQ ID NO: 2289 - protein, 810 aa, Zea mays
  VARIANT 171..810: note = Derived polymorphism lacks residues 171 to 810
MEGDEASAPPPPPWMQNKSAVAIKASSGPLSAAAPRLSACSRALPSSRDFHFYNNFPAFKSPVGAAATKVDASLGVLGGASILPTRQQLFPMGGDLDDAHDWLVALNNDLLERFGASTDEFKALRQKEETSWRRAAPQAGDGYRVYMCTPMSYTGSAPEPSDPNRKPAKKQTRQWAAWTHQEEEIFFNALRQVGKNFDKITHRVQSKNKDQVRHYYYRLVRRMKKLLGPRFSLDAKNSKDTIAAMLRWWSLLEKFSCTASKLHLKPRRFKTFVEALGKQLLKDRNKSRRKRSRVDMCLPSPSPIISKAPGNENPPVKFLSVDAQNGSRVASPKGSIFKQVAEPISNKPGTTKGELSATRTVKQKRKAGGAVASAAYKKWERAAMAGVSLVADAAEELERNTINPGIFCNVDARTLTSLSERLSSIDGISTNHMKEADSQAPVKLKLQLFPINEATRKALEKDDHNPHLELTLSSRKKISSVLEHLNRKWGNSNIASGELILFPYCANQEDLATYQRYGWVSLVELGAGVSEISLTHFEDCMIPEVIQVKSPSGDKACVQSDALPSPTPSPPFSDDQGMNCVAISAVEWADTLTNISFGHLLTEASKGTHLDCGGTSVKNPLFFENPCSYDSFDAAVALHASRYQASEQSAHAPHSTIWGAEETCDEFIFNLSASRKQEGSNTLSSSPDTNNGVHPSNSEGFKGFLEDLAGEADADNHYNNDDAKDEEFYAKSPPRNDETNELKDQSLADIYWPDSLGPLDLDIPSVRYEADDILIGDSQNSWNRLMANSLDAFRNLSFFSDKNDSIPSIM

SEQ ID NO: 2290 - protein, 182 aa, Zea mays
  VARIANT 4..182: note = Derived polymorphism lacks residues 4 to 182
MGPQARCREADTDRRETVPPQISHILDREKAFSRFPSTRKIATRRSFNTLDTWHDEFLNQAGPSDPQRFPFILVGNKIDLDDGSKRMVSFPECTSFLIYIDSKYPTVSLPFPQVPEKKARKWCASKGDIPYFETSAKEDHNVDTAFLCIARLALEHEHDQDIYFKTVVEQVSDTEQTSGCAC

SEQ ID NO: 2291 - protein, 156 aa, Zea mays
  VARIANT 87: note = Ancestral polymorphism is A, Derived polymorphism is S
  VARIANT 154: note = Ancestral polymorphism is T, Derived polymorphism is I
MESAVNPKAYPLADAQLTIGIIDIIQQAANYKQLKKGANEATKTLNRGISEFVVMAADTEPLEILLHLPLLAEDKNVPYVFVPSKQALGRACGVTRPVIACSVTSNEGSQLKQQIQGLKMHLHSGALVYVEILTIIVTVDYYEFENWIDWMVAISM

SEQ ID NO: 2292 - protein, 695 aa, Zea mays
  VARIANT 350: note = Ancestral polymorphism is L, Derived polymorphism is P
  VARIANT 288: note = Ancestral polymorphism is S, Derived polymorphism is L
  VARIANT 70..695: note = Derived polymorphism lacks residues 70 to 695
MAADHGEGVGRCILVGLHMDAVGRDLLQWALHQEVRRGDRIVAVHIYRKSDKTNTLKLIRTLDDYLAEYEALCNQKQVVLVGRVTPGSSIQKELVKEAKLCAAMVVVLGANKKYSFGGSSCLAKYCAKKLPPTTTVVAIQDGKAVFVREAPRPPLGAEPKPVLRTVLHPSVGLEPKVIIPNPNRRARSMSMDLDAPCCGHGAADAPASRCLDDATKGDGGVAPEQRLGWPLLRRAHAAAAASAAPVQTPGGKNHEPRKQSVVHWVMSLPRRSAPSESAEPHAGAGLESELKAMLGGSGARCRWFRYEELYDSTNHFSAGASSLFLIVSLAPFRFQLTRFLAVTDRPRSWLVAENLIGNGGNSRVYRGSLACGRQVAIKLCKASAEASKDFLREVDIITKLQHHRIVPLIGVCVEGRNLISVYRYLPRGSLEDNLHGERSKPALSWENRYKAALGIAEALSYLHSGSPRPVIHRDVKSSNILLAEEFEPQLSDFGLAIWAPTNPTSVTHSDVVGTFGYLAPEYFMYGKVTDRVDVYALGVVLLELLSGRKSISSDGSSPKGQESLVMWATPVLSSGNICDLLDPRLDVKHDEVEVRRMASAASLCLRRSARLRPPISQILSILRGESAASIADQGATEPDCVDDEAYPAANVRSHLGLALLDVEDSESISSTEHSSGLSPLEEYLRERWSRSSSFD

SEQ ID NO: 2293 - protein, 523 aa, Zea mays
  VARIANT 391..523: note = Derived polymorphism lacks residues 391 to 523
  VARIANT 375..523: note = Derived polymorphism lacks residues 375 to 523
MPPHGGMLAYAALALAALRLLLSYKSALYALRRLWRCADEWAQAYQYHEVPRFAGAQCGCDGAENPLFRKVAAYVAALPSLEDADAACVVSSASRTNGGLSLQLGPGHTARDTYLGARLAWTSAGGERLVLRVRRHDRSRVLRPYLQHVESVAEEMEQRRRELRLFANTAVDATTGAPRWASAPFTHPATLDAVAMDPDLKARVRADLESFLKGRAYYHRLGRVWRRSYLLYGPPGTGKSTFAAAMARFLGYDVYDVDLSRADAAGDDLRALLLHTTPRSLVLVEDLDRYLQGGGGDAEARAARVLSFMDGIASCCGEERVMVFTMRGGKDAVDAAVVRPGRLDVHIQFTLCDFEAFKALASNYLGLKDHKLYPQVEEGFHAAGARLSPAELGEIMLANRASPSRALRSVITKLQRVASGGAAPPRNPAHRRNTSWSGAWTGQQWEDQAQPARASAVSVEVDETAAGAPATCGGVFGKEAPMREFKKLYGLIKVRSRREGAGAVPLEGDAHGPPTPGNHDRER

SEQ ID NO: 2294 - protein, 93 aa, Zea mays
  VARIANT 68: note = Ancestral polymorphism is A, Derived polymorphism is T
  VARIANT 62: note = Ancestral polymorphism is S, Derived polymorphism is L
  VARIANT 28..93: note = Derived polymorphism lacks residues 28 to 93
  VARIANT 26..93: note = Derived polymorphism lacks residues 26 to 93
  VARIANT 21: note = Ancestral polymorphism is A, Derived polymorphism is S
  VARIANT 19: note = Ancestral polymorphism is R, Derived polymorphism is W
  VARIANT 10: note = Ancestral polymorphism is D, Derived polymorphism is N
  VARIANT 4: note = Ancestral polymorphism is S, Derived polymorphism is I
MDKSMLGDLDGLPEEDKMRMAAMIDQLQIRDSLRMYNSLVERCFTDCVDTFRRKNLDKQEESCVRRCAEKFLKHSMRVGMRFAELNQGVATPD

SEQ ID NO: 2295 - protein, 210 aa, Zea mays
  VARIANT 43: note = Ancestral polymorphism is A, Derived polymorphism is T
  VARIANT 6: note = Ancestral polymorphism is A, Derived polymorphism is G
MEVTIAEKKPRAADDGGGLVERLPEALLVEVLARVDVDGACSAAASCRSLYSAANVVLLALTSIDLSGFDSVARPPQAFAPSNAILSRILAGNGAIHSLTVNCSLLDDSAASVIARGSLRDLLLLKCSFSMSFFVALALRPNTIVLSRLSGSGKTTIYYQKEKVKLVHVIDVPGHARLKPKLDEVLPKVATVVFVVDAQDFLSSMQAAAE

SEQ ID NO: 2296 - protein, 143 aa, Zea mays
  VARIANT 49: note = Ancestral polymorphism is K, Derived polymorphism is R
MAMAYKMATEGMNVKEECQRWFMEMKWKKVHRFVVYKIDERSRAVLVDKVGGPGEGYEELVAALPGDDCRYAVFDFDFVTVDNCQKSKIFFIAWSPAASRIRAKILYATSKQGLRRLLDGVHYEVQATDPSEMGFDVIRGRAQ

SEQ ID NO: 2297 - protein, 198 aa, Zea mays
  VARIANT 177: note = Ancestral polymorphism is C, Derived polymorphism is Y
  VARIANT 167: note = Ancestral polymorphism is G, Derived polymorphism is S
  VARIANT 166: note = Ancestral polymorphism is T, Derived polymorphism is N
  VARIANT 103: note = Ancestral polymorphism is R, Derived polymorphism is S
  VARIANT 95: note = Ancestral polymorphism is Y, Derived polymorphism is H
  VARIANT 73: note = Ancestral polymorphism is A, Derived polymorphism is V
  VARIANT 69: note = Ancestral polymorphism is G, Derived polymorphism is V
  VARIANT 35: note = Ancestral polymorphism is P, Derived polymorphism is L
  VARIANT 11: note = Ancestral polymorphism is G, Derived polymorphism is R
  VARIANT 8: note = Ancestral polymorphism is R, Derived polymorphism is W
MPLADRIRDLGVGVAFSKPTLLPSPSGRCDSTSCPVTFFQHGTIPCVCHDGRFIMETPYKVAKAPDGNGGVYAALKSKRLLDDMAAKGVNYVDCYGVDNVLVRVADPTFLGYFIDRGVSAAAKVVRKAYPQEKVGVFVQRGKGGPLSVVEYSEMDAAMTTEINQTTGRLRYCWSNVCLHMFTLDFLNQVTNSLEKDSM

SEQ ID NO: 2298 - protein, 157 aa, Zea mays
  VARIANT 46: note = Ancestral polymorphism is G, Derived polymorphism is S
  VARIANT 51: note = Ancestral polymorphism is D, Derived polymorphism is G
  VARIANT 56: note = Ancestral polymorphism is E, Derived polymorphism is K
  VARIANT 130..157: note = Derived polymorphism lacks residues 130 to 157
  VARIANT 138..157: note = Derived polymorphism lacks residues 138 to 157
  VARIANT 140: note = Ancestral polymorphism is R, Derived polymorphism is I
MEGGGGAAAAHAGWGRGTNVHAFSVCDDPEYFYDYVQGLIDGLNSGLDSRDIVSIENAKGLGYAMNTAEELKFVKDIAASTGIVLDPVYSGKAVYGLLKDMAGNPAKWKGRKVLFIHTGGLLGLYDKADQLSSLAGSWRRMDLEDSVPRKDGTGKMF

SEQ ID NO: 2299 - protein, 452 aa, Zea mays
  VARIANT 130: note = Ancestral polymorphism is K, Derived polymorphism is E
MVLEATMICIDNSEWMRNGDYAPSRFQAQADAVNLICGAKTQSNPENTVGVMTMAGKGVRVLVTPTSDLGKILACMHGLEVGAEANLAAAIQVAQLALKHRQNKRQQQRIIAFIGSPVKYDKKVLETIGKKLKKNNVALDIVDFGESDDEKPEKLEALIAAVNSSDSSHIVHIPPGENALSDVLLSTPIFTGEEGGSGFAASAAAAAATGASGFEFGVDPNVDPELALALRLSMEEERARQEAIAKKAAEDTSNTEHNNVPSSNSDSVMAEGEPASNAAAGDKEQPKQALAMSMEGGASGSAAVTDSAMAEAGAVDPDLALALQMSVQDANMSSDTDMSKVFEDRTFVSSILNSLPGVDPNDPSVKDLLASLHSQGEVPRTAENFLALCASGYYDSTVFHRNIKGFMGLHLGTKFADEFRESQGSTLCSAGANSRPNANGSRFFITYAKQPF

SEQ ID NO: 2300 - protein, 567 aa, Zea mays
  VARIANT 1: note = Ancestral polymorphism is M, Derived polymorphism is T
MKMHRFALRGLGFLVLWMLHCGSELAAAVPPDGWYDYSAYTDVYLRGVQCRGQPEPALYNGGILKFGSSGGDPDGYRTTETGVFSPAFVVYNLNKTTMYTFSCWVKLEGAYSALITARLAPDNTGARCIATVVARSDCWAFVKGGFVLDWPTQTSVIFFQNADKTPMKITVASGSLQPFTTDQWAMHQQDTIRKRRKRVATIHVADPQGARVVGASVSVQQTAKDFPIGSAIASTILGNQAYQQWFVDRFNAAVFEDELKWYSTEPMSGQLRFDVPDQMLAFVRSHRVMVRGHNIFWENQDATPRWVKNLTADDLRAAVNTRIQSLMTRYRGEFAHWDVNNEMLHYNFYEQRLGPNASAEFFSVAQDADPLATLFMNEYNVIETCDDPFSTVDTYVSKLKDLRSAGAILEGIGLEGHFSKPNIPLMRAILDKLATLGLPIWFTEIDISNKFDAQTQAAYLEQVLREAYSHPAVSGVMLWTALHPSGCYQMCLTDWNLSNLPTGDVVDRLLNEWRTLQAAGQTDAHGAYSFTGYLGEYVLTVSYNNRTTQSTFSLSPGDETRHINVQM

SEQ ID NO: 2301 - protein, 335 aa, Zea mays
  VARIANT 82: note = Ancestral polymorphism is C, Derived polymorphism is Y
  VARIANT 19: note = Ancestral polymorphism is R, Derived polymorphism is G
  VARIANT 16: note = Ancestral polymorphism is T, Derived polymorphism is M
MGTARVRFVVLVLISTFLRVREGRAATFTFVNRCTGTVWPGIQSNAGSSRLDTTGFVLPPGTSRAVPAPSGWSGRVWARTGCGQDGSGKVVCATGDCGSGSLECNGQNAATPATLAEFTLASAGGNDFYDVSLVDGYNLPILVEPAGGAATGASATTCAAAGCTADLNERCPAELRAEGGAGCRSACDAFGRPEYCCSGAYANPNTCRPTAYSQLFKSACPNSYSYAYDDPTSTFTCAGGRDYTITFCPVATPSVKSSSGPGAATTTAAPTGPTPTLPGATPRSAGGGPEGQGVMLGDNSWLASLATGDASSAPALRALPLAPLLLVGLLLLVLL

SEQ ID NO: 2302 - protein, 345 aa, Zea mays
  VARIANT 83: note = Ancestral polymorphism is A, Derived polymorphism is V
  VARIANT 86: note = Ancestral polymorphism is G, Derived polymorphism is D
MPLSAPLLCSSCFQCALLFRDPALTLRAAGARACLAAARAATFTMTNNCGYTVWPGLLSGAGTAPLPTTGFALAHGASAAVDAPAGWSGRVWARTLCAADAATGRFSCATGDCGSGAVQCNGGGAAPPATLAEFTLGGSGGLDFFDVSLVDGYNVPMLIVPAQGAGGGGSSSSSNGSAGGSSKCMATGCLVDLNGACPADLRVMAASASASASGAGGAVACRSACEAFGSPQYCCSGAYGNPNTCRPSTYSQFFKNACPRAYSYAYDDSTSTFTCATGISYAITFCPSTTSGKYSGENPQAAGVQPTNGSMVYLGGEQLATSVAAAARASQLLLAAAALAAVALL

SEQ ID NO: 2303 - protein, 223 aa, Zea mays
  VARIANT 60: note = Ancestral polymorphism is D, Derived polymorphism is N
  VARIANT 58: note = Ancestral polymorphism is G, Derived polymorphism is C
  VARIANT 50..223: note = Derived polymorphism lacks residues 50 to 223
  VARIANT 49: note = Ancestral polymorphism is D, Derived polymorphism is Y
  VARIANT 33: note = Ancestral polymorphism is R, Derived polymorphism is W
MVAEYRQPLVKIEGASLSIAQVDAVATGAGEARVELDESARSRVKASSYWVMNSMMNGTDSYDVTTGFGATSHRRTKEGGALQRELIGFLNVGAFSTGTDDHVLPVEATRAAMLVRINTLLQGYSGIRFEILEGLRRSSSCSTPTSRRACRCAARSPVLSVVFCEVMNGKPEYTDHLTHKLKHHSGQIEAATIMEHILEGSSFMKLAKKLGELDPLMNPKQDQ

SEQ ID NO: 2304 - protein, 526 aa, Zea mays
  VARIANT 44..526: note = Derived polymorphism lacks residues 44 to 526
MCRCGPAEDLAHAHSGSPVAGSTARRARLGSAHHHPDPYKSTLRGVASRTAPHRNAPPIHPARAAARAAMEVFYYVVFGALAAIVAGLELGKSGKDRVATTSAFNSFKNNYVLVYSLMMSGDWLQGPYVYYLYSQYGFDKGDIGRLFIAGFGSSMLFGTIVGSLADKQGRKRACITYCISYILSCITKHSPEYRVLMIGRILGGIATSLLFSAFESWLVAEHNKRGFDPQWLSITFSKAIFLGNGLIAIVSGLFANLLAENLGFGPVAPFDAAACFLAIGMAVIMSSWSENYGDPSDSKDLMAQFKVAAKAIASDEKIALLGAIQSLFEGSMYTFVFLWTPALSPNEEDIPHGFIFATFMLSSMLGSSVASRLLARKLKVEGYMQIVFSISAVTLVLPVVTNILVPTSSVKGGSISIGGSLQLLGFCTFEACVGIFWPSIMKMRSQYIPEEARSTIMNFFRIPLNLFVCVVLYNVNAFPITVMFGMCSIFLFMAAILQRRLMVVSDLHKSSTKAQEMIGEDEPLNP

SEQ ID NO: 2305 - protein, 547 aa, Zea mays
  VARIANT 395: note = Ancestral polymorphism is K, Derived polymorphism is M
MESAPAAVMERERLTAEMAFRGADEARRDGGEPAPSIVIKIRRRLPDFARSIKLKYVRLGIRHGGSPTSVLPMLCVPAVAAAAYSFVRLDVIYYSIDLLTCVAWLGTALLLLTVYYFKRPRPVYLVDFACYKPEEQLKISKSAFLEMTESTGSFNEAALDFQTKITNRSALGDETYLPPGVQARPPRLNMAEARMEAEAVMFGCLDALFESTGIDPRRDVRILIVNCSLFNPTPSLASMIINHYRMREDVKSFNLGGMGCSAGLIAIDLAKDMLQANPGSYAVVLSTENITLNWYFGNDRSMLLSNCIFRMGGAAALLSNRRADAGRAKYRLLHTVRTHKGATDECFNCVYQREDEVGKVGVSLARELMAVAGDALKTNITTLGPLVLPLSEQLKFLKSLMMRRVFRVKGVRPYIPDFRRAFEHFCVHAGGRAVLEEVQRSLSLQDTDMEPSKCSLHRFGNTSSSSLWYELAYAEAKGRVRRGHRVWQIGFGSGFKCNSAVWRALRDVPPLSSSTGAAAGPPGRKGAQSCCNPWVDDVDRYPPKAYV

SEQ ID NO: 2306 - protein, 91 aa, Zea mays
  VARIANT 4: note = Ancestral polymorphism is R, Derived polymorphism is C
  VARIANT 5: note = Ancestral polymorphism is A, Derived polymorphism is V
  VARIANT 9: note = Ancestral polymorphism is P, Derived polymorphism is S
  VARIANT 14: note = Ancestral polymorphism is P, Derived polymorphism is L
  VARIANT 34: note = Ancestral polymorphism is A, Derived polymorphism is T
  VARIANT 38: note = Ancestral polymorphism is P, Derived polymorphism is L
  VARIANT 48: note = Ancestral polymorphism is R, Derived polymorphism is S
MLLRALIFPDDLLPLLPWSVAQSLLCRLALRSPADLLPAFVGAAHAPRSDDAHPVTKWKGACFFENRAWLEFRNGTGRGLGGGVVHVEVRG

SEQ ID NO: 2307 - protein, 202 aa, Zea mays
  VARIANT 30: note = Ancestral polymorphism is A, Derived polymorphism is V
MRMRARAASASASAAVVVLLLLLLLVGVCAGAVYKVGDLDAWGVPPPSKPDVYKRWAKSIHFALGDSIWFLYPPSQDSVLQLAPAAFASCDLSRPVARLADGNSLFNLTAPGRAYYASGAPGHCRRGQKLWVDVPLPNGTYLQPSATDLAALAPTPAADPPAGFASAAAAAPQGGNASPAPRAAAAAGSVVALSFALQILLL

SEQ ID NO: 2308 - protein, 361 aa, Zea mays
  VARIANT 123: note = Ancestral polymorphism is P, Derived polymorphism is L
  VARIANT 116: note = Ancestral polymorphism is W, Derived polymorphism is R
MAPCCLLQIGWCLERPRGFRLAAALCAAVVALALAPALDATSASLLGINYGRVGNNLPPPQSVMPLLEGLGIGRVRMYDADPTVLRAFARTGVELIVGVPDECLAAVADPSGAAQWLKENVAPFLPDTKISVLAVGNEVLTGANSSTLSRTLLPAMQSLHGAVAALGLDKQITVTSAHNLGVLGTSYPPSAGAFRKDLLPYLCPILDYHARTGSPFLVNAYPYFAYSSDPRGVQLDYALLDPGFAGVQDPNSRLHYPNLLVAQVDAVYHAIAAANTAASRVVEVRVSETGWPSAGAANETAATPQNAARYNSNAMRLVAEGKGTPLKPGAPLRAYVFALFNENLKPGVTGGCGRRRPWQEQ

SEQ ID NO: 2309 - protein, 1026 aa, Zea mays
  VARIANT 59..1026: note = Derived polymorphism lacks residues 59 to 1026
  VARIANT 40..1026: note = Derived polymorphism lacks residues 40 to 1026
MDARPRRRRARTAEEAAATLRKAWCRLRLSARDPARVPPWDAVVLTAASPKQAALYNRQLERARALGRFPASTAAIAVPDPDGARIGSGAATLHAVAALVRHLAAQASKEEIGEFLLEGGNGGSGDEATIAAAAGFMAKKHVLLLHAGGDSKRVPWANPMGKAFLPLPYLAGDNPDGPVPLLFDHILAISSSARQAFNNQGGIFIMTGDVLPCFDASNLYLPDDAACIVTVPTTLDVAANHGVVVASKDAGIDQETYSLCLVDDLLQKPTVSELAEGHAILDDGRALLDTGIIAATGKAWQDLVTLAHSSSHSVVKELMTCNKEASYHFQHYDFSFLHFGTSAEVLDHLAGSYSGLVGRRHMCSLPETTACDIAATAIILCTKISSGVSIGEDTLVYDSVLSGRIRIGSQCIIVSVNIREFDGSACFTLPDRHCLWEVPLANSAGRVLVYCGLHDNPKVSIQKDGTFCGKPWINVLEDLRIQDTDLWGSTSQDKCLWTAKLFPVMSLPEMLNVGMWLMGSECDPDGRIASLWQKSQRISLEELHRAIDYRQLCTDSSKHQANLAADIAKACMNYGLLGRNLFQLCEEMLQKDTCLAVYEELLSFFPSHSEQYPGVLPQSREYQVKMDLLRASGDLSTACTVEEKVWASIASETASAIKYGSKEPSSGKMSSNHESLHPRKTVVELPVRVDFVGGWSDTPPWSLERPGCVLNMAISLQGSLPVGAMIETTEDHLGVRIEDDAGRHVYIDNLASISSPFKESDPFRLVKSALIVTGILGHEILSKSGLNIRTWSNVPRGSGLGTSSILSAAVVKGLFQVMEDDESDDSVARAVLVVEQIMGTGGGWQDQIGGLYPGIKCTQSFPGQPLRLQVVPVLTTPQLIQELEERLLIVFTGQVRLAHQVLQKVVTRYLRRDSILISSIKRLAELAKIGREALMNGELDELGGILLEAWRLHQELDPFCSNRPVDELFAFADPYCCGYKLVGAGGGGFALLLAKNPSCARELRRALEESDTFDVKVYDWNVAMPR

SEQ ID NO: 2310 - protein, 245 aa, Zea mays
  VARIANT 203: note = Ancestral polymorphism is L, Derived polymorphism is S
  VARIANT 171: note = Ancestral polymorphism is V, Derived polymorphism is A
  VARIANT 100: note = Ancestral polymorphism is M, Derived polymorphism is T
  VARIANT 46: note = Ancestral polymorphism is G, Derived polymorphism is R
MATAAHQVAATFLSFLSSSTHHLAPSSVSLGTTSVLPVSLRAAGTRGPRLAYRLRGRRVGAAVAQLPTTHPEVVSGEKKIRWSSRAVRSFAMAELEARKMRYPTTGTEGLLMGILVEGTSGAAKLLRANGITLLKVREEAANVLGKSEMFYFSPMHPPLTEAAQRALDWAVNEKLKSGNFFLVICSFFFECLGEDGEVNANHLLLGIWSDDESAGHKILYSLGFDDVKASLLAKTADEEAAMSPR

SEQ ID NO: 2311 - protein, 440 aa, Zea mays
  VARIANT 136: note = Ancestral polymorphism is S, Derived polymorphism is F
  VARIANT 140: note = Ancestral polymorphism is A, Derived polymorphism is V
  VARIANT 162: note = Ancestral polymorphism is A, Derived polymorphism is V
  VARIANT 185: note = Ancestral polymorphism is V, Derived polymorphism is I
  VARIANT 187: note = Ancestral polymorphism is S, Derived polymorphism is F
  VARIANT 188: note = Ancestral polymorphism is R, Derived polymorphism is K
  VARIANT 196: note = Ancestral polymorphism is G, Derived polymorphism is D
  VARIANT 250: note = Ancestral polymorphism is T, Derived polymorphism is I
  VARIANT 262: note = Ancestral polymorphism is D, Derived polymorphism is N
  VARIANT 264: note = Ancestral polymorphism is V, Derived polymorphism is G
  VARIANT 280: note = Ancestral polymorphism is D, Derived polymorphism is H
  VARIANT 294: note = Ancestral polymorphism is R, Derived polymorphism is W
  VARIANT 349: note = Ancestral polymorphism is S, Derived polymorphism is G
MERYHPSEVYELFVRHMNTPRVVVDNGVCATATLVQVHSARKHGVLLEAVAALSDHGVCVRKGYISSDDGRWFMDVFHVTDAAGRKVADADADALLARLESSLSADALPPRTPPAAAAGTPTLLELVGADRPGLLSEVFAVLHDLRCDIADARAWTHGGRVAALVFVRDEDTGAPIDDAARVRRVESRLRHVLRGGALGARMVRADAAAVNMDRRLHQLLNEDGEAESRADQATAVAVQDWGERGYSVLTVSCRDRPKLLFDVVCTLTDLDYVVYHGTFDTDGDHAQQEFYIRRLDGRPISSAAERRRVIQCLQAAIERRASEGVRLELRITDRRGLLAYVTRVFRENSLSVTHAEITTRGDMAMNVFHVTDVAGRPADPKTIDEVIQRIGTESLRVDEERWPRLCLTEGDAGRGGAGIFSLGSLVKKNLASLGLIRSCS

SEQ ID NO: 2312 - protein, 499 aa, Zea mays
  VARIANT 464..499: note = Derived polymorphism lacks residues 464 to 499
  VARIANT 237: note = Ancestral polymorphism is R, Derived polymorphism is W
  VARIANT 178: note = Ancestral polymorphism is T, Derived polymorphism is M
  VARIANT 125: note = Ancestral polymorphism is W, Derived polymorphism is R
MEFFYLYTLISSILIVSSLYLHFFFARSRHNLPPGPRPLPLVGNLLDLGSRPHRSLARLAARHGPLMALRLGVVTTVVASSADAARDVLQRHDAVFSTRSVPDAARACAHDHRSMGWLPPGSPLWRALRKVCSAELFAPQRLDAHQALRRDKVQRLVSHVAGLAREGAAVDVRRVAFTTALNLLSCTIFSDDLADLDDRGASGEFMAVIEEFPMAVGAPNLSDFFPAIAPLDPQRIRARLVRVFKKLHAIFDEQIERRVQERAAGDPPKNDFLDLLLDYRGAEDDRGFDRQTLLSLLTDLFTAGSDTSAATIEWAMAELLQSPSSMAKARDELVEVIGSKQEVEESDVGQLKWLQAVVKETFRLHPPAPLLLPRQAETTTEVRGYTVPKGTRVLVNVWAIGQDPARWAEPEKFMPERFLEKEVDFRGRDFDLLPFGAGRRICPGLPLAARMVHLMLATLLHRFEWRLPADVERNGVDMSENLGVTLGMSTPLQAMAMPI

SEQ ID NO: 2313 - protein, 502 aa, Zea mays
  VARIANT 273..502: note = Derived polymorphism lacks residues 273 to 502
  VARIANT 387..502: note = Derived polymorphism lacks residues 387 to 502
  VARIANT 389..502: note = Derived polymorphism lacks residues 389 to 502
  VARIANT 403..502: note = Derived polymorphism lacks residues 403 to 502
MAPWPRRPVLTLVLLLLLALLCSHVALCSSAEPGKPKPKPKVSGSRKALLADNDGDEVPAAKPGKSAAAGKTKKKLLAGDATSKNQTKVAKAKKPESAAAAKGAAKKPAGKAAAAAGGDAAIAKVSKAPKTPKADKAKVPKPDKAATAAAAGAKTKGADSAKPAKVSKTGAKAVKPPKTAKSEAATAVGKAKKPPPANSTVDAGAKTAKSGKKAPVVVDAEVKANATVVSKEKSAATETVEMEDEEEVVLAKEAGEGTDDLISEFRDLPSRLQETLMPDLARLSHHSKAYLSAANAGIADGVRPILGGRWAAVAASAASVAVLLLPLFMLTALVRRMGPYLPLLHRALLLAQAYLAIYFATLALAAAATGLEPLRFFHAASPAAYAWTQAAQSLGFMGYLVLQMVDLVAVFSDAASPEDEGNGDAAKALGLAQMVVGLAVGLHYYAAVFHRAAAGEAPRANWRVYAVYAACFAIVCACARAERRKKAYLAGTDGAAEEWKKS

SEQ ID NO: 2314 - protein, 80 aa, Zea mays
  VARIANT 48: note = Ancestral polymorphism is R, Derived polymorphism is G
  VARIANT 46: note = Ancestral polymorphism is Y, Derived polymorphism is C
  VARIANT 32: note = Ancestral polymorphism is R, Derived polymorphism is S
MPSGMMMAREMTGTGAPSEVPYDRCRGSAYMRSPSPRYRQEYSPNCDRRGRYPGYDRRDGAMYERRSPVYDRYDSLLNQY

SEQ ID NO: 2315 - protein, 314 aa, Zea mays
  VARIANT 9: note = Ancestral polymorphism is T, Derived polymorphism is I
  VARIANT 112: note = Ancestral polymorphism is V, Derived polymorphism is G
  VARIANT 187: note = Ancestral polymorphism is C, Derived polymorphism is R
MAPGLQRFTDIADDGTPQLDAASGEELVRVDRTVAVALGPRSPESPGTLFVTTRRVIWLSEAEKGKGYAVDFLAISLHAVSRDLEAYPSPCIYTQVIGAASSPFADTVLCTVWCFDWYSGDSCAQMFSCGYTQGSSASCLTFCTFNLKIEAAVGTEEEAGESNPEANELELSRVSEMRLILADPGQRILLNYVVSLKDFFVQACVYALSLMMEFKASVDALFDVFCHCAELNPDPNAECNGENGWIRGEDMSNGDWIRDDVDMVDENVPQFFNANPIGQNGGYDLSRSVFELQINDQRFEDAEEEQESHENNGH

SEQ ID NO: 2316 - protein, 126 aa, Zea mays
  VARIANT 30: note = Ancestral polymorphism is T, Derived polymorphism is I
  VARIANT 44: note = Ancestral polymorphism is A, Derived polymorphism is V
MAAAAVYGGLKGKLGVEDAPELQLNRIRITLSSKNVKNLEKVCADLVKGAKDKHLRVKGPVRIPTKVLHITTRKSPCGEGTNTWDRFEFRIHKRVIDLISSPDVVKQITSITIEPGVEVEVTVADV

SEQ ID NO: 2317 - protein, 386 aa, Zea mays
  VARIANT 355: note = Ancestral polymorphism is R, Derived polymorphism is G
  VARIANT 349: note = Ancestral polymorphism is S, Derived polymorphism is W
  VARIANT 290: note = Ancestral polymorphism is E, Derived polymorphism is Q
  VARIANT 239: note = Ancestral polymorphism is L, Derived polymorphism is V
MERSNSWFRWWRKKAREGQGQGGRPRHGEKVVVDGSEIRELVEDREAFGMLVDTKFRQLDADGDGMLSVGDLRPAVADIGAALGLPAEGASPNADHVCSEVVSELTHGTSQGEVSKAEFQEALSDILLGMAAGLKRDPLVILRMDGEDLRDFAAGSRYEPTAAAVFSQVVDLGSEVASPRQCVLAALQKLSVDHGVPPASDAWVAKHIVEPALQQLLPADQPGQQPASRDDLFQQLKKLLGAVADRLQEQPVIVAHTENHYDGSGVKRLLANKFELDKLLDSVWKNLAAEDKNKASKGCLITALDKMADAASLPYYSAVKEVDAVVEESIKTAGVEEGKAVDEAEFKKSLTEILRAIMLRLNDSPVFVSTDVVVHEPLSGTSSSVN

SEQ ID NO: 2318 - protein, 516 aa, Zea mays
  VARIANT 59..516: note = Derived polymorphism lacks residues 59 to 516
  VARIANT 168..516: note = Derived polymorphism lacks residues 168 to 516
  VARIANT 269..516: note = Derived polymorphism lacks residues 269 to 516
MVAAGLLEGLLNAFLKDYPLSLPELRYLGDCSGSASTSKFNIPKNMGEESINGASSKRQKGCKGKVSEKVNPDDKLKQPTILDAFKRAGVTVSQATNKASSQPSSSGMMSKDIEQDATDPGELGLIDLMAAPVKLDLQRYKFRTIRATCLSLLNYSECQGSSSYLQTETLQPTENFDDVLSEFQPSLAPCNVDYLYCGACKILEDIMDSVSSFSYLLSSDVLITIQSIVNSVVVLLDKSGEPNGKNIHMGCSKAIIPFLRKRLGYSAHKLLSADFPSEDAGKGWQSKGDLIQKILQIYLRNSDSTSDLLAEIGRELPKEPSLKTKDNQDVSYGFPTLCSSTITSWYRVLHEENTRSLNKTIKQALKARGSVDTILQEIQKSVDAFVSLIGMCKSHEKVSMHAMAVKHGGKFIDTFLKAFNFLERQFKQHNDTIVKMLKQLQKGTRIIQSICSDSKCACDIVQGNLKHKDLQGHVVSSQAYGNVDEEDEEQTEIDSDLPTDEHDNGNAMEEDAVEGT

SEQ ID NO: 2319 - protein, 205 aa, Zea mays
  VARIANT 44: note = Ancestral polymorphism is G, Derived polymorphism is S
  VARIANT 185: note = Ancestral polymorphism is I, Derived polymorphism is T
MAGGGPAASALSSPWRALLQRALDANAHLRHSTYFQLATVGAAGRPANRTVVFRGFQELCDKIQINTDARTNKIGEIKSCPFGEICWYFTDSWEQFRISGSIDVIDASTTDPAKLQHKEKAWFSSSVKSRSQYLGPQPGIPVLDDEHVKDVHLDPLAGPVDAFCLLVLDPEKVDYLNLKSNQRLIFTRRQKDDGSNDWMAVKVSP

SEQ ID NO: 2320 - protein, 245 aa, Zea mays
  VARIANT 113: note = Ancestral polymorphism is L, Derived polymorphism is I
  VARIANT 111: note = Ancestral polymorphism is S, Derived polymorphism is A
  VARIANT 105: note = Ancestral polymorphism is L, Derived polymorphism is I
  VARIANT 102: note = Ancestral polymorphism is L, Derived polymorphism is I
MDNQPLPYSTGQPPAPGGAPVAGMPGAAGLPPVPHHHLLQQQQAQLQAFWAYQRQEAERASASDFKNHQLPLARIKKIMKADEDVRMISAEAPVLFAKACELFILELTIRSWLHAEENKRRTLQRNDVAAAIARTDVFDFLVDIVPREEAKEEPGSALGFAAPGTGVVGAGAPGGAPAAGMPYYYPPMGQPAPMMPAWHVPAWDPAWQQGAADVDQSGSFSEEGQGFGAGHGGAASFPPAPPTSE

SEQ ID NO: 2321 - protein, 183 aa, Zea mays
  VARIANT 51: note = Ancestral polymorphism is R, Derived polymorphism is W
  VARIANT 58..183: note = Derived polymorphism lacks residues 58 to 183
  VARIANT 66: note = Ancestral polymorphism is A, Derived polymorphism is P
  VARIANT 70: note = Ancestral polymorphism is G, Derived polymorphism is D
  VARIANT 92: note = Ancestral polymorphism is P, Derived polymorphism is L
  VARIANT 107..183: note = Derived polymorphism lacks residues 107 to 183
  VARIANT 122: note = Ancestral polymorphism is A, Derived polymorphism is V
  VARIANT 124: note = Ancestral polymorphism is E, Derived polymorphism is K
  VARIANT 136: note = Ancestral polymorphism is L, Derived polymorphism is R
  VARIANT 157: note = Ancestral polymorphism is S, Derived polymorphism is L
  VARIANT 164..183: note = Derived polymorphism lacks residues 164 to 183
MFWNRCLCMPDPAAPLLPPKRINSGDLSRCPWDELVFEDESERGSNALLARAWSPGWQNADKALTAFLNGPLMDHSVNRKKADSASTSLLSPYLHFGELSVRKVFHQVRMKRLMWSNDDNHAGEESCTLFLCSIGLREYLRYLTFNHPYSHEKPLLSHLRFFPWVVNEVYIIKVLVIYLYLAQ

SEQ ID NO: 2322 - protein, 361 aa, Zea mays
  VARIANT 154: note = Ancestral polymorphism is G, Derived polymorphism is E
MLRAARYLLGSPGASGFGSRSTAEEVTPDLGATTAIITGATSGIGAETARVLAKRGARVVIPARSAKAAEDVRARIVAECPAAAVLVLPLDLSSLASVRAFADRFLALGLPLHLLINNAGKFSHGQLALSEDGVEMTFATNYLGHFLLTKLLAGRMAETAAATGVQGRIVNVSSSVHGWFAGDWAEYLHLVTRRKIPYDATQAYAVSKLANVLHTRELAARLQEMGANVTANCVHPGIVRTRLNRDRDGVLTDLVFLLLSKLLKTIPQAAATTCYVAAHPRVAGVSGRYFADCNEALPSPAATDRHEAARLWRVSEAIIDGCTNSQPQRDCTTAPLPRLLPAQTQSQSPTGASSSPRRRAC

SEQ ID NO: 2323 - protein, 519 aa, Zea mays
  VARIANT 206: note = Ancestral polymorphism is Y, Derived polymorphism is C
MGFISGVVMGMIVGVALIAGWARAMARRAAKRSNKAAVISSLGSLNREDVKKICGESLPQWISFPEYEQVKWLNKQLSKLWPFVEAAATMVIRDSVEPILDDYRPPGISSLKFSRLSLGTVPPKIEGIRIHSFKKGQITMDMDFRWGGDPNIILAVETLVASLPIQFKNLQVYTIIRVVFQLSDEIPCISAVVVALLAEPKPRIDYILKAVGGSLTAMPGLSDMIDDTVASLITDMLQWPHRIIVPLGGVDVDVSDLELKPHGKLTVTVVRAESLKNKELIGKSDPYVVLFIRPMFKEKTSVIDDNLNPHWNETFHLISEDKETQSLILEVFDEDKMKQDKRLGIAKLPLSDLEMETVQEVKLQLLSSLDTTKVKDKKDRGVLSIKAGSINLVAYHQFTNAEAREALELEKQTVDERRKVKSETGAVSGAADAASGMASTVTNVAGTGIAAAGTVAGTGVSAAGSGVGMVGTGIGAVGSGIGAFGSGLSKAGKFVGRTVTGPFSSSRRSTSSVPNVVDD

SEQ ID NO: 2324 - protein, 1795 aa, Zea mays
  VARIANT 1345..1795: note = Derived polymorphism lacks residues 1345 to 1795
MASAVAAPPPTPPESDPRLVEIFSPFLEKLIKNASWRNKAHSKLSHTAKSILDRLQKPPPPPAAEAQAPSTPTSSPSTPTSSSAQPGPLRSLSLADSELLLAPVISALGSGSAKLAEAALELLHRLIAHSYIHGEADPSADPSAQLVASLLDAACNALGLDDEHIELLLLKTLLSAVTSTSVRLHGDCLLRAVRACYDMYLGSRSAVNQATAKASLVQMLVIVFRRMEADSSTVPVQPIVVADVIELPDAISGSSPTADPNVVQGFISKIIGDFDGALTPLARTTSSAGAGPTVAHDGAFETTAAAEEGANPADLLDSTDKDMLDAKYWEISMYKTAIEGRKDELGVEGAVVGTLDDDADVRIGNKLRRDAFLVFRALCKLSMKTPPKDAPADPIVMRGKILALELLKILLENAGAVFRTSERFLGAIKQYLCLSLLKNCASSHMIVFQLSCSIFISLVARFRPGLKAEIGVFFPMIILRVLENIAQPNYQAKMIVLRFLEKLCGDSQILVDIFLNYDCDVHSSNIFERMVNGLLKTAQGPPAGVPTTLVPPQDTTMKSEAMKCLVAILRSMGDWMNKQLRIPDPASPNVESEKNDNDDGNELPQADNNGDESSEASDSHSELSNGISEAASLEQRRAYKIELQEGIYLFNRKPKKGIEFLVNASKVGETPEEIAAFLKSASGLNKTMIGDYLGEREDLSLKVMHAYVDSFDFQRLEFDEAIRAFLQGFRLPGEAQKIDRIMEKFAERYCKCNPKAFSSADTAYVLAYSVIMLNTDAHNPMVKNKMSPEDFIRNNRGIDDGKDLPEEFMRSLYERIWKKEIKMKEDEFVPQQQQSTSSNKILGLDNILNIVVRKRGSSMETSDDLIKHMQEQFKEKARMSESVFYPATDVVVLKFMVEVCWAPMLAAFSVPLDQSDDEIVVSQCLEGFRSAIHVTAAMSMKTQRDAFITSLAKFTSLHSAADIKQKNVEAIKAILLIADEDGNYLQEAWEHILTCVSRFENLHLVGEGAPPDATFFALQQPDLDKSKQAKSSILPVLKKKAPNATSASKRGSYDSAGVGGKASGVDQMNNEVTSLLEQVGMAEMNRVFVRSQKLNSEGIIDFVKALCKVSMEELRSASDPRVFSLTKIVEIAHYNMNRIRLVWSSIWHVLSDFFVTIGCSENLSIAIFAMDSLRQLSMKFLEREELTNYNFQNEFMKPFVVVMRKSRAVEIRELIIRCVSQMVLARVSHVKSGWKSMFMVFATASYDDHKNIVLLAFEIIEKILREYFPYITETETTTFNDCVNCLIAFTNSRFNKDISLNAIGFLRFCAAKLAEGDIGSSRLKDNPSNSNPPSPHLTNDGKQECTVLVDKEDHIHFWFPLLAGLSELTFDLRPEIRKSALQVLFDTLRNHGHLFSLPLWEKVFDSVLFPIFDYVRHAIDPSGNPPQGQSVENDPAELDQDAWLYETCTLALQLVVDLFVKFYDTVNPLLKKVLLLLTSFIKRPHQSLAGIGIAAFVRLMSSAGSMFVDEKWLEVVLSLKEAATETLPDFTYVSSGAYLENVPTENGVSADNREDESEPVADDNEESSRSRNLYFTIGDAKCRAAVQLLLIQAVMEVYNMYRGQLSAQNTVILFEALHTVAAHAHKINSDSDLRSKLQELGSMTQMQDPPLLRLENESYQLCLSILQNIFLDSSPDHGSTEVVESHLIGLCKEVLEVYLSTARPSQPSSGTQPLGHWLIPVGSSKRRELAARAPLVVSTLQAISGLGDSAFEKNLRQFFPLLAGLISCEHGSSEVQVALSDMFSTWVGPLVLQSC

SEQ ID NO: 2325 - protein, 681 aa, Zea mays
  VARIANT 376..681: note = Derived polymorphism lacks residues 376 to 681
MPSRQPTPSPGPAAAVAVSDPRSRGPRHRRAPPAGPVAAWASAAALVLVAAVALLLLLLWRRRRRRKLTVAAGAQPAADLRRLSYQQLRRATGGFAAGSKLGQGGFGPVFRGALPRSGQPVAVKVMDAAGSLQGEREFHNELSLASHLLGCAATAHGGGGGGGPPAPDPPPILLPFAYSLSTQPRRCRMMLVYDLMPNGSLQDALLGKRCPDLVSGWPRRLSVARDVATALHYLHSVVQPPVIHGDVKPSNVLLDADLRARLSDFGLARIRSEEEDELGSGAIGADADGNANPSGGCDEDMSVAGESTTAVVVNGEDNAAKSPEDDEALTTASPAAEAVSTSGCDKTSVGSGCNARSCNGGGAGGSGTGSDWWWRQDNGGGGSGGGGSGGVKDYVMEWIRSEIKKERPKNDWIAGPSAVTPVAPTERKKPKRRAREWWREEYAEELTKKQKRRALAKSKSDAGAMSGLQWWERDCDFEEKGHSRWTMMKSWSRRSSNGNGNSNSSISWWVDGVRRSSRDWASGEFVPKSGGAVSSTPSMRGTVCYVAPEYGGGGPLSEKCDIYSFGVLLLVLISGRRPLQMTTSPMSEFEKASLISWARHLAQVGRLLDLVDPALQDVDRDQALLCITVALLCIQRSPARRPSSAEVLDMLAGEGEPPPLPIEFSPSPPGGFPFKSRRKGR

SEQ ID NO: 2326 - protein, 331 aa, Zea mays
  VARIANT 248: note = Ancestral polymorphism is P, Derived polymorphism is L
  VARIANT 240: note = Ancestral polymorphism is G, Derived polymorphism is A
  VARIANT 215..331: note = Derived polymorphism lacks residues 215 to 331
  VARIANT 152: note = Ancestral polymorphism is V, Derived polymorphism is E
  VARIANT 50: note = Ancestral polymorphism is S, Derived polymorphism is A
  VARIANT 45: note = Ancestral polymorphism is R, Derived polymorphism is H
  VARIANT 24: note = Ancestral polymorphism is P, Derived polymorphism is L
MDPYKYLKIRLNPDGSLCRYGEAPLLPAAPAGEPVAVEDEQGARRIVVHSSDVPLNDATGTGLRLFVPSGSGGHDGGRLPLVVYFHGGGYVLFRAASAPFHNTCAALAAAAPAVVASVDYRLAPEHRLPAAFEDAADAVLWARPHAAAGRPVFVMGSHNGATIALRAALAAADAGVELRGVVLNQPHLGGAARSPAEAASVDDRVLPLPANDLLWELALPVGADRDHEYCNPEAMLARVGAARLRRLPPCLVLGRRRDPPRDRTRTLVRALHKAGVAVEARLDGAGYHAMELFKPNCAAEFTAQVADFVRRHSSAVTAVAGSGDVVGMSKL

SEQ ID NO: 2327 - protein, 59 aa, Zea mays
  VARIANT 44: note = Ancestral polymorphism is D, Derived polymorphism is N
  VARIANT 31: note = Ancestral polymorphism is S, Derived polymorphism is L
  VARIANT 21: note = Ancestral polymorphism is Q, Derived polymorphism is R
  VARIANT 18: note = Ancestral polymorphism is E, Derived polymorphism is G
MFEVIRMLEGDKLIERWEVSQNVDTPEFVSSELLLQKYMDFAADECSLGVDAMELSGPR

SEQ ID NO: 2328 - protein, 512 aa, Zea mays
  VARIANT 497: note = Ancestral polymorphism is S, Derived polymorphism is F
  VARIANT 356..512: note = Derived polymorphism lacks residues 356 to 512
  VARIANT 60..512: note = Derived polymorphism lacks residues 60 to 512
MDMALPVVNATAAVLARVSAAFNAPLARAVVFGVHIDGKSLFPHGFIRRVGGLVSHIQSRRDFPGHLVVEGLLIAVIVFQLSRKSYKPPKKPLTEKEIDELCDEWEPEPLCPPVKEGARIDTPMLESAAGPHTIVDGKEVVNFASANYLGLIGNEKIIDSCIGSLEKYGVGSCGPRGFYGTIDVHLDCESKIAKFLGTPDSILYSYGISTIFSVIPAFCKKGDIIVADEGVHWAVQNGLHLSRSTVVYFKHNDMVSLASTLEKLTHGNKRAEKIRRYIVVESIYQNSGQIAPLDEIVRLKEKYRFRVILEESHSFGVLGKSGRGLAEHYGVPIEKIDIITAGMGNALATDGGFCTGSVRVVDHQRLSSSGYVFSASLPPYLATAAVSAVNYLEQNPAVLANLRSNIALLHKELSDTPGLEIFSHVLSPIVFLKLKKSTGSPTTDLDLLETIAGRVLKEDSVLIVTSKKSNLDRCKLPVGIRLFVSAGHTESDISRLSSSLKRVSAAVLSDCF

SEQ ID NO: 2329 - protein, 529 aa, Zea mays
  VARIANT 118: note = Ancestral polymorphism is A, Derived polymorphism is V
  VARIANT 341: note = Ancestral polymorphism is A, Derived polymorphism is T
  VARIANT 356..529: note = Derived polymorphism lacks residues 356 to 529
  VARIANT 389..529: note = Derived polymorphism lacks residues 389 to 529
  VARIANT 502..529: note = Derived polymorphism lacks residues 502 to 529
MHMELAPPPMGDVAHHHVHDPASFSPLSSDAGLSPHFPPALADGGAGALDLSFTSTASASTSSFTTATTFSARSSLSLPSFSSSTSLSPRPHSSSASPHWAHLAAARAATPDGVLRLAHLHLVRELGHGHLARVFLCRLKSSPPASPLFALKVVDLRDDDPSRVSHVLAESRVLSCLDHPFVPTLYARLDAGRYACFLMDYCSGGDLHAVLRRRPGGRLPVAAARFYAAEVLLAIEYLHALGFVYRDLKPENVLLRGDGHVVLSDFDLALPASVEPAVRLRQVRKQSRRRRIALLLSCFSGPSNGGGEDEEEIDGKERFEFVAEPTAASSKDCVGTHEYLAPELVSGSGHGNGVDWWAFGVFLYELVYGRTPFKGHTKEATLKNILSKQATYPQLDGEADASQLRDLVGRLLERDPRRRMGATRGAAEIKRHPFFSGVDWALIRCVAPPVVPDRDAAAPVGGGDRKAAKLGSWSSMSSNRGSKKRKSSSFGRRSTSTCEERQGVFRKLMSWNQESRSSNKIKTTTSKVK

SEQ ID NO: 2330 - protein, 182 aa, Zea mays
  VARIANT 90: note = Ancestral polymorphism is P, Derived polymorphism is L
  VARIANT 86..182: note = Derived polymorphism lacks residues 86 to 182
  VARIANT 59: note = Ancestral polymorphism is A, Derived polymorphism is S
  VARIANT 40: note = Ancestral polymorphism is A, Derived polymorphism is T
MEGWDKGTKSTVGEIPLLSTRAGPRDGEAWRQRLKEEYRALIAYTSVNKAKDNDWFRIAAANPEGTRWEGTCWYVHNLRRYEFPLQFDMPVAYPQVAPEIELPTLDGKTHKMYRGGKICLTVHFKPLWAKNCPRFGLAHALCLGLAPWLAAEVPILVDSGMVKHKDDEAAPAEASASAAPPS

SEQ ID NO: 2331 - protein, 594 aa, Zea mays
  VARIANT 10: note = Ancestral polymorphism is I, Derived polymorphism is T
  VARIANT 12: note = Ancestral polymorphism is L, Derived polymorphism is H
  VARIANT 21: note = Ancestral polymorphism is E, Derived polymorphism is K
  VARIANT 65: note = Ancestral polymorphism is P, Derived polymorphism is L
MLRTCFLFLITLGRLVAALNETALFTFNGFSGANLSLDGMATVTPDGLLMLTNGTTALKGHAFHPTPLRFHGANGRTVASFSTAFVFGIIGQYPDVSSQGMAFVVSASRDFSTALPGHFLGLVNAADNGNAGNHLLAVELDTVLNAEFRDIDDNHVGVDVNSLTSVRAASAGYYDDQTGSFRNLSLISRKAMQVWVEYDGRAMELDVTMAPVEMPKPKKPLLSAVVNLSEVVTDPAYVGFSSATGIIFSHHYVLGWSFKLNGGEAPALNVSMLPALPRTTTGNKTRLKVLEVVLPIASVVFALALATAVVAAAKRRAKFAELREDWEAGFGSHRFAYKDLFYATGGFKDRNLLGRGGFGRVYMGVLPKSKARVAVKRVSHESRQGIKEFVAEIVSLGRLRHRSVVQLLGYCRRRGELLLVYDYMPNGSLDRLGEGRRPPGHQGQASNVLLDAEMSGRLGDFGLSRMYDHGTDPSTTHVVGTIGYLAPELGHRAKAAPATDVFAFGVFLLEVTCGRPPVGEDDAQGSQAVLVDWVLHHWRNGSITEAADPRLGNDYADGEVQLVLKLGLHCSHPLAVWPARGLACGGLSSALTAT

SEQ ID NO: 2332 - protein, 651 aa, Zea mays
  VARIANT 20: note = Ancestral polymorphism is R, Derived polymorphism is S
  VARIANT 84: note = Ancestral polymorphism is A, Derived polymorphism is S
  VARIANT 149: note = Ancestral polymorphism is G, Derived polymorphism is S
  VARIANT 152: note = Ancestral polymorphism is S, Derived polymorphism is I
  VARIANT 177: note = Ancestral polymorphism is G, Derived polymorphism is S
  VARIANT 333..651: note = Derived polymorphism lacks residues 333 to 651
MFEKSARLTLIATAAMVSVRPISILLLFLLRKIELVSSASAEQFAYEGFTGANLTLDGAAAVTPSGLLALTNDKHTKGHAFFPAPLRFFHGPASSAALRSFSATFVFAIVSEHAQLSDHGLAFVLAPSSNLSDATGAQYLGLLNISDNGKPSNHILAVELDTVLSPEFRDIDSNHVGIDVNSLQSVESHTAGYYEDGTGKFLNLTLMSRRAMQLWVDYGGQAMELNVTLSPLDVEKPRDPLLSTTINLSKIVNSTAYIGFSSATGLSIAYHYVLGWSFSLNGAAPALNSSNLPALPRLPHQKRSLSETLVIVLPFATAGFIIALIIAVFMVMRRWSRYAELHEDWEVEFGPHRFSYKDLFHATKGFGSRQLLGIGGFGRVYRGVLLESNLEIAVKRVSHDSKQGMKEFIAEIVSMGRLRHKNLVQLLGYCRRKGELLLVYDYMPNGSLDKHLYDQSRPVLSWNTRFHIVKGIASGDFGLAKMYSHGTNPRTTNVVGTMGYLSPELLRTGKASTGSDVFAFGMFLLEVTCGRRPLEHDQVVLLDWVFEHWNKGAILDVVDARLSGQYSAEEASLVLKLGLLCLQPMPNARPGMRQVLQYLDGALTVPEMAIMNLDYGTMMFLQSEGFDSYAMLDASSLATSIGPGSDLSGGR

SEQ ID NO: 2333 - protein, 196 aa, Zea mays
  VARIANT 95: note = Ancestral polymorphism is A, Derived polymorphism is D
  VARIANT 30: note = Ancestral polymorphism is P, Derived polymorphism is L
  VARIANT 27: note = Ancestral polymorphism is L, Derived polymorphism is M
  VARIANT 2: note = Ancestral polymorphism is P, Derived polymorphism is L
MPTWLLSMSRNSGLRTVSSSTARMWLLGLPLSLMLRSPRYCAPVASERLLLGASTKARPWSLSWACSETMANTKVAENDRRAALLAGPWKKRRGAGKNAWPLVCLSLVRASRPLGVTAAAPSSVRFAPVKPSYANCSALADETSSILRRRKSRRMEMGLTLTMAAVAISVSRADFSNICYSGLWGGNSLFSDRLRH

SEQ ID NO: 2334 - protein, 531 aa, Zea mays
  VARIANT 133..531: note = Derived polymorphism lacks residues 133 to 531
MGLFGKSTSKQTAKLKSLVKLAAARLAVVRRPRLGRRSIARSDVGQLLSIGHLDRALVRAEQVIEEDNMLEALDVIELYCKILVEQTAQLEKPKECSEEIKEAAAGLMFASARCGELPELLDARAILADKFGRDFARAAKEGAHGVVDPTLVRKLSGERASVEQTRRLAKEIAAENDILLEFPESPVGIHKDGRTTSQVNSQRAGEETKNAPARTFVEESAVKTGRREGERNSVNGKVNPSLAQLSLDEKVLRESKKYPDARMAAEAAFASAKFAAMAARAAVELSRSESHGKGSTGGGYDKVPSVRTTAATEQGTAPPLSRPHKSPSPSPSWSDRSTATSVGSDAAHKGKEVVFDQSDEELDDVVWPPPQRRPSYRRTASTVGTVHASARDTGTPAAQLARPQHRRHATELSAGNAHAPGLHDALAGQRRQHVTPPYRRASTASTGRNSDAAALDDGGAYESSPYVQPPYSRMASALERSNGHIARHEEVRRMGTDARALQERVYGAAAPGQGHGPLDPERRTTSVRTRR

SEQ ID NO: 2335 - protein, 91 aa, Zea mays
  VARIANT 40: note = Ancestral polymorphism is D, Derived polymorphism is N
  VARIANT 31: note = Ancestral polymorphism is R, Derived polymorphism is C
MAAAAPTRAEVLSLFRSLLRTAKQFSDYNIREYTRRRAADAFRENSALSDAPSAAALFAVGKQQLEVAKRQAVIYSIYAPKAKSVMELKVQ

SEQ ID NO: 2336 - protein, 253 aa, Zea mays
  VARIANT 187: note = Ancestral polymorphism is G, Derived polymorphism is R
  VARIANT 194: note = Ancestral polymorphism is G, Derived polymorphism is R
MLVAAPATKGSPTKDLTAVEPGDEVAQSVFDAGGAMGSVSVCQANGNHQPPPPQAEAEQVVEDGVAVDRINGNYQPLELVAEAGQVVEEGDAGVTMEGVASIALLPTGAISGHFIRLPDSICYGLHGTPISCERECSRGEDYRLIKLTIIDFKSKREKVLVVECRGHDAARLQNIDHLHGWEDDIVGLVEKEHGNQKVLLSFECETLKADKDAEDHIAKYMPNLCGLDAVVNIGKMSISGINLDEDAEPRGDN

SEQ ID NO: 2337 - protein, 211 aa, Zea mays
  VARIANT 151: note = Ancestral polymorphism is S, Derived polymorphism is L
  VARIANT 149: note = Ancestral polymorphism is R, Derived polymorphism is Q
  VARIANT 130: note = Ancestral polymorphism is S, Derived polymorphism is L
  VARIANT 126: note = Ancestral polymorphism is G, Derived polymorphism is R
  VARIANT 117..211: note = Derived polymorphism lacks residues 117 to 211
  VARIANT 49: note = Ancestral polymorphism is A, Derived polymorphism is T
  VARIANT 39: note = Ancestral polymorphism is T, Derived polymorphism is I
MYPRVNSDALPALGSLEMGHAAHAVAYPPLPPVEVIPVTVIQQRHGERALDPDRSSCEDHDPSALVVAATLITTLAFLLGSSVPGGYWPQDTPSRDGGKLYRAGDPIMRDLHRPRYWVFRVASWFGVASSMVLTLSLLLRMAATSRHVRWSFVVAYASLLLTFAASQTKTHLSLDIILCLLVLFVSWLITSVREENRACIMKVLCCSSRDN

SEQ ID NO: 2338 - protein, 175 aa, Zea mays
  VARIANT 16: note = Ancestral polymorphism is L, Derived polymorphism is F
  VARIANT 141: note = Ancestral polymorphism is I, Derived polymorphism is F
MKAFGNKLAVAKIEEFFRQADTNSDGIVDIDELAALLAAQQEEEPLISNCPVCGEDLGKYDNINDMIHMTLCLDEGTGNQIMTGGFLTDKQASYGWMFKLSEWAHFSTYDVGLHSGSTASHILVFDRRTKRIVEEVIDRKIVLSMRALYQSKVGLALINTGMFDQIILACLMFPF

SEQ ID NO: 2339 - protein, 685 aa, Zea mays
  VARIANT 512..685: note = Ancestral polymorphism lacks residues 512 to 685
MEGTVIRIASESKRGNEQTDSLTEVPRAIGTLVTHNREVENLIVLEDDTELTPYEGMEFESEDAARDFYSTYARSAGFRIRISRYTRSRRDNSVISRRIVCSKEGFHETRACDGLHPEQKQQERAGTRVGCKAMILIKKFSPGKWVVTKFIKNHNHGPVPPRKLDSRLVDQDCDPMEKPHSIEVDPVEEPFEGMEFESEEAAKLFYVNYARLNGFRARISRYCRSRRDNSIISRQIVCSKEGFREVRTKKVLTDEGKTKRPRMITRVGCKAMIVVKKMNSGKWMVSKFEKEHNHSLSYSKMVPSTSNITSGEIVDLAAKGAHPSEVKNEGYSAGTQCNPADSLTILYNNLCQEAIKFAKEGSVTEEIYHVAVSALKEAAEKVAEVKRSRPTLSHCGFVRESKHDVLQEKSMSALQCSNQVELTRTSPGSRPLQDSASNLLLIPTDILTDSRLYSGVDTAPLTGGFPTNESESTHASESSFMHFKNTKKTSSEKSQHFLVFHFGPEDAYLLLEPQNTCFNQLIHGKEQGIHGSSKDTMVAIPAIPLALCMPVTQSLPGSSTEGPYRLLAAPIEAVPISYCPAEPIRQTQKGICALGPFGGVLSELKNQGTVPKSIVHATALACGARAVPLEDAASLISAIESKIRSGGAIIAKLPSNNLAPLVPPAIAMSSSSEDDEEHDHSEPSQ

SEQ ID NO: 2340 - protein, 346 aa, Zea mays
  VARIANT 40..346: note = Derived polymorphism lacks residues 40 to 346
  VARIANT 225..346: note = Derived polymorphism lacks residues 225 to 346
  VARIANT 231: note = Ancestral polymorphism is G, Derived polymorphism is R
MLGHDLATDPSSTLRMVTSRVSSAPLGLVCSLSFDRGFKEKNNIFINVDRCMKYSTFCYAPRNPNITPLATASFGDMADSSIFTFPRIHVKDPYQRLGISREASEEEIRAARIYLISKYGGHSQALMQLSVPMIGLSCRVSLIGKKPKTNLKKKIRELSQSRAVKAIQGRFQTPRSKVIWQTAITFVLLGVLTLAFPTEEGPTLQVAISCAANIYFIYQRVKSGWRAFFYGLYKQIRGGSYFLVAYAWFFLCFLVPGHLLDGIPNSSCTPRPKKLGSEHRVCYLRAPFRIADILEVRDLRASFHVSPKSCRSYNHGILLQIACTIHQLFVCLFHVRGVGNGSPSVS

SEQ ID NO: 2341 - protein, 400 aa, Zea mays
  VARIANT 269..400: note = Derived polymorphism lacks residues 269 to 400
  VARIANT 281: note = Ancestral polymorphism is G, Derived polymorphism is V
MGNAGSNGGGAAAGHRRRSSGHGHHHQAPPPHQPQETAANRYVFAAATPYPPQYPNPNPPQYYPQYGNYYPPPPPSVPVPLPAPYDHHHRPPTAAPGEFPPPPLTHPHHYPGWAGRYPSYGQHLPMPTPYVEHQKAVTIRNDVNLKKETLRIEPDEECPGHFLVAFTFDATVAGSMTVYLFAKEELNCNLTAVKEDLMKPVTVSFKEGLGQKFRQPSGTGIDFSVFEESDLLKQGDMDVYPLAVKAETTLLVDHPPEGDDQKMKTPNSQITQAVFEKKENGDYHVRVVCQILWVNGTRYELQEIYGIGNSVEGDADANDPGKECVICLSEPRDTTVLPCRHMCMCSECAKVLRYQTTRCPICRQPVERLLEIKVNNKSEDQQQMPQSPPLPALDPQQEEV

SEQ ID NO: 2342 - protein, 555 aa, Zea mays
  VARIANT 265: note = Ancestral polymorphism is R, Derived polymorphism is G
MSNKRTPEEWSNALDTLKASLRSGTPGLDKSTQALVKFCYDNLESDMVRECFLTCALWPEDHNISKEELVQSWIGLGLLPDLSDIEEAHRFGLSVIAIMKAACLLEPGDNHRYNMFPSDTHVRMHDVVRDAALRFAPAKWLVRAGAGLREPPREEALWRGAQRVSLMHNTIEDVPAKVGGALADAQPASLMLQCNKALPKRMLQAIQHFTKLTYLDLEDTGIQDAFPMEICCLVSLKHLNLSKNKILSLPMELGNLSQLEYFYLRDNYYIQITIPPGLISRLGKLQVLEVFTASIVSVADNYVAPVIDDLESSGARMASLGIWLDTTRDVERLARLAPGVRARSLHLRKLEGTRALPLLSAEHAPELAGVQESLRELVVYSSDVDEITADAHVPMLEVIKFGFLTKLRVMAWSHAAGSNLREVAMGACHSLTHLTWVQNLPCLESLNLSGCNGLTRLLGGAEDSGSATEEVIVFPRLKLLALLGLPKLEAVRVEGECAFPELRRLQTRGCPRLKRIPMRPARGQQGTVRIECDKHWWNALQWAGEDVKACFVPVL

SEQ ID NO: 2343 - protein, 121 aa, Zea mays
  VARIANT 6: note = Ancestral polymorphism is G, Derived polymorphism is D
  VARIANT 11: note = Ancestral polymorphism is G, Derived polymorphism is R
  VARIANT 12: note = Ancestral polymorphism is L, Derived polymorphism is I
  VARIANT 15: note = Ancestral polymorphism is G, Derived polymorphism is V
  VARIANT 85: note = Ancestral polymorphism is S, Derived polymorphism is L
MAQGRGSATRGLALGSLLAAAFLLLLGVADAATHRVDWSFNADSWSKGKSFRAGDVLEFNYDPSVHNVVAVDAGGYNGCRPSGTSYGSGSDRITLGPGTSYFICSLNGHCGMGMKMVVNAS

SEQ ID NO: 2344 - protein, 171 aa, Zea mays
  VARIANT 57: note = Ancestral polymorphism is P, Derived polymorphism is L
MLASEFPLLLNRRSSLPRLVTLCDQAPSTPFDVVRNVVEKQLGKNFDDMFEFFDVEPVGSASIAQVHRARLKLSKTDVVVKRIGDTLDFEIKRWSTGKQGNLRALLSTLQYIRPSDKKVDYQIQKLTNAVDNATAREKSGNAEANGKDRHSDEEDLLKYRPNPDMMDTDWS

SEQ ID NO: 2345 - protein, 693 aa, Zea mays
  VARIANT 130..693: note = Derived polymorphism lacks residues 130 to 693
  VARIANT 120..693: note = Derived polymorphism lacks residues 120 to 693
MNRIPSVSLRGGGANEDAAAASPPPDPAALSRWVRAFCVIRFDLERGQLVEACFPPDALTAPGSGLDRLVAFSSFPDSMSHHLPRHRSSVHDSLFSFRIPDPSSPRRAFLYGFVFNRQRQDERLPRGGEQKSVVILSHAPYSSLFRLLLQILGPLCFDVGPSALAMVASHVAVWPAPAPGHPMELPIGSAALRVHLPPAADDPGPPPALLPANPSVPYGLFHDADLFAAFRGLLLHLWTLWELMVVGEPILVVAPSPAQCSEAVSALVSLVAPLLYSVDFRPYFTIHDPDFARLNVLAEGEVFPPMVLGVTNLFFLKSLKSIPNVVSVGSPNPYSTRVLPVGGQSPGNGMNGTPGKLKLEKLAINKFSPTSLLNSIKLRREGPLSLMTEHKEALWSTYSPTTKPDTSVLNRLIDAGVSPRIEESMSVVNNEILRRHFLELTTNFLAPFGPYLRTTTPSEGTSPFVDPPLLPPFHADEFINGLAARGPGKFLSKRMRSNWLDLYRRFLEGPNFMPWFRQRRAAAEQEQQRLWRQARMNVDIEKLMSNMSEIERIDSFDAVERYLLREMELKVAGPEMSMILKWFISFIEFEGKGICCAIDMLDIPILPFGHIFCRHLSGEVPNVNVFVLQNPGKGSADSIGACQKLKVDLQAAFNVLPKDLQQLLLSNPKRAVLLQGSQEKALGANGIGTQTSL

SEQ ID NO: 2346 - protein, 101 aa, Zea mays
  VARIANT 95: note = Ancestral polymorphism is R, Derived polymorphism is Q
  VARIANT 84..101: note = Derived polymorphism lacks residues 84 to 101
  VARIANT 81: note = Ancestral polymorphism is S, Derived polymorphism is G
  VARIANT 73: note = Ancestral polymorphism is W, Derived polymorphism is C
  VARIANT 72: note = Ancestral polymorphism is E, Derived polymorphism is K
  VARIANT 69..101: note = Derived polymorphism lacks residues 69 to 101
  VARIANT 66: note = Ancestral polymorphism is D, Derived polymorphism is Y
  VARIANT 51: note = Ancestral polymorphism is S, Derived polymorphism is F
  VARIANT 46: note = Ancestral polymorphism is P, Derived polymorphism is L
  VARIANT 42..101: note = Derived polymorphism lacks residues 42 to 101
  VARIANT 38: note = Ancestral polymorphism is N, Derived polymorphism is S
  VARIANT 37: note = Ancestral polymorphism is P, Derived polymorphism is H
  VARIANT 31: note = Ancestral polymorphism is L, Derived polymorphism is M
  VARIANT 30: note = Ancestral polymorphism is N, Derived polymorphism is I
MVAATSPPPTGDNDYLDMVFTQVSLEEVENLCRYELPNESWEVNLPAQKVSPELLEPTLGINFARDGIQEKEWLSMVAAHSDAWLLYVAFYLGAQFGFNKN

SEQ ID NO: 2347 - protein, 624 aa, Zea mays
  VARIANT 393: note = Ancestral polymorphism is V, Derived polymorphism is G
MSKKRRTGDKLENDVEDTKRTALAIASGVTASAIAASYNDQIRPVLDAVDRLRHLKGDPSTDSPKLQLEYSNGRVVTTTEAKVADAINAATAEIAGSGKGISDAPITLVVRKSGVPDLTLVDLPGITRVPVQGQPEDIYDQIANIIKEYITPKETIILNVLSATVDFPTCESIRMSQQVDRTGERTLAVVTKVDKAPEGLLEKVTMDDVHIGLGYVCVRNRVGDETYDQARVAEAQLFKNHPLLSQIDKSMVGIPVLAQRLMQIQATIIAKCLPDIVKQINDRLIRSSTELDRMPPDVINTGDAVRAFLHIVKKVCTSLENILVRGDFGCYPDEYYFHGTARVAEMLSRYAKKLPAECPRCSDEKFLAEEMRVLEETMSIKLPNFLPRSAFHVLLKKKVEMVSDVPQDLVSEVWEYVEDLVMKVLLQHSENFPQVQSSCRRAIQSLMEKTRARSAQHVKEMIEMELVAGYTASPDYMKTWEAIMVGQKKFMGSVENKSEPSKVTLECFGEVNVGHLRTHPDLAAQAFDLRARLTAYWKIIVLRLVDGLALHVLRGVKRLVENDLEDELANELLGNNMAGVERMLSPPPSNGTKRDRLKKSIILLQQSKEVVANIMDRISAADEA

SEQ ID NO: 2348 - protein, 477 aa, Zea mays
  VARIANT 11..477: note = Derived polymorphism lacks residues 11 to 477
  VARIANT 28..477: note = Derived polymorphism lacks residues 28 to 477
  VARIANT 37..477: note = Derived polymorphism lacks residues 37 to 477
  VARIANT 75..477: note = Derived polymorphism lacks residues 75 to 477
  VARIANT 304..477: note = Derived polymorphism lacks residues 304 to 477
  VARIANT 314..477: note = Derived polymorphism lacks residues 314 to 477
  VARIANT 327..477: note = Derived polymorphism lacks residues 327 to 477
MPTAPHHACIQWAGQRYPCGGGVVGVGQRGDQGRQPRGAELLQGIPLQHHGHAPGVPALQVLHLSYERQSRLHEQPSFTSKQKQQRVGSGLTPVRRKRRVDGTSLKLLKRTVQAIGSAEQILGQPIVDEEVPMISRYAILRKSCMRSKRFFWTCESDRKLLMAYIRVRAVLGARYYRVPWKSLSDLPAPPHTCLRRMTLLLKTNGKIRGAVMCLCNLLGERYVRYLEKERRLKRRRLFPQISNRSQENSLDSNCEQFNWDDFEVLEIKSALNEVLELIQTEKIDQAKRIGPVNQKTLTMIMMSQRTQYVHRNCQIIRLYEVKPKRVQFQKADSVILKNHADIQMQKVKTWKSSANLKKKSLRITEIRLLKEAYGNHWLLRNPIRVEVKTEAKYTSKVAGRHELGPSITPLGLRLEYMICEASKKSSQVVDFLVHNSGKKIMVYFATCACVDYWAVVLPLINSLKGSPIIASHGKMKQ

SEQ ID NO: 2349 - protein, 1117 aa, Zea mays
  VARIANT 828..1117: note = Derived polymorphism lacks residues 828 to 1117
  VARIANT 621..1117: note = Derived polymorphism lacks residues 621 to 1117
  VARIANT 581..1117: note = Derived polymorphism lacks residues 581 to 1117
  VARIANT 557..1117: note = Derived polymorphism lacks residues 557 to 1117
  VARIANT 432..1117: note = Derived polymorphism lacks residues 432 to 1117
MEVPTYTSKVVHPTADVSKPDSSSDNACDWVVPEYTSTPFMPASTQTEDVGSPDMSTEPLRRKHHVLPGERQAILACQNKKFEANIARNVATLTEDTISDVGQMDDSTQPGSTIEINNTVDDDDEGVIFGEDNDENEVYLFADEDTNKDFEIDGTQDQSVITDVPDPYDKVYSNIPEETHMLKHVPDYGYCTTKKFESEPPRFCCRGGKCCLDSMTTNMRDSGIYTFRAQGMMYHNIKSFGSECGAKHKHLELYFYDDNPSLEHRYRKCREDHIQKDQEVIKQIVGILRGNPYSEHLRSMGHVENLADYHIALNLDQTLNQKTYNTPLTSEVAAVWIEGSERRGQFSKSVMLHGKDRSSHNIRSYHGCYDALSYPLFFPRGELGWHANIPKNLLPIYVYSCMITTAINFRYGQGYSIQYFMRSRLDFIRKNQDRLRADLYQGLVDSMLDGYVRGEKVGKRTVLSSSFIGGPRDMRRRYMDAMALVRKFGKPDIFLTMTCNPNWDEIRRELLRGQTPQDHPDLVVRVFHAKLQELKHRLTKRDILSKVRAYVYVVEFQKRGLPHAHFLLIMQRKYKLTCPEQRRDDGRKEKVRGCELDNRWVVPYNPYLLRLFNFHINVEACGSIKAVKYLFKYIYKGHDRASVVMRYTSKENGDVDEIQQYRDARWVTPPEALWRIYGFELSQNSPSVMQLQLHLPNMHMVTFHKRQMVERVVNRPGADRSMIIAYFEANKLYEEARGILYRDFSECNGGVFFVDGPGGTRKTYLYKALLAVLRSQDKIAVATATSGVAASIMPGGRTAHSRFKIPLTIDDGAICTFTKQSETSKLLQKASLIIWDEASMAKRQSIEALDNSMCDIMGRPDLPFGGKTIVFGGDFRQVLPVVRKGSRAQIVAASLRSSYLWESMCHLKLVRNMRAKSDPWFAEFLLRVGGGTEEVNNDGDVHLPDEVCVPYTGDDRDLDRLIDDIYPSLNENMSNTSYITSRAILTTRNDWVDMINMRMIDRFQREQMMYHSFDTVVDDPNNYYPSEFLNTLTPNGLPPHVLKLKIGCPIMLLRNIDPANGLCSGTRLVHAGMRVFLPRIPLCPSDDEMFPFHFKRKQFLYSLMASYMLLSQGPQLD

SEQ ID NO: 2350 - protein, 103 aa, Zea mays
  VARIANT 5: note = Ancestral polymorphism is A, Derived polymorphism is G
  VARIANT 7: note = Ancestral polymorphism is A, Derived polymorphism is V
  VARIANT 8: note = Ancestral polymorphism is G, Derived polymorphism is R
  VARIANT 11: note = Ancestral polymorphism is T, Derived polymorphism is N
  VARIANT 28..103: note = Derived polymorphism lacks residues 28 to 103
  VARIANT 36: note = Ancestral polymorphism is Q, Derived polymorphism is H
  VARIANT 38: note = Ancestral polymorphism is E, Derived polymorphism is V
  VARIANT 42: note = Ancestral polymorphism is T, Derived polymorphism is I
  VARIANT 43: note = Ancestral polymorphism is A, Derived polymorphism is G
  VARIANT 46: note = Ancestral polymorphism is A, Derived polymorphism is T
  VARIANT 61: note = Ancestral polymorphism is Q, Derived polymorphism is L
  VARIANT 69: note = Ancestral polymorphism is R, Derived polymorphism is P
  VARIANT 71: note = Ancestral polymorphism is I, Derived polymorphism is L
MKIIAIAGYITDEKMHIARDYLEKNTRQACGIKTDQVEVTDTALLALIENYCREAGVRNLLKQIEKIYRKIALQLVRQRVSNELDHESVSATVTEESGSGEFY

SEQ ID NO: 2351 - protein, 102 aa, Zea mays
  VARIANT 15: note = Ancestral polymorphism is A, Derived polymorphism is V
  VARIANT 16: note = Ancestral polymorphism is G, Derived polymorphism is V
MTDIADKNNKWASYAGPSGWNVLCGAVQYTITLLLNLCFYADPDMLKVGNGGMTLAEYRSHFSIWALMKAPLLIGCDVRNMTSETMEILSNKEVIQVNQGII

SEQ ID NO: 2352 - protein, 119 aa, Zea mays
  VARIANT 29: note = Ancestral polymorphism is R, Derived polymorphism is C
MVGPWLLISVLVHSSFLGSTVFTAVDAARTSAFVVTTAPLPMAPAPSLTDSVLGDSKRKVPTGIHGGLWVSVALQKCRDPDLLFREDDGTLLSGYECLRSPLVAAHRHPKQSKDMLQLQ

SEQ ID NO: 2353 - protein, 298 aa, Zea mays
  VARIANT 32: note = Ancestral polymorphism is A, Derived polymorphism is V
  VARIANT 48: note = Ancestral polymorphism is R, Derived polymorphism is G
  VARIANT 50: note = Ancestral polymorphism is N, Derived polymorphism is Y
  VARIANT 51: note = Ancestral polymorphism is R, Derived polymorphism is L
  VARIANT 95: note = Ancestral polymorphism is G, Derived polymorphism is R
  VARIANT 105: note = Ancestral polymorphism is K, Derived polymorphism is R
MGAGASGLAGAEPGGKVARGAGLGDLPELCTAEVLLRLGAPDICRLARLNLAFRGAAGADFVWEAKLPGNYARLLRFVDEAEEEGGSGRDWSAVGRKDVFARLARPVPFDGGKREFWLEKNEGGICMALSSKALVITGIDDRRYWINMPTSESRFHSTAYLQQIWWFEVVGEVDFCFPAGTAYSLYFRLHLGKSSTRFGRRVCSSEQVHGWDKKPVRFQLSTSDGQHAVSQCYLDEPGRWILYHVGDFDAPPSSGQPTRLKFSLAQIDCTHTKGGLCVDSVLVYPKGFQPERVVRARK

SEQ ID NO: 2354 - protein, 1047 aa, Zea mays
  VARIANT 152: note = Ancestral polymorphism is T, Derived polymorphism is I
  VARIANT 68..1047: note = Derived polymorphism lacks residues 68 to 1047
  VARIANT 61: note = Ancestral polymorphism is R, Derived polymorphism is H
  VARIANT 46: note = Ancestral polymorphism is T, Derived polymorphism is M
  VARIANT 42: note = Ancestral polymorphism is H, Derived polymorphism is R
MAQSLELLLIQFLMPDNDARRQAEEQIRRLARDPQVVPALVHHLRTAKTPNVRQLAAVLLRKKITSHWPKLPADSKASLKQALIDSITLDHSHPVRRASANVVSIIAKYAIPAGEWPELLPFLFQCSQSPQEDHREVALILFSSLTETIGATFQSHLNNLQPILLKCLQDETSSRVRIAALKAVGSFIEYVNDGGDIVKMFRDFVPSILNISRQCLANGEEDVASIAFEIFDELIESPAPLLGDSVRSIVQFSLEVSANQDLEINIRQQAIQIISWLVKFKASFLKKHKLVVPILQVMCPLLTETANEDEDSDLAADRSAAEVIDTMAINLPRHVLAPVLEFASLSFHHINPKYREAAVTSLGVISEGCCEHLKDKLEDCLKIVLEALKDQEQMVRGAASFALGQFAEHLQPEILSHYASVLPCILNALEDPSDEVKEKSYYALAAFCEDMGEDILPYLEPLICRLVMSLQSSPRNLQETCMSAIGSVAAAAEQAFTPYAEKVLEMMKGFMVLINDEDLCARARATEVVGIVAMAVGRARIEAILPPFIEASISGFGLDYSELREYTHGFFSNVAEILGDSFTQYLPHVVPLVFSSCNLDDGSAVDIDDADSIENGFGGVSSDDDVNDEPRVRNISVRTGVLDEKAAATQAIGFFALHTKSAYAPYLEESLKILIRHSGYFHEDVRLQAVISLKHILTAVRAIPPAHADVLEKQKDVLDTVLNIYIKTMTEDDDKEVVAQACMSVADIVKDCGFAAIEPYMLRLAEVTLVLLRQESSCQQVESDGEDDGDIDHDEVLMDAVSDLLPAFAKVMGSYFDPIFAKLFDPLMKFAKSPHPPQDKTMVVATLAEVAQEMGAPISAYVDKIMPLVLKELASSDATNRRNAAFCAGEICKNGGAAALKYYGDILRSLHNLFSNSESDDAVRDNAAGAIARMIMVQPQSIPLNQVLPVFIKALPLKEDHEESMTVYGCVCGLLLSSHPQILPLVPDVIHVFAQVVVSPDESDEVKTNIGKAISHLISVYGQQMQPILSALPPAHANALASFASRR

SEQ ID NO: 2355 - protein, 315 aa, Zea mays
  VARIANT 107: note = Ancestral polymorphism is N, Derived polymorphism is I
MVTLCHPIRIRASGSTASWRRRNAAAAAKVLCSVQQMPPPPPAATAAQSTIKVVIVGATKEIGRTAVVAVSKARGMELAGAIDSQCIGEDAGQISGMDEPLEIPVLNDLTMVLGSIAQSRATGVVVDFSEPSAVYDNVKQAAAFGLSSVVYVPKIELETVTELSAFCEKASVGCLVAPTLSIGSVLLQQAAIQASFHYSNVEIVESRPNPSDLPSQDAIQIANNISDLGQIYNREDMDSSSPARGQLLGEDGVRVHSMVLPGLVSSTSINFSGPGEMYTLRHDVANVQCLMPGLILAIRKVVRFKNLIYGLEKFL

SEQ ID NO: 2356 - protein, 229 aa, Zea mays
  VARIANT 159: note = Ancestral polymorphism is D, Derived polymorphism is A
MEAAAENKEAEQEQQQLPHARKDNAPAAAEEDEADSEETERRNRDLKSGLHPLRHKLVLWYTRRTPGARSQSYEDNIKKIIDFSTVESFWVCYCHLARPSSLPSPTDLHLFKDGIRPLWEDPANQNGGKWIIRFKKAVSGRFWEDLVLVVVGDQLEYSDDVCGVVLSVRFNEDILSVWNRNASDHQAVMALRDSIKRHLKLPHSYLMEYKPHDASRRDNSSYRNTWLRG

SEQ ID NO: 2357 - protein, 556 aa, Zea mays
  VARIANT 65: note = Ancestral polymorphism is S, Derived polymorphism is I
  VARIANT 115: note = Ancestral polymorphism is S, Derived polymorphism is F
  VARIANT 186: note = Ancestral polymorphism is A, Derived polymorphism is T
  VARIANT 190: note = Ancestral polymorphism is A, Derived polymorphism is S
  VARIANT 194: note = Ancestral polymorphism is A, Derived polymorphism is T
  VARIANT 213: note = Ancestral polymorphism is A, Derived polymorphism is T
  VARIANT 225: note = Ancestral polymorphism is E, Derived polymorphism is V
  VARIANT 239: note = Ancestral polymorphism is R, Derived polymorphism is K
  VARIANT 277: note = Ancestral polymorphism is P, Derived polymorphism is L
  VARIANT 429: note = Ancestral polymorphism is E, Derived polymorphism is K
  VARIANT 442: note = Ancestral polymorphism is L, Derived polymorphism is P
  VARIANT 487..556: note = Derived polymorphism lacks residues 487 to 556
MSSRGPDPAPPGEEQETAEELLERVRGMVPAAAAAARAAGGFPGRWKAIAAKLDALPACLSDLSSHPCFARNSLCRELLQSVAATLADAAELAARCREPPADGKLRAQSAVDALSGRLDLGLRDCALLVKTGVLSDAAGPSPPPEEAPDVRELLARLQIGHAEARGRAVDALLDALRRDERGVLAALGRASVAALVQLLTASAPAVREKAATAVCQVAGSGAASEALLVSEGVLPPLVRLAESGSAVGREKAAATLHRLSASPDVARAVVGHGGAGPLVEICRTGDSVSQPAAAGALRNLSAVPEVRQALADEGVVRVMVGLLDRGAVVAGATKEHAAECLQNLTSGSDGLRRAVVSEGGLRSLLLYLDGPVPKEPAVGALRNLVGAVSPDSLVALGVLPRLVHVLKIGSVGAQQAAAAAVCRISSSAEMKRAVGEHGCVAPLVRMLEAKSNGAREVAAQALAALASCPANAREMKKDDKCVPSLVQLLDPSPANTAKKYAIACLLTLSGTKRCRKVMVSHGAIGYLKKLSDMDVAGAKKLHERLERGSLRSMFSR

SEQ ID NO: 2358 - protein, 98 aa, Zea mays
  VARIANT 81: note = Ancestral polymorphism is T, Derived polymorphism is I
MVNQKPLFPGDSEIDELFKIFRVLGTPNEQSWPGVSCLPDFKTAFPRWQSQDLATIVPNLEPAGLDLLSKMLRYEPSKRITARQALEHEYFKDLEMVQ

SEQ ID NO: 2359 - protein, 239 aa, Zea mays
  VARIANT 162: note = Ancestral polymorphism is R, Derived polymorphism is C
MAAGTVTARSNGEGHGHGGAGSWYPQRRPHYGYGGGSASFRGCCCCLFLLLTFLALLALAIALVVVLVVKPRKPQFDLDQVSVQYLLVASPTSPAGLPPATPGAAYISLNITLLFTAQNPNKVGIRYGATKFDVMYHGVPLGVAAVPGFEQPAHSTRLLQTRVIVDRFNVLQADAQDLIRDAAINDRVELRITGDVGAKILVLGFSSPKVQVSVDCAIAISPRSQSLKYKQCGVDGISV

SEQ ID NO: 2360 - protein, 237 aa, Zea mays
  VARIANT 188: note = Ancestral polymorphism is A, Derived polymorphism is G
  VARIANT 134: note = Ancestral polymorphism is S, Derived polymorphism is C
  VARIANT 128: note = Ancestral polymorphism is Y, Derived polymorphism is C
  VARIANT 60: note = Ancestral polymorphism is F, Derived polymorphism is S
  VARIANT 48: note = Ancestral polymorphism is E, Derived polymorphism is K
MSSLHATRAELGLVVLYLNKAEARDKICRAIQYGSKFVSNGQPGTAQEVDRSTTLARKVFRLLKWVNDLHALISPPAKGTPLTLVLLGKSKNALLSTFLFLDQFVWLGRTGIVKNKEATDRVARLSLYCWMASSACAGLVELGELKRLSRSMRKLARELRDTDKYENEQYQDKMRQSDERLLALVKAAMDVVVAVGLLQLAPKKVTPRVTGAFGFVTSLISCYQQLPSRAPVAKVKV

SEQ ID NO: 2361 - protein, 302 aa, Zea mays
  VARIANT 275: note = Ancestral polymorphism is P, Derived polymorphism is Q
  VARIANT 80..302: note = Derived polymorphism lacks residues 80 to 302
MIVDFPTEHWSEASIRRCFGACCEVAEVDLRCLTGDNFGPIRVLLELNHYLDLPSEIWVTTTDGVSRGGCIAQVLPLRVWPRADQLGPDGRLRRFFQHMPPPPAPPMLSEVPAALPHVPQQQNASPVRNAQQQANTTTSQTSSAFSTAQLLCLSAVLAQLTGPRTTETQSQLPPQQNTTPQSHCSSKRQPTSPTTFNATRHKRAGRPPRNNVPKPIQRKSSRLAAKANGNFVDMTNKAVRLKELRDTLQGCSTAVKGEVQKKGLLSRSMAPILIPALRRLVRAAGLGCSAANAVGVVPLAKE

SEQ ID NO: 2362 - protein, 392 aa, Zea mays
  VARIANT 254: note = Ancestral polymorphism is P, Derived polymorphism is T
  VARIANT 306: note = Ancestral polymorphism is E, Derived polymorphism is D
MASSLVSRPHLTQRPVRAATLASATRPRLVAGALGGRCQAQAAGDLDDAHYMRRCVELARKAAGHTSPNPMVGCVIVRDGRVVGEGFHPKAGQPHAEVFALRDAGNLAENATAYVSLEPCNHYGRTPPCTEALINAKVKEVVVGMTDPNPIVASKGIEKLQGAGISVRVGVEEALCRKLNEAYIHRMLTGKAFATLRATLSMNGIITNQIGKGADQSGGYYSQLMKEYDGVIISSDLAKMSALPLSREAGTNQPLCIIIAQGESSRLHIPSLSQEHASRAIVLADSPVTVEPAGVEVAVFRQIDLESILQLLAQRGLCSVLVDFREAGESFASLLNDFQEDKLVQKVVVEVLPFWLASDGLSNLAFGGSQSFPLKNLELRDVNGSVLLEGYV

SEQ ID NO: 2363 - protein, 250 aa, Zea mays
  VARIANT 22: note = Ancestral polymorphism is P, Derived polymorphism is S
  VARIANT 31: note = Ancestral polymorphism is C, Derived polymorphism is R
  VARIANT 126: note = Ancestral polymorphism is Q, Derived polymorphism is L
  VARIANT 143: note = Ancestral polymorphism is I, Derived polymorphism is V
  VARIANT 145..250: note = Derived polymorphism lacks residues 145 to 250
  VARIANT 188: note = Ancestral polymorphism is A, Derived polymorphism is D
MASESEACSWEPHLLHPNGTEPLHRIAVDYCPEACLHERHAGEIHVTYDDRGGARWRSCCRFLPGSAVATTIRAPAGDTSGLNYNIYLSSLEGSADQDEIDFEFLGHDKRAVQTNYYVGGNGGREQIHALPFDSSDGFHHYAIAWDAAAIEWRVDGELVRRDKRREGEPWPEKPMYLYASVWDASHIADGAWTGTYHGRDAPYVCSYKDVRVPTAEHSVEDAAHAPAGDPVAADAAAAAEEEKDAGAGEV

SEQ ID NO: 2364 - protein, 191 aa, Zea mays
  VARIANT 114: note = Ancestral polymorphism is M, Derived polymorphism is I
  VARIANT 112: note = Ancestral polymorphism is V, Derived polymorphism is A
  VARIANT 109: note = Ancestral polymorphism is E, Derived polymorphism is D
  VARIANT 107: note = Ancestral polymorphism is I, Derived polymorphism is V
  VARIANT 102: note = Ancestral polymorphism is G, Derived polymorphism is E
  VARIANT 97..191: note = Derived polymorphism lacks residues 97 to 191
  VARIANT 20: note = Ancestral polymorphism is L, Derived polymorphism is P
  VARIANT 19: note = Ancestral polymorphism is A, Derived polymorphism is T
  VARIANT 17: note = Ancestral polymorphism is A, Derived polymorphism is V
MCLRRRAIQMLLDVSFAYALDVLFLESPSLSPGRPRWIPRLSLADAQVADVVHGELGLNFVLEQNTLKSIEIELTEEMAPNLLQTDMVMQFGLLVFQVLNFGDQGKIQEAMVQMHIREEETVICIYGQNLDFVLVEVSLNNMVPETSTNYDLLNHILNELRVPLIAICSYDDEVALSKYMNLATWVHASMC

SEQ ID NO: 2365 - protein, 85 aa, Zea mays
  VARIANT 48: note = Ancestral polymorphism is C, Derived polymorphism is S
  VARIANT 70: note = Ancestral polymorphism is S, Derived polymorphism is R
MHPGAILDCCFHDDSSGFSAGADHTIRRLVLSSSKEDVLGRHDGPVRCVEYSYAADTFISMDLLLDFFSSVSFSSARYFCSLMQL

SEQ ID NO: 2366 - protein, 493 aa, Zea mays
  VARIANT 333..493: note = Derived polymorphism lacks residues 333 to 493
MAANVALVLLSSCSPSTSAAAASLLPRRRFLPSRRRRASSRATTIMSALGDDPIREWILTEGKATQIKGIRSIGGGCINSAQRYDTDAGPFFVKTNSRIGPEMFEGEALGLKAMYDTKSIRVPLPYKVGSLPTGGSFIIMEFIEFGRSRGDQSDLGRKLAEMHKAAKSDKGYGFPVDNTIGSTPQINTWTDDWIEFYSKHRLGYQLELASRRYGDSAILEKGQRLIKNIRPLFDGAVIEPCLLHGDLWSGNISSDSNGDPVILDPACYYGHNEAEFGMSWCAGFGGDFYNAYFQCMEREEEQEAGTGTGTAQALLGRRVRADTRHPVYRGIRYRGGKWVSEIREPRKSSRIWLGTYPAPEMAAAAYDTAALALRGAEAALNFPGAALSRPVPASRSPDDIRAAAASAARSQSPQVGGEAAAAAGGGGGGASTSWSGAGADAQGPAPERRAGDRSIVDEDDVFQVPRLLAGMAEGLMMSPPRLAGAALLEEDVV

SEQ ID NO: 2367 - protein, 462 aa, Zea mays
  VARIANT 338: note = Ancestral polymorphism is M, Derived polymorphism is K
MAAGSGGGGGGSLLLRGFLSLFFLLFLHIGHGGSCCFSPGAAARAQQEEDEAAEADGKVVGGGGGSNKRRKISPLIFSPAASSTAVTASDDSAGAPRRHVSSLAASLRLYLHRIFRSGSTGTKNGGTVVAGRDGEEEAVATTVSSPIAQSLPHQPSSTSVVLSTPSSPCAWSSPLMMSPLSVRSLSATPFPSSPQQKLLQASRQSFRSFAARGDVFPCKVCGEVLGRPQLLELHQAMKHSLSELTHLDSSLNIIRMIFLAGWRPAASGAGAGAGAGEAPAVRRVLRIHHNPRALARFEEYRDLVRARAARRCGGEGAVVEERCIADGNERLRFHCSTMLCSLGGGVCGSPYCCVCSTLRHGFAGKQADVDGIATYASAWTAHASLPADVEREFAFLQVRRAMLVCRVVAGRVARGPADDKVAYDSMVPVRGGVGGGTGDDVELLVYNPRAVLPCFVILYSSS

SEQ ID NO: 2368 - protein, 452 aa, Zea mays
  VARIANT 96..452: note = Derived polymorphism lacks residues 96 to 452
  VARIANT 273: note = Ancestral polymorphism is R, Derived polymorphism is G
  VARIANT 280: note = Ancestral polymorphism is G, Derived polymorphism is E
  VARIANT 438..452: note = Ancestral polymorphism lacks residues 438 to 452
MSQTGEAQVPLLQTQEADAEWSSKPRRIALFVEPSPFALVSAFSSRPFSAASQIRVDRIGVYISGYKNRFQNFIKHLREMGDEVLVVTTHKGAPEEFHGAKVIGSWSFPCPLYQNVPLSLALSPRIFSEVNKFKPDIIHATSPGIMVLGALAISKMISVPMVMSYHTHLPAYIPRYNLNWLLEPTWSFIRCLHRSADLTLVPSVAIAEDFETAKVVPANRIRLWNKGVDSESFHTKYRRHEMRVRLSGGEPEKPLVIHVGRFGREKNLDFLKRVMERLPGARIAFVGDGPYRSELEKMFTGMPAVFTGMLQGEELSQAYASGDVFAMPSESETLGQVVLESMASGVPVVAARAGGIPDIIPKDKEGKTSFLFTPGDLDECVRKIEQLLSSKDLRETIGMAAREEMEKCDWRTASKKIRNEHYSTAISYWRKKMGKTNQTSLFQDSSVAALSN

SEQ ID NO: 2369 - protein, 197 aa, Zea mays
  VARIANT 140: note = Ancestral polymorphism is G, Derived polymorphism is E
  VARIANT 99: note = Ancestral polymorphism is A, Derived polymorphism is T
  VARIANT 68: note = Ancestral polymorphism is P, Derived polymorphism is S
MEPGAKSEAKQGEAGSGAGESGSGKVYHERQRLQFCLLHALNNLMQEKECFTRAELDGIAGNLVLNDPNKGQWTPLPFIFKPHHNVITGNYDVNVLITALEARNKKVVWHDRRKGASSVDLNAETLVGLVINVPIRRFRGLWTGRHWVAIRRIDGIWFNLDSDLSEPKQFKDQENVIGFLDSVLSQGGELMVVLQGE

SEQ ID NO: 2370 - protein, 96 aa, Zea mays
  VARIANT 35: note = Ancestral polymorphism is E, Derived polymorphism is K
MAPKKDEASPPSSKPAKSGGGKQKKKKWSKGKQKEKVNNAVLFDQATYDKLLSEVPKYKQITPSVLSERLRVMYITFSASHGGNYVSIPDDRASIW

SEQ ID NO: 2371 - protein, 359 aa, Zea mays
  VARIANT 152..359: note = Derived polymorphism lacks residues 152 to 359
MSDALINGLAGAGGGIIAQLLTYPLQTVNARQQTERDPSKPAFKDGAARQLYLVVKNEGWERLYGGLMPSLVGTAASQGVYYYFYQIFRNRAEARALERSRRGLGDGSVGMLQSLTVAALSGCVNVLLTNPIWVVVTRMQTHRKANKQQRPQGLNCALDKPLEAATAENAPYKTIDVVSTTLVGRDTLFMINFQELYKESGVLGFWKGVIPALIMVSNPAIQFMLYETLLKKLKKRRASNFKGADGLTALEIFLLGAVAKLGATVVTYPLLVVKARLQAKHMINDDKRHRYKGTLDAFTKMVRYEGLSGMYKGMGTKIVQSVFASALLFMIKEELVKGARLLVTGNTSLVKKLPSKSSR

SEQ ID NO: 2372 - protein, 591 aa, Zea mays
  VARIANT 385: note = Ancestral polymorphism is P, Derived polymorphism is S
MGGEAEGGERRLGRVLSFGIPDTALGLVMGYVEDPWDRDAISLVCRHWCRVDALSRKHVTVAMAYSTTPERLFGRFPCLESLKLKAKPRAAMFNLISDDWGGSASPWIRQLSATFHSLKKLHLRRMIVSNDDINTLVRAKAHMLVSLKLDRCSGFSTPSIALIARSCRKLETLFLEESMIDEKENDEWIRELATSNSVLETLNFFQTDLRASPEYLTLLVRNCQRLKTLKISECFMPDLVSLFRTAQTLQEFAGGSFEDQGQPVAGRNYENYYFPPLLHRLSLLYMGTNEMQILFPYAAALKKLDLQFTFLSTEDHCQIVQRCPNLETLEVRDVIGDRGLQVVAETCKKLQRLRVERGDDDQGGLEDEQGRISQVGVMAIAQGCPELTYWAIYVSDITNAALEAVGTCSRNLNDFRLVLLDREAHITELPLDNGVRALLRGCTKLRRFAFYVRPGVLSDVGLGYVGEFSKSIRYMLLGNVGESDNGIIQLSKGCPSLQKLELRGCLFSEHALAMAALELKSLRYLWVQGFRSSPTGTDLMAMVRPFWNIEYILPDQDEPCPEYKKQILAYYSLAGRRTDCPPSVTPLYPAV

SEQ ID NO: 2373 - protein, 1187 aa, Zea mays
  VARIANT 741..1187: note = Derived polymorphism lacks residues 741 to 1187
  VARIANT 778..1187: note = Derived polymorphism lacks residues 778 to 1187
  VARIANT 786..1187: note = Derived polymorphism lacks residues 786 to 1187
MASGQDSSGTTLMDLITSDPSATSTAGASSQQQSSSGVGSAGGSLLGKPVAPAADRKSKKGTLMQIQNETISAAKALNPVKVLPQRNRKKKAPRLLRTAGPEHPRARRDVRPGSSGCCFGLKSSQRQLVNSVFPKLAVYNSVDPSVAPSLLMLHQQCEDRNVLRYVYYYLARILSDNGSQGLSAAGGIPTPNWDALADIDAVGGVTRADVVPRIVDQLSAESSSDDVEFHARRLAALKALTSCSTSSSEMMEKLNEIVFGILEKVADTKQKRKKGIFTKQGGDKESIIRGNLQYASLSALRRFPLDPGNQAFLHRAVQGIEFSDPVAVRHALSIISEIAAKDPYSVAMALGKSAQPGGALQDILHLHDVLARVYLAKLCHSISRARVLDQRPDIKSQYSSLLYQLLLDPSDRVCFEAINCVLGKVDNTESTEDRAGGWIQLTREILKLPEAPSVASKGVLAKSSEKSSKARRPQPLIKLVMRRLESSFRSFSRPVLHAAARVVQEMGKSRAAAFALGAYDEGASLDVGSLDSDFENPMAEGTRKQNPLSNGHGGTDTIAGLLASLMEVVRTTVACECVYVRAMVIKALIWMQNPHESFEELKSIIACELSDPAWPSSLLNDVLLTLHARFKATPDMAVTLLEIARIFATKVPGKIDADVLQLLWKTCLVGAGPDGKHTALEAVTIVLDLPPPQPGSMSGLTSVDMVSASDPKSAMALQRLVQAAVWFLGENANYAASEYAWESATPPGTALMMLDADKMVAAASSRNPTLASALTRLQRCAFSGSWEIRIAAVQALTTIAIRSGEPYRLQIYEFLHALALGGVQSNFSELQLSNGENQGASGTGLGSLISPMLKVLDEMYRGQDDLARDIRQHDNSKQEWSDEELKKLYETHERLLDFVSLFCFVPRAKYLPLGPTSAKLIEIYRNRHNISASGGLSDPAVATGISDLMYESKEVHKETNTVQSGIDPDLAMAWAAGLEDDVWANNAPAVDKVKDFLAGAGTDAPDVDDEEYMNSRPSVGYDDMWAKTILETYDAEEDDGRYSGGSSPESTGSVETSISSHFGGMNYPSLFSSKPSSHGASQQTIREEPPSYSTSVLQRKESFENPLGGGGGRSFGSHEDEDKSSGNPQSGKALYDFTAGGDDELSLNSGEEVEIEYEVDGWYYVKKRRPGRDGKMAGLVPVLYVSS

SEQ ID NO: 2374 - protein, 135 aa, Zea mays
  VARIANT 5: note = Ancestral polymorphism is G, Derived polymorphism is S
  VARIANT 15: note = Ancestral polymorphism is F, Derived polymorphism is L
  VARIANT 17: note = Ancestral polymorphism is S, Derived polymorphism is C
  VARIANT 41: note = Ancestral polymorphism is G, Derived polymorphism is S
MGRSGGETAGKRQQFGSMEEFWGFYLSQHSKPGTRRWHFLGTLASLACAVLAAATGRAAVLLAGPILGYGMAWYSHFFLEGNRPATFGHPVWSFLCDLRMFLLILTGRIDAELARLRVRPTAESTDAAAASAHHD

SEQ ID NO: 2375 - protein, 234 aa, Zea mays
  VARIANT 39: note = Ancestral polymorphism is A, Derived polymorphism is T
  VARIANT 46: note = Ancestral polymorphism is H, Derived polymorphism is Y
  VARIANT 65: note = Ancestral polymorphism is L, Derived polymorphism is F
  VARIANT 66: note = Ancestral polymorphism is V, Derived polymorphism is M
  VARIANT 91: note = Ancestral polymorphism is R, Derived polymorphism is T
  VARIANT 107: note = Ancestral polymorphism is V, Derived polymorphism is G
  VARIANT 108..234: note = Ancestral polymorphism lacks residues 108 to 234
  VARIANT 161: note = Ancestral polymorphism is P, Derived polymorphism is S
  VARIANT 184: note = Ancestral polymorphism is Y, Derived polymorphism is S
MAAAARPSNGWCLYSPPFKASLPSPHEGWVVGSVEQGGALRGSEGYRRWPVHVSSAGKLQHNLLLVQVSSPDFLKSLQAACSPIFASLIWRVLEGLGAVVKVIRSWVSSSLSIFMEEDDLRMAVKEIICDSETGRQEYEEAVIAITVEQSLKRYCQRIRRPDFWGGESEFLVLSRLCRQPIIIYIPEREYHGRGNGFIPIAEYGLEFTKNTKQWKKKTPVRLLYSGRNHYDLLV

SEQ ID NO: 2376 - protein, 222 aa, Zea mays
  VARIANT 16: note = Ancestral polymorphism is V, Derived polymorphism is M
  VARIANT 17: note = Ancestral polymorphism is I, Derived polymorphism is M
  VARIANT 19: note = Ancestral polymorphism is Y, Derived polymorphism is D
  VARIANT 25: note = Ancestral polymorphism is K, Derived polymorphism is N
  VARIANT 41..222: note = Derived polymorphism lacks residues 41 to 222
  VARIANT 51: note = Ancestral polymorphism is M, Derived polymorphism is T
  VARIANT 52: note = Ancestral polymorphism is G, Derived polymorphism is C
  VARIANT 60: note = Ancestral polymorphism is C, Derived polymorphism is Y
MRFQGLNVTNYASLVMMGYYGKSIKDLALARIPAVSLESLQIEECSKVTLTGILAFFLNCSPKFKSLSLSKCIEIKDICSASAQLPVCKSLRSLAIKDCSGFTDTSLPMVGMFCPQLENINLSGLSAVTDNGFLPLMKSSDSGLVDIDLNSCENLTVTDAAVSALVKDHDASLATSLTMMQACSPSVRVAASSSSSTFRTAWSMTTMARSWKRRSSSGCVAV

SEQ ID NO: 2377 - protein, 352 aa, Zea mays
  VARIANT 220: note = Ancestral polymorphism is P, Derived polymorphism is L
  VARIANT 148..352: note = Derived polymorphism lacks residues 148 to 352
  VARIANT 58: note = Ancestral polymorphism is G, Derived polymorphism is W
  VARIANT 54..352: note = Derived polymorphism lacks residues 54 to 352
  VARIANT 16: note = Ancestral polymorphism is I, Derived polymorphism is S
  VARIANT 8: note = Ancestral polymorphism is E, Derived polymorphism is G
MSVQEYLGKHLLSRKSEEALNTAVRAKAPDPALFIVGHMRREAPTVITRVRARQILDGRSAPAVEVELHTNKAVHRASTASVGALEGAAADAAGASERRKFLARGVAYAVRVINDKVSEALVGMDPQQQAQIDQAIMDLTRRATDFIQMEIDMILCEMQAELGANTMLAVSIAACKAGAAEKEVPLYKHIADLVGKSATTLPVPANTVINGGKHAGNGLPIQEIMILLVGAMNFEEAMQMGSETYHHLKDIILEKCGSDSCNIGDHGGFAPNISRQVAWDDLLMSDPERIKRAANQVGTVTEAIEVVKQANDAHWGVMVSHRSGDTEDSFIADLAVGAAAGQIKASVPCRGV

SEQ ID NO: 2378 - protein, 151 aa, Zea mays
  VARIANT 111: note = Ancestral polymorphism is R, Derived polymorphism is L
MSVQEYLGKHLLSRKSEEALNTAVRAKAPNPALFIVGHMRREAPTVITRVRARQILDGRSAPAVEVELHTNKAVHRASTASVGALEGAAADAAGASERRKFLARGVAYAVRVINDKVSEALVGMDPQQQTQIDQAIMHLTGRATSQFRGSM

SEQ ID NO: 2379 - protein, 159 aa, Zea mays
  VARIANT 28: note = Ancestral polymorphism is G, Derived polymorphism is D
MSLIRRGNAFDPFSLDLWDPFEGFFPFGSGGVRSLVPSLPRTSSETAAFAGARIDWKETPEAHVFKADVPGLRKEEVKVEVEDGNVLQISGERNKEHEEKNDRWHRVERSSGKFLRRFRLPDNAKADQIKASMENGVLTVTVPKEEAKKADVKNVQITG

SEQ ID NO: 2380 - protein, 212 aa, Zea mays
  VARIANT 172: note = Ancestral polymorphism is A, Derived polymorphism is V
  VARIANT 38: note = Ancestral polymorphism is P, Derived polymorphism is L
MSPSAAPPTHQPTSPNPQSPNAGRAPARDLKKAEARVPAWGERSKDGTLNRVRVAPTGVTAVHPQASMAFAGGPPTTRPNARSQPARAPHLPPGMRTTANAARATTAHMPTPHTTTEEPDPPLLADARLSPRPQRSLGREGRGGEEESATHSAYTSPKPTPLPTQTPPAASATRPCPLARCRQNAVEALAGPAALEKGRGGGGPDGVQLHVA

SEQ ID NO: 2381 - protein, 119 aa, Zea mays
  VARIANT 64..119: note = Derived polymorphism lacks residues 64 to 119
MPARGRAVLLWLLQAAGCRGAGVMLRGAGRRQDRRLLVPSPARQGRPGPRRHSGGSGRGDMGAWRWRQVGSSEETLLGLYQAGGDGFSTSFLLLEGAAQETSSLCVRPCCGGSLSLRLV

SEQ ID NO: 2382 - protein, 460 aa, Zea mays
  VARIANT 276: note = Ancestral polymorphism is D, Derived polymorphism is G
MRKLCPNLERDDALDTVLEVPIPEEMFSGGGGSRGSTRFGCTNVKAWMRSHAADRSGAGEPCSMTRGELQLMLGVIGAPLIPLPVYHANQSPCSVLCEQLKADPIESSSAKYIVQQYIAASGGEWALNKVKSMYAMGKVRMTAAELNSSDADGHGGSTGNGHHRGGKKGSKGGGGGGEIGGFVLWQKKPELWCLELVVSGCKISAGSDGKVAWRQTPWHQSHASRGPPRPLRRSLQVRSVRPASAAARFRGLDPQLTASLFADSVCIGERSIDGEDCFVLKVEAEASSLRARNSSSVEIIRHTVWGYFSQRTGLLVQLEDSHLLQIRSSGGGAGGSVFWETTMESRLGDYRAVDGVNIAHAGRTAVSLVRFGDCQDGNTRTRMEEEWNIEEVDFNIWGLSMDCFLPPSDLREGKESQDVAVVKADARPPPLRIPAVTVRVGPSQVAAVNMDDSDSLVARS

SEQ ID NO: 2383 - protein, 514 aa, Zea mays
  VARIANT 383: note = Ancestral polymorphism is G, Derived polymorphism is V
  VARIANT 18: note = Ancestral polymorphism is F, Derived polymorphism is S
MSPRTERRSGLMKWLCRFLKGPKPGEPSRRRPQVAAGEGEGALWHQRPARPKIDPPRNENEELVDRAIAEPLAEAVKPPREKTHRGEDSNDDEDLTRAVQDSLNMNPYTPYNPYPPSQAQPIGHRVCGGCKHEIGRGHYLSCMGIYWHPQCFRCRSCGHLIRETEFTLLGTDSYHKLCYKELHHPKCDVCLQFVRPRVLGKPERSALQTVINCIPTNGSGLIEYRAHPFWGQKYCPSHERDRTPRCCSCEKMEVQPRNTKYMSLGDGRGLCMECLGSAVMDTSECQPLYHSIRDYYEGMDMRLDQQIPVLLVERQALNEAMEGESKGPHHMPETRGLCLSEERTVSSILRRPRIGGNRLLGMRTRPQKLTRRCEVTAILVLYGLPRLLTGSILAHELMHGWLRLKGYRNLNAEVEEGICQVMSYLWLESEILPSSSRHAQPSSSSSSSSYPATSSEKGGISHTGKKLGEFFMHQIANDTSTAYGDGFRTAYAAVNKYGLRQTLSHIRLTGGFPV

SEQ ID NO: 2384 - protein, 581 aa, Zea mays
  VARIANT 302..581: note = Derived polymorphism lacks residues 302 to 581
  VARIANT 252: note = Ancestral polymorphism is Y, Derived polymorphism is S
  VARIANT 250: note = Ancestral polymorphism is Y, Derived polymorphism is N
MEAHASRGRRTLEEIRQKRAAERMQHAVPIAASHVDSHGNQRAGAEHLARVQELENGNTELERENKMLLSKIAEKEVEKDALVNRLNDLERNVVPSLKKSLNDIYLEKDAAVVAKEDALAQLRSMKKRLKEAEEEQYRAEEDSASLRAQLNTLQQQMGHTYSGYTMGTSSEESVAMEKEIQDLQAQLKQESLLRQQEQQQLAEQSQLRQQEQEKLAKEQTRIASLEAEKQQLEDQITMLTKKATGMEDTYTYIILSFIYVRNVRTCRRYNDEDEQLNTSPVRSQPKQKTHANSGGGLGFVLSNSGFFPDSIAMLNVFDYFTIHTIVALLPHASISMVLQSHNSQMNTPFGVLLEQKASRSYLPGCSIRLVLLTYGHLPILEDASEFAARKAFSMQDREKLEQQLHDMALMIERLEGSRQKLLMEIDSQSSEIEKLFEENSALSASYQEAIDVTVQWENQVKFQVRDCLKQNEELRSHLEKLRLEQVSLLKVSNIATQSDGQTENSISNPPQMVIENISLKDQLIKEQSRSEGLSAEIMKLSAELRKAVHAQNNLARLYRPVLRDIESNLMKMKQETYATIQ

SEQ ID NO: 2385 - protein, 760 aa, Zea mays
  VARIANT 244..760: note = Derived polymorphism lacks residues 244 to 760
MGDGASGRGGRSGAGRRVGEYELLRPIGSGAYSQVWLGRHRVRGTEVAVKEIAMERLSKKLRESLLSEVDILRRIRHDNVIALHDSVKASDFVNHQPPSPLSLLSFYHNLIFLAASGLKMLRDNNVVHRDLKPQNILLVENNENTLLKIADFGFAKFLQPFALAETLCGSPLYMAPEVMQGQKYDAKADLWSVGVILYQLVTGIPPFNGDNQIQVFLLLSDNFSMYDLDLNTSANGKIYLFAFQLLKNILRTHEIRLPSDCELSHDCIDLCRKLLRLNSVERLTVEEFVHHPFLSEHAPERTLSRTLSEIRDGFPINNISPTRPSSQSSQEDCMPFPLDDESSGQDEGPIPDSKSPMKSYGFPTGKRLDKTSGQSPSKHTSLFSRYVLGNNHAPSSQHHGHTDKMTKESKIHEVQGPKGVYPEGMEVISSAIPHFYYEQSLLKLLFHYFVNVDSPIIDSLEFVDQEYVFVSGPHPEGSSSSTNASQQLNLPAKYDNLSVSPPKLTFLSAPMPINGLPINRQQSAGTGSFDSHYSPASVISQGSADISDAMDQPPSDYLTRIRLLEQYASAIAGLVRDEIKGGRHLVAFSIQLIVLATWKQAIHLCNTFVASLARESPSQDIHMKGLSADASHLLANSKLADDVCVQIEKQFLSEVEYAEELASTVGQIADGTEMPDAIEMIFQSALLTGRRGGVDEMFGKAADAMTGYTRAVSMLRFLLIEAPSLALNPPLTLTRSDRHRLRTYIEALNTRLCQMQSQRH

SEQ ID NO: 2386 - protein, 475 aa, Zea mays
  VARIANT 195: note = Ancestral polymorphism is M, Derived polymorphism is I
MARKHQHVAIFTTACLPWMTGTAVNPLFRAAYLAKAGDWEVTLVVPWLSKGDQELVYPNKMRFSLPAEQENYVRRWLEERTGLLPKFDIKFYPGKFSTEKRSILPVGDISQTISDDKADIAVLEEPEHLTWYHHGRRWKSKFQKVIGVVHTNYLEYVKREKNGYISAFILKHINSWVTDIYCHKVLPSFQAIGKMVIRLSAATQDVPRSVICNVHGVNPKFIEIGKLKHQQLCQREQAFFKGAYYIGKMVWSKGYTELLQLLHKHQMELSGLKMELYGSGEDADEVKASAERLSLDIRVYPGRDHGDSIFHDYKVFINPSTTDVVCTTTAEALAMGKIVICANHPSNVFFKRFPNCHMYNTDEEFVRLTMKALAEEPIPLSDDLRHELSWEAATERFIRVADIAPTVPVGQPPPSSQHFMRISPDELQKNMEEASAFFHNTISGFEAVRCVFGAIPNTLQPDEQQCKELGWNLQG

SEQ ID NO: 2387 - protein, 361 aa, Zea mays
  VARIANT 295: note = Ancestral polymorphism is G, Derived polymorphism is A
  VARIANT 207: note = Ancestral polymorphism is G, Derived polymorphism is A
  VARIANT 148: note = Ancestral polymorphism is V, Derived polymorphism is E
  VARIANT 102: note = Ancestral polymorphism is G, Derived polymorphism is V
  VARIANT 65: note = Ancestral polymorphism is K, Derived polymorphism is N
MKALILVGGFGTRLRPLTLSVPKPLVDFGNKPMILHQIEALKEVGVTEVVLAINYQPEVMLNFLKDFESKLGIKITCSQETEPLGTAGPLALARDKLADGSGDPFFVLNSDVISEYPFAELIEFHRAHGGEATIMVTKVDEPSKYGVVVMEEGTGKVERFVEKPKAFVGNKINAGIYLLNPSVLGRIELKPTSIEKEVFPRVAADGALFAMVLPGFWMDIGQPRDYITGLRLYLDSLRKKAPARLASGAHVLGNVLVHETAVIGDGCLIGPDVAVGPGCVVEAGVRLSRCTVMRAARVKQHACVSSSIIGWHSTVGKWARVENMTILGEDVHVCDEIYSNGGVVLPHKEIKSSILKPEIVM

SEQ ID NO: 2388 - protein, 273 aa, Zea mays
  VARIANT 154: note = Ancestral polymorphism is I, Derived polymorphism is V
  VARIANT 45: note = Ancestral polymorphism is G, Derived polymorphism is R
MATVETSGTAIGSSGRWALHGKTALVTGGTRGIGRAVVEELAALGAAVHTCSRKAEELGERIKEWEARGFSVTGSVCDLSERDQRERLLREVADRFGGKLNILVNNVGTNIRKPTTEFTAEEYSFLMATNLESAYHLCQIAHPLLKLSGSGSIIFISSVAGAIGIFSGTIYAMTKGAINQLTKNLACEWAKDNIRANSVAPWYITTSLTEGILANKNFEEQVVSRTPLGRVGEPGEVSALVAFLCMPGSTYISGQTIAVDGGMTVNGFYPPKP

SEQ ID NO: 2389 - protein, 367 aa, Zea mays
  VARIANT 33: note = Ancestral polymorphism is K, Derived polymorphism is N
  VARIANT 77: note = Ancestral polymorphism is F, Derived polymorphism is S
  VARIANT 132..367: note = Derived polymorphism lacks residues 132 to 367
MEQYEKVEKIGEGTYGVVYKALDKATNETIALKKIRLEQEDEGVPSTAIREISLLKEMNHGNIVRSAAPALPSSIIFPLLHCCYYDGFRVDRSADASAIDRFAGRSKWAVVPGSFMQQWVGVVLGRDSFIDGNGGAGVLHDVVHSEKRIYLVFEYLDLDLKKFMDSCPEFAKNPTLIKSYLYQILHGVAYCHSHRVLHRDLKPQNLLIDRRTNALKLADFGLARAFGIPVRTFTHEVVTLWYRAPEILLGARQYSTPVDVWSVGCIFAEMVNQKPLFPGDSEIDELFKIFRILGTPNEQSWPGVSCLPDFKTAFPRWQAQDLATVVPNLDPAGLDLLSKMLRYEPSKRITARQALEHEYFKDLEVVQ

SEQ ID NO: 2390 - protein, 131 aa, Zea mays
  VARIANT 59..131: note = Derived polymorphism lacks residues 59 to 131
  VARIANT 53: note = Ancestral polymorphism is A, Derived polymorphism is D
MLNPRSAERLTAHEVLCHPWIRDHGVAPDRPLDPTVLSRIKQFSAMNKLKKMALRVIAESLLEEEIAGLKEMFQTMDTDNSGAITYDELKQGLRKYGSTLKDTEIRDLMDALQTTWILKLYIKNHICDLCQ

SEQ ID NO: 2391 - protein, 558 aa, Zea mays
  VARIANT 43: note = Ancestral polymorphism is D, Derived polymorphism is G
MVPVSDTALLTTSTPLPTPSPGPPPARAPQSLAPYAVIYLAIDFATSNTVCHTSLLQVFEKRNIIMVIMQSSDSSHNGSHNGIVENSPYRIPYDRHAEGDQLGASWYFSRKEIEENSVSRRDGIDLKKESYLRKSYCTFLQDLGMRLKVPQVTIATAIVFCHRFFLRQSHAKNDRRTIATVCMFLAGKVEETPRPLKDVILLSYEIIHKKDPAAVQRIKHKEVYEQQKELILLGERVVLVTLGFDFNVNHPYKPLVEAIKKFEVAQNALAQVAWNFVNDGLRTSLCLQFKPHHIAAGAIFLAAKFLKVKLPSDGEKVWWQEFDVTPRQLEEVSNQMLELYEQNRVQPPPSQGNDTEGSSVTAVNQRALGKVPGVVDEPPAHEHNQATRQSSQQNMSGHHGYDHPHPEKRNYRVPPNEARDDSANSSEGPNVSASMMDAMKKINKDKVKAALEKRRSKGDLSRKVDVMDDDDLIERELEHGVELAVEDEKVKQERRQSWPHPSHRVDHRSTDRENTEEGELSMDSQEHHSPEHDNRKRKDAHEHRNYDRDERDLKRLRS

SEQ ID NO: 2392 - protein, 158 aa, Zea mays
  VARIANT 54: note = Ancestral polymorphism is P, Derived polymorphism is S
  VARIANT 49: note = Ancestral polymorphism is G, Derived polymorphism is W
  VARIANT 12: note = Ancestral polymorphism is C, Derived polymorphism is F
MEMKVAASRPGCKKRPPSRLQKHAPASLQLEQAVASAGTGAPPAVWGDGRAPIPLLSPLVVSPMVPVWEADQTGGARKEGGGDQAEGRSGAEQQQRGAAARHGSSGEHQVHDVTPRPSAPALGMGWRHPAMSTPVAEPASLVPLFQSQCALEVRNSQQ

SEQ ID NO: 2393 - protein, 385 aa, Zea mays
  VARIANT 314: note = Ancestral polymorphism is M, Derived polymorphism is K
  VARIANT 303: note = Ancestral polymorphism is S, Derived polymorphism is P
  VARIANT 186..385: note = Derived polymorphism lacks residues 186 to 385
MAGDRLSWAGLLKWSLSYVDGAGPSRAVREEERRWLADAVEQHMMMDVVSRMREIALLMSTPPAVLEAQGITHDDIEDLLSELQVHVESIDMANDLHSVGGLVPVIKYLRNSNARIRAKAADVVTTVVQNNPTSQQLVMEASGFEPLLSNFRSDPDLTARIKALGALSSLIRNNKPGVSAFRLANGYSGLRDALNSESARFQRKALSLTHYLLSESHSDCSVFAQLGFPHLMMRLASSDDSGVREAALGGLLELARDTTLGNRNLLAEHDRLRRLLRGRMESIRTMTPEDLDAAREERQLVDSLWITCYHEPSMLRNEGLLVLPGEESFEQPPDVAGRLFEPMRRASARRAPPAERSDPRDETGGGMVLLLGGPAQDGRSNSPNH

SEQ ID NO: 2394 - protein, 278 aa, Zea mays
  VARIANT 9..278: note = Derived polymorphism lacks residues 9 to 278
  VARIANT 20: note = Ancestral polymorphism is S, Derived polymorphism is F
MASSPVSYWCYSCSRFVRVSPSTVVCPECDGGFLEQFTQPPPRGGGGSGRRGTMNPVIVLRGGSLSGFELYYDDGAGEGLRPLPGDVQHLLMGSGFHRLLDQFSRLEAAAPRPPASKAAVESMPSVTVAGGGAHCAVCQEAFEPGAAGREMPCKHVYHQDCILPWLSLRNSCPVCRQELPAAATPDAEADAGLTIWRLPRGGFAVGRFAGGPREQLPVVYTELDGGFSNGVGPRRVTWPEGDGQVDGGEGRIRRLLRNLFGCFGHGSWPASSSQSRSG

SEQ ID NO: 2395 - protein, 454 aa, Zea mays
  VARIANT 20: note = Ancestral polymorphism is P, Derived polymorphism is L
  VARIANT 383: note = Ancestral polymorphism is R, Derived polymorphism is K
MEMEPILLLCLSLLAHGAEPACREARFTGTVLPLMRVQQLVLPPTTHSPPPNRLRFRHDVSLTVPVAVGAPPQNVTMVLDTGSELSWLRCNGSRVPSTPPPQAPAAFNGSASSTYAAAHCSSPECQWRGRDLPVPPFCAGPPSNSCRVSLSYADASSADGILAADTFLLGGAPPVRALFGCVTSYSSATATNSSDSEAATGLLGMNRGSLSFVTQTATLRFAYCIAPGDGPGLLVLGGDGAALAPQLNYTPLIQISRPLPYFDRVAYSVQLEGIRVGAALLPIPKSVLAPDHTGAGQTMVDSGTQFTFLLADAYAPLKGEFLNQTSALLAPLGESDFVFQGAFDACFRASEARVAAASQMLPEVGLVLRGAEVAVGGEKLLYRVPGERRGEGGAEAVWCLTFGNSDMAGMSAYVIGHHHQQNVWVEYDLQNGRVGFAPARCDLATATQRLRARA

SEQ ID NO: 2396 - protein, 297 aa, Zea mays
  VARIANT 258: note = Ancestral polymorphism is H, Derived polymorphism is Q
MSFVFRGSRTDIEAGGFPGFAPERRAMRIHAGSRPVNSNSLAFLLTVLVLFMVLNSHQISPNLLVSFRAQWSVRGVHESIELWLVLGVFLMATSLRMYATCQQLAHAAAANSFLGHTELRVHVPPSITLATRGRLQSLRLQLALLDREFDDLDYDTLRALDADNSPHAPSMSEEEINSLPVFKYKVQAQQRHPPARKSDGPSQLSVSSTGSGNEEKQDGLKADGTSKPSEDELTCSVCLEQVTVGDLLRSLPCLHQFHVNCIDPWLRQQGTCPICKHQVSDGWHATGNGEEDASYMV

SEQ ID NO: 2397 - protein, 231 aa, Zea mays
  VARIANT 51..231: note = Derived polymorphism lacks residues 51 to 231
  VARIANT 100: note = Ancestral polymorphism is R, Derived polymorphism is Q
  VARIANT 114..231: note = Derived polymorphism lacks residues 114 to 231
  VARIANT 145: note = Ancestral polymorphism is C, Derived polymorphism is F
  VARIANT 179: note = Ancestral polymorphism is R, Derived polymorphism is W
  VARIANT 184..231: note = Derived polymorphism lacks residues 184 to 231
MTKRCTNLACGMLPSMVGIGGRVGRCRLQLLGAFHSRPSPPSYPLRPSLPQSSAVIAVSNSCNIVDLHQRGVYSDVETLGTAVEPARRFTIYLVGPHRMRQGGGERDDAENQRWPPWLKPLLGTSFFSQCKLHEDAHKSECNMYCLDCMNGSLCSQCLAYHRDHHAIQIRRSSYHDVIRVSEIQKVLDISGVQTTCIGLLPGSFYCRLSIASVVSTLTASYACTFSNTMGF

SEQ ID NO: 2398 - protein, 115 aa, Zea mays
  VARIANT 18: note = Ancestral polymorphism is R, Derived polymorphism is C
  VARIANT 35..115: note = Derived polymorphism lacks residues 35 to 115
  VARIANT 43: note = Ancestral polymorphism is W, Derived polymorphism is G
  VARIANT 50: note = Ancestral polymorphism is D, Derived polymorphism is N
  VARIANT 62: note = Ancestral polymorphism is P, Derived polymorphism is L
  VARIANT 79: note = Ancestral polymorphism is A, Derived polymorphism is V
  VARIANT 82: note = Ancestral polymorphism is N, Derived polymorphism is T
  VARIANT 84: note = Ancestral polymorphism is C, Derived polymorphism is Y
  VARIANT 90: note = Ancestral polymorphism is T, Derived polymorphism is M
MEKNIICMHGGIGRSINRIEQIENLQRPIAMEAGSVVMMDLLWSDPTENDSAKGLRSDVWGPGLITFGVAQGHLITLFVAMNYCGTTNNTGAILVLGRDLVVVPKLIQSLLFAVT

SEQ ID NO: 2399 - protein, 576 aa, Zea mays
  VARIANT 536..576: note = Derived polymorphism lacks residues 536 to 576
  VARIANT 17: note = Ancestral polymorphism is G, Derived polymorphism is S
MGAAPPSSWLAFILFFGTLVALPQSSHGGGTTRHYTFNVTMKKVTRLCTTRAIPTVNGQFPGPKIVTREGDRVVVKVLNNVKDNVTIHWHGVRQLRTGWSDGPAYVTQCPIQTGQSFVYNFTITGQRGTLFWHAHVSWMRATLYGAIVILPKRGVPYPLPVKPYKDVPVIFGEWFNADPETIVAQALQTGAGPNVSDAFTINGLPGPLYNCSSKDTFKLKVLPGKWYLLRLINAALNDELFFSIANHTLTVVDVDAAYVKPFRTDIVLITPGQTTNVLLRAEPDAGCPAATHLMLARPYGTGQPGTFDNTTVAAVLEYAPPGHIRSLPLFRPSLPALNDTAFAANYSARLRSLATPDYPANVPRAVDRSFFFAVGLGTNPCPVNQTCQGPNGTMFTASMNNVSFNMPTTALLQAHYGSVAGVYTPDFPVAPLEPFNYTGTPPNNTNVSHGTKVVVLDYNTSVEVVLQATSILGAESHPLHLHGFDFFVVGQGFGNYDSSKDPPKFNLVDPVQRNTVGVPAGGWVAIRFFADNPGVWFMHCHLEVHTSWGLKMAWVVNDGPLPEQKLMPPPADLPKC

SEQ ID NO: 2400 - protein, 280 aa, Zea mays
  VARIANT 68: note = Ancestral polymorphism is G, Derived polymorphism is D
MEFEDRCHKVQEPKFDCLLFDLDDTLYPLSAGIAGHVKKNIEDYMVEKLGIDETKIENLGNLLYKNYGTTMAGLRAIGYSFDYDEYHAFVHGRLPYDNIKPDPILKHILKNLRIRKLIFTNGDMVHAVRALKRLGLEDCFEGIICFETLNPPCPPQGDQEPEIFDIAGHFARSGTADELPKTPVLCKPNVDAMEEALRIANVNPHKAIFFDDSVRNIQAGKQIGLHTVLVGKSQRVKGADHALESIHNIREALPELWEEAEKAEDVLYPERVAMETSVTA

SEQ ID NO: 2401 - protein, 119 aa, Zea mays
  VARIANT 18: note = Ancestral polymorphism is A, Derived polymorphism is T
  VARIANT 22: note = Ancestral polymorphism is V, Derived polymorphism is A
  VARIANT 24: note = Ancestral polymorphism is S, Derived polymorphism is L
  VARIANT 33: note = Ancestral polymorphism is D, Derived polymorphism is N
  VARIANT 35: note = Ancestral polymorphism is C, Derived polymorphism is Y
  VARIANT 39: note = Ancestral polymorphism is L, Derived polymorphism is F
  VARIANT 68..119: note = Derived polymorphism lacks residues 68 to 119
  VARIANT 70: note = Ancestral polymorphism is G, Derived polymorphism is D
  VARIANT 82: note = Ancestral polymorphism is G, Derived polymorphism is A
  VARIANT 107..119: note = Derived polymorphism lacks residues 107 to 119
MEESNVQKIRWTLWIIYAVYMADSQMRLVVLFDFCRFVLFSLLQPVKSPVTICGDIHGQFHDLAELFRIGGKCPDTNYLFMGDYVDRGYYSIETVTLLVALKVRYPQRITILRGNHESR

SEQ ID NO: 2402 - protein, 242 aa, Zea mays
  VARIANT 9: note = Ancestral polymorphism is K, Derived polymorphism is N
  VARIANT 30: note = Ancestral polymorphism is R, Derived polymorphism is H
  VARIANT 55: note = Ancestral polymorphism is M, Derived polymorphism is T
  VARIANT 65: note = Ancestral polymorphism is D, Derived polymorphism is N
  VARIANT 67: note = Ancestral polymorphism is D, Derived polymorphism is N
  VARIANT 74: note = Ancestral polymorphism is L, Derived polymorphism is F
  VARIANT 87: note = Ancestral polymorphism is A, Derived polymorphism is D
  VARIANT 109: note = Ancestral polymorphism is R, Derived polymorphism is M
  VARIANT 132: note = Ancestral polymorphism is K, Derived polymorphism is M
  VARIANT 149: note = Ancestral polymorphism is S, Derived polymorphism is F
  VARIANT 153: note = Ancestral polymorphism is S, Derived polymorphism is L
  VARIANT 162: note = Ancestral polymorphism is E, Derived polymorphism is G
  VARIANT 191..242: note = Derived polymorphism lacks residues 191 to 242
  VARIANT 216..242: note = Derived polymorphism lacks residues 216 to 242
MRLSSQEFKYHSVLNQGSATLLPIEGNYSRGNLMLQRIKTYIAFLEQKLVEFDRTERLNHFVLTDSDIAVVDDLGHIFEKYPHFHLAVTFCNNKGQPLNSGFVAVRGTRDGITKAVEFLKQVLGTYSLRYIKASRMLGDQLALAWVVKSHLPSALGKFSKHEAFTGEVNGTSVLFLPCVVYNWTPPEGAGQFHGIPLDVKVVHFKGSRKRLMLEAWNFYNSTSKMSDMLCLILRSGRTKYDF

SEQ ID NO: 2403 - protein, 696 aa, Zea mays
  VARIANT 45..696: note = Derived polymorphism lacks residues 45 to 696
  VARIANT 97..696: note = Derived polymorphism lacks residues 97 to 696
  VARIANT 138..696: note = Derived polymorphism lacks residues 138 to 696
MVFQKRSSSELEASGGGQVAEMPRVPKSARGKRSVRKKEAQNPPQMSAFDLLATVAGKLLDEGVGSLGNMSAGAPALTACAKDVRVKKEQCDEEMKQFKHEVTDQDSCNESAILPHIVFQRAVNNARNEDPKAKSEAQDKESSMISCTKAELGCNFGVIADRWSPESVESGAFTGDAVASLMPPAPAGFHKNAPEMYNLLDSMDVDVKPPPLVSSDSTGEMPLYGDKVHRSTSLPRVSKGVGFFAVDRDDDDDKSSGCTHPSTTTNKDFRSNCTAEYSRVRKLLTSKYRKVAPARVYKSDLSYSDVDRKPSFRNKKMHYTRQRTQRSTFKRRKLFDRHSVLASEFGTAHGKGNTKKVTGRDSHAVSLEANKGTSSTPFQKSRGSNDCHVKLKIKSFKVPELLVEIPESATVGSLKKTVLEAVTAILGGGLRVGVLHHGKKVRDDNKTLIQAGIGQEDMLDNLGFSLEPNCTQNPQVQAPEDISFLETIDTAEPLARIAPADSSSKHGEVDLSQEFALTPLAMNYQGSDHDSVHSPGGVSSPDKVSTNSRALVPVPAADPNAGAIVPANKSKRSPEQGQRRIRRPFSVAEVEALVLAVEKLGTGRWRDVKLRAFDNAKHRTYVDLKVRTVKTNGRRWCTPRASRRSSGVASRCLRSCSTGSWRPRPTGPSSKPSSSLRRPRCWLRLACSPNKFDDPG

SEQ ID NO: 2404 - protein, 296 aa, Zea mays
  VARIANT 185: note = Ancestral polymorphism is A, Derived polymorphism is V
MPKTPTTAPPPRSIPAAPNAMIPACTSACRKPQPSHPSGRERREPRARFAAAKAEANKRKRLIPFPSHDSQLSAASRHRNLAVTPQIPISATASREDEPPPQPPPAYNIIPIHDVVMQGEHPSLRFPEVRAAVEALAHAADLPPPPLARGWDAFRADLFDWLGATCGFQLDNVRNQREHLVLLLANAQLRAGGTLPTDHPADVLHHSIARDIRRKLLKNYKTWCSYLGKRPHVHVPSGGRRVAQGVGPDTRRDLLYTALYLLIWGEAANLRFMPECLCYIFHYMGTRSQPCHRPVD

SEQ ID NO: 2405 - protein, 311 aa, Zea mays
  VARIANT 2: note = Ancestral polymorphism is Q, Derived polymorphism is H
  VARIANT 34..311: note = Derived polymorphism lacks residues 34 to 311
  VARIANT 54..311: note = Derived polymorphism lacks residues 54 to 311
MQDRMRRQGQYGEADINSMVAAQLHHYQAQQRVQKHPENSYTGRDPAQASAEHQYTPPKARQSQWDRGGPNAPSQFCSFMLTVSDTAQGAGGAQSFYDGQRSDTKVGLEKQPSKESREQPRTERTETRYENYNLPRTFEGLEQSFHEDIILLSKELQEAEDAENSRHMEWGRFFGVMLGSLQRLKDINTQYQEKLLALRARQANYRDEFLRKESLARQQQYQHASMSHYASNSTAGEQHGYNPTAAGTPPVAAGGAYGEAHRGYASGQYESFSDRPDYPEFHDGGRGRGRSSEQRAQYPGGRAYNSGGRRF

SEQ ID NO: 2406 - protein, 446 aa, Zea mays
  VARIANT 259..446: note = Derived polymorphism lacks residues 259 to 446
  VARIANT 167: note = Ancestral polymorphism is A, Derived polymorphism is T
  VARIANT 147..446: note = Derived polymorphism lacks residues 147 to 446
MGHGASCGRPSEEVDFFGAAQSGDMARLAAALRSRPTLLSRTTLFDRLSALHIAAAHGHLQVVSLALDLCVHPDVVNRHKQTALMLSAMHGKTDCVRRLLDAGANIVMFDSSHGRTCLHYAAYYGHADCLRTILSAAAKSAPVSESWGFARFVNVRDDTGATPLHLAARQGWRRCVHVLLENGAIVSASSGAFGFPGSTPLHLAARGGNLDCVRQLLSWGADRLQRDSVGRIPYEVAAKRGHVACAALLNPSSAEPLVWPSALKFISELEPDAKSLLEAALMEANRERERRILKGAKNALPSPSHPDDGAHDTAIAEASDAEVCSICFEQACSIEVRECGHQMCAACTLALCCHAKPNPATQSQPLPTCPFCRGGIARLVVATRTRAGDDEERCKLESPRHCRARRSMSLSGDAGSTSTLMGSIASSIGKMGRRRTESSEQVDDKP

SEQ ID NO: 2407 - protein, 67 aa, Zea mays
  VARIANT 32: note = Ancestral polymorphism is S, Derived polymorphism is F
  VARIANT 50..67: note = Derived polymorphism lacks residues 50 to 67
MPSTPASAEKGSCTMKRITSYIFCQDHSTAASEKGATTLGDMVKTNDYGCCDLTPAFSKPRSKLIPN

SEQ ID NO: 2408 - protein, 409 aa, Zea mays
  VARIANT 319: note = Ancestral polymorphism is T, Derived polymorphism is A
  VARIANT 72: note = Ancestral polymorphism is R, Derived polymorphism is C
  VARIANT 60: note = Ancestral polymorphism is S, Derived polymorphism is I
  VARIANT 49..409: note = Derived polymorphism lacks residues 49 to 409
MSSMTINQFLFSLDIDNINIVKICQFVKESNIIHKVCGYANKLSSIQNQFDLQLHDEGSSIACFQALVDFLRSLLNSNDDGRIIVAKQKLGGQPDEAYLKFVTLCAEKIFSEVTQDAYAVILAGGTLQPIEETRLRLCPSLPPTGIKFFTSNHIVPPESILPIAVTRGPSGMAFDFSYNSRSSPSMIEELGRFICNIITVVPKGVVMFFSSYDYERRVYDAWMTTGTISRISKKKHVFRDPRNSADVEAVLNKYKEAIESCSNFSQDTGVNGALLLAVVGGKISEGINFSNGMGRCVIMVGLPYLSPSDPGYDILRKCTRGGREYYENLCMKAVNQSIGRAIRHINDYATMLLVDSRYAQTSSTKSFSCPADKLPQWIKARLSCAQNYGEVHRSLHQFFKFNKKNVEIL

SEQ ID NO: 2409 - protein, 639 aa, Zea mays
  VARIANT 117: note = Ancestral polymorphism is R, Derived polymorphism is C
  VARIANT 83: note = Ancestral polymorphism is Y, Derived polymorphism is H
MSSSTIRKALGAVKDQTSIGLAKVTSNIAPELDVLIVKATSHDDEPAEERHIREILHLTSGSRAHVAAAVAGCSRRLSRTRDYVVALKSLMLVHRLLADGDPSFHRELLHATRRGTRLLNLSDFRDEAHSGSWDHSAFVRTYALYLDQRLEFFLHERKQGSNAGSSSSTNGPSPRDRDRWGSPDPYGRRSPSYSSPPGYGGYDDYRERNGGNNDDKRPPTPVRDMKPEQVLARMHHLQQLLDRFLACRPTGGAKHSRMVLVALYQIVRESFQLYADICEVLAVLLDRFFDMEYAECVKAFEAYASAAKQIDELCAFYAWCKDTGVARSSEYPEVQRVTDKLLETLEEFMRDRAKRPKSPSPEPEPEPVKEEPEPDMNSIKALPAPEDYKEPEPEKVEEEVKPEPPLQPQGDLVDLREDTVSADEQGNRLALALFQGPPAAGGSNGSWEAFPSNGGNEVTSAWQNPAAEPGKADWELALVETASNLSNQKPAMSGGMDPLLLNGMYDQGVVRQHVGAQVTTGSASSVALPAPGQKTQMLALPAPDGSMQTVGGDPFAASLAVPPPSYVQMADLEKKQQLLTQEQIMWQQYQRDGMQGQSSLNRLDRAPNPAMPYGMPMAYNTNPMPMAYTGNTGYYYPTY

SEQ ID NO: 2410 - protein, 457 aa, Zea mays
  VARIANT 33: note = Ancestral polymorphism is D, Derived polymorphism is G
  VARIANT 35: note = Ancestral polymorphism is L, Derived polymorphism is I
  VARIANT 144: note = Ancestral polymorphism is C, Derived polymorphism is R
  VARIANT 385: note = Ancestral polymorphism is L, Derived polymorphism is Q
MSPSDDGEETLAALIELSRTPEGREGLTDVLIDTLFLLPASPPRLLLLRLRLLRNLLAGDELNHYAFIEHSGPAAVAASVLSFPSLAPDVARAALQALGNAALAGELHRDAVWQALFPEALRVFAGLRDQGVLDPLCMVLDTCCGGEGGRGRLQELCHEELGLPILVQAVTTASQVEHKEEWLEWLLFKVCAEEQKFESLFYALCSANDVGEYNAKHIFLLDTLSRCLNSHPEEVTVSDSFAHDVFNLHKHAAETVNFTYRGTSPLPTGHPAIDVLGYTLQLLRDICAWESTSADTQRPVDSLLQAGFVKRLLRYLGELEPPSTIRKSMAGAGGQGDNHPALENAKVCPYIGYRRDLVAVIANCLHRRKKVQDEIRQLDGIMLLLQQCVIDEDNPYLREWGLLAVKNLLEENEENQKEVSELEMQKPVITPEIANIGLKVEIDKETGRPKLVNTSDT

SEQ ID NO: 2411 - protein, 389 aa, Zea mays
  VARIANT 198: note = Ancestral polymorphism is G, Derived polymorphism is A
MSHRKFEHPRHGSLGFLPRKRSSRHRGKVKSFPRDDAKKPCHLTAFLGYKAGMTHIVREVEKPGSKLHKKETCEAVTIIETPPLVIVGLVAYVKTPRGLRTLNSVWAQHLSEEVRRRFYKNWCKSKKKAFTKYALKYENDAGKKEIQLQLEKMKKYASVIRVIAHTQIRKMKGLKQKKAHLMEIQVNGGTIADKVDYGYKFFEKEVPVDAVFQKDEMIDIIGVTKGKGYEGVVTRWGVTRLPRKTHRGLRKVACIGAWHPARVSYTVARAGQNGYHHRTEMNKKVYKIGKAGQETHDASTEFDRTEKDITPMGGFPHYGIVKGDYLMIKGCCVGPKKRVVTLRQSLLKQTSRLALEEIKLKFIDTSSKFGHGRFQTTDEKQRFFGKLKA

SEQ ID NO: 2412 - protein, 726 aa, Zea mays
  VARIANT 305..726: note = Derived polymorphism lacks residues 305 to 726
MDDESKSAPKSDVNTDAGAEAAAAAAPLPPSSSETAETEARVEAADGESQVVERLVELVSEIAAISDFRNSYRRQFCNLSRRIRLLVPMLEEAKEAPTPLTVASEAALRRLREALHAARDLLQLGSSGSKIFLVLDREKIMKTFQDVTARLEQALAGISFDELNISDEVREQVELVHTQFKRAKERSDSSDDDLFNELMSLCNSSSSDSVDPDTLRRLSEKLQLVTIYDLNHESLTLHEMASGGDPGAVVEKMSMLLKRIKDFVQTEDPEMGAQASTATISTKDNSACPVIPDDFRCPISLDLMKDPVIVATGQTYERGYIEMWLEAGHDTCPKTQQKLANKSLTPNYVLRSLITQWCEANGIEPPKRPAQLRDAPLSCSAAEHSNVLELLQKLSSQNLEDQRGSAGMLRQLAKRSAENRACIGDAGAIPILVSLLSTTDVSTQEHVVTALLNLSIYEENKARIISSGAVPGIVHVLKRGSMEARENSAATLFSLSIVDENKVTIGCSGAIPALVQLLSNGSQRGKKDAATALFNLCIYQGNKGKAVRAGLVPILLELLMETESGMVDEALAILAILSGHPEGKTAIGAASAIPVLVGVIRNGSPRNKENAAAVMVHLCSGEQQQQHLAEAQEQGIVSLLEELAESGTDRGKRKAVQLLERMNRFLKQQSQAEAEAEAMAQAHAQAQAQAQAQAQAQPQILVQAQAHADMQAERSLLPTSSDISDR

SEQ ID NO: 2413 - protein, 257 aa, Zea mays
  VARIANT 181: note = Ancestral polymorphism is T, Derived polymorphism is M
  VARIANT 173: note = Ancestral polymorphism is G, Derived polymorphism is W
  VARIANT 138: note = Ancestral polymorphism is G, Derived polymorphism is R
MPPNRKRRAAAMDPAAGGAGQQRQNKASAGKKVKKGGGSGGRWPAVKPKKDLQINRLKGTHLLTIPDFFTSAEAKAFIDIAESMGFTHQGSLGPLKGEAYRDNERISVTDPLLAQAIWESGINRIFTDISVSGKVATGLNPNIRFYRYALLQVEQYTEGQRFGRHIDESVSLGDGSKTYYTLLIYLSGKGSAKDSSGQALVGGETVFYDQRGGVVAEVAPVQGMALLHLHGAKCMLHEARAVKKNAKYVLRSDVVFS

SEQ ID NO: 2414 - protein, 834 aa, Zea mays
  VARIANT 289: note = Ancestral polymorphism is R, Derived polymorphism is W
MPVQDDDESVSWLVHGSAGDAPAVLLHGSLDIWIHEARNLPNKDILSKRMRDLLCKPSEGMTSDPYVTVQVASAVVARTFVIPDDENPVWAQQFLVPVAHEAATVNFVVKDSDVVGAELIGVVAVRADQLQAGDMVEGAYPVLERNGKECAPGAVLRLSVQYVPVARLTMYHHGVTPGPDFAGVPRTYFPLRRGGKVTLYQDAHVPDGTLPEVRLGNGDCYRHGQCWRDVYDAICQARRLIYITGWSVFHTIHLVRDGHDDMALGDLLRRKSQEGVRVLLLVWDDPTSRRLLGIKMEGYMGTRDEETRRFFKHSSVQILLCPRSAGKRHSWVKQQVLYFSLNYCTIFTHHQKTVILDADAGNHRRKIVAFVGGLDLCGGRYDTPKHTLFRTLQTFHKEDYYNPNFAVEDARGPREPWHDLHSKIDGPAAYDVLKNFEERWLKASKRSAAKKLSKLSRSHNDSLLWINKIPDIIAIDDEIYSNDDDPERWDVQIFRSIDSNSVKGFPKDPREATSKNLVCGKNVLIDMSVHTAYVNAIRGAQHFIYIENQYFLGSSFNWDSHRDVGANNLIPIEIALKIANKIYSNERFSAYIVVPMWPEGNPTGTPTQRILYWQKMTMQMMYEIIYKALKEVGLDGTYEPQDYLNFFCLGNREAEDTTCTSSGPFSASNPQDQARKNRRFMVYVHSKGMIVDDEYVIIGSANINQRSMEGTRDTEIAMAAYQPQHTWANMLSAPRGQIFGYRMSLWAEHIGAIEESFTRPESLECTRQVRHIGQQNWEKFISSHVTEMKGHLLKYPVSIDSRGKVNPLSGCATFPDLGGNICGSFLNIQENLTI

SEQ ID NO: 2415 - protein, 348 aa, Zea mays
  VARIANT 38: note = Ancestral polymorphism is G, Derived polymorphism is R
  VARIANT 64..348: note = Derived polymorphism lacks residues 64 to 348
  VARIANT 112: note = Ancestral polymorphism is N, Derived polymorphism is T
  VARIANT 126: note = Ancestral polymorphism is R, Derived polymorphism is M
  VARIANT 142..348: note = Derived polymorphism lacks residues 142 to 348
  VARIANT 144: note = Ancestral polymorphism is Y, Derived polymorphism is C
  VARIANT 185: note = Ancestral polymorphism is P, Derived polymorphism is H
MLGAFTSSQRASTLQCGHFDPDFVEALKDSYHARSYYGPPCYQCTHSSTLFWYNERIGSSSGNRSIVYNNCCKSGKVRLPPYSPRPEPLLSLARFDGDSISKSFMQNIRQYNCLFAFTSMGAHIDRSMNDGHGPPIFKICGQVYHRIGSLLPLNDQPPKFLQLYVYDTAHEVNNGINSLSTVDGPTSSIRKDIVQELSKMLDEHNPFAKKFRLARERLNEHTNEEFIIRIIRAREGDHVQYNMPTSDDLAMFVIGDFSLITFKRDIIIETRNSELRRISSLHPAYMALQYPLLFPYGEHGFQVGVAYSDTRVRTNSRAHITMQEYYCYQFHYKVGQPNPFLSYGTLSN

SEQ ID NO: 2416 - protein, 649 aa, Zea mays
  VARIANT 110..649: note = Derived polymorphism lacks residues 110 to 649
MAGKGDGPAIGIDLGTTYSCVGVWQHDRVEIIANDQGNRTTPSYVAFTDSERLVGDAAKNQVAMNPINTVFDAKRLIGRRFSDASVQSDAKLWPFKVIPGSGDKPMIGVQFRGEEKQFSAEEISSMILNKMKETAEAYLGTTIKNAVVTVPAYFNDSQRQATKDAGVISGLNVMRIINEPTAAAIAYGLDKKSSSDGEKNVLIFDLGGGTFDVSLLTIEEGIFEVKATAGDTHLGGEDFDNRLVNHFVQEFKRKNKKDITGNPRALRRLRTACERAKRTLSSTAQTTIEIDSLYEGIDFYTTITRARFEELNMDLFRKCMEPVEKCLRDAKMDKSSVHDVVLVGGSTRIPRVQQLLQDFFNGKELCKSINPDEAVAYGAAVQAAILTGEGNEKVQDLLLLDVSPLSLGLETAGGVMTVLIPRNTTIPTKKEQVFSTYSDNQPGVLIQVYEGERARTKDNNLLGKFELSGIPPAPRGVPQITVCFDMDANGILNVSAEDKTTGQKNKITITNDKGRLSKEEIEKMVQEAEKYKAEDEEHQKKVNAKNTLENYAYNMRNTIRDDKIASKLPEDDKKKIDDAVEGAINWLDNNQLAEVDEFEDKMKELEGICNPIIAKMYQGAAGPDMAGGMDQDASPAGGSGAGPKIEEVD

SEQ ID NO: 2417 - protein, 318 aa, Zea mays
  VARIANT 106: note = Ancestral polymorphism is L, Derived polymorphism is S
  VARIANT 96: note = Ancestral polymorphism is R, Derived polymorphism is H
  VARIANT 94: note = Ancestral polymorphism is P, Derived polymorphism is L
  VARIANT 92: note = Ancestral polymorphism is F, Derived polymorphism is L
  VARIANT 86: note = Ancestral polymorphism is R, Derived polymorphism is L
  VARIANT 46: note = Ancestral polymorphism is S, Derived polymorphism is L
MAVAKVKSVALSVSHKCRNILAAGWEAHLNTVKADNKGSKNEIYTSRVHYMIHKGTPYLIVPENDMHNIVKLLILHLLMNIIIDERGSLAVFSPIRGRVASLLKPSKTPPRVAMTGDVLRLKDSKVPIIADSLKQTILKEHEAASKASYGVSAILSSAGATCRSRSEGLLSLLSEESSYNILKFDIGSCVYIDFNGSSHNIELDSFEAPKADLLMPFSAKLVDGINQNDSRRRALVMFCFAYFNVIARSAVMLSIDHHGFDVLAKVPQGDILTNPQYHWKEFRFTFKEPAKDAEDFCRMLVGLEEEGLQTVKSCSGYG

SEQ ID NO: 2418 - protein, 92 aa, Zea mays
  VARIANT 39: note = Ancestral polymorphism is L, Derived polymorphism is F
  VARIANT 41: note = Ancestral polymorphism is E, Derived polymorphism is K
MEGYKGKAQNRSTIDPRVQGLTIYHVKRHLQKYQLAKYFPEPKEDKKASLEDREAQSGKSGIDSSKNKGTRSSDEELFQIYTHSERSVYQNV

SEQ ID NO: 2419 - protein, 110 aa, Zea mays
  VARIANT 90: note = Ancestral polymorphism is G, Derived polymorphism is D
  VARIANT 71: note = Ancestral polymorphism is E, Derived polymorphism is D
  VARIANT 64: note = Ancestral polymorphism is F, Derived polymorphism is C
  VARIANT 61: note = Ancestral polymorphism is D, Derived polymorphism is A
  VARIANT 58: note = Ancestral polymorphism is H, Derived polymorphism is R
  VARIANT 50: note = Ancestral polymorphism is S, Derived polymorphism is Y
  VARIANT 49: note = Ancestral polymorphism is A, Derived polymorphism is T
  VARIANT 46..110: note = Derived polymorphism lacks residues 46 to 110
  VARIANT 45: note = Ancestral polymorphism is I, Derived polymorphism is F
  VARIANT 41: note = Ancestral polymorphism is E, Derived polymorphism is K
  VARIANT 34: note = Ancestral polymorphism is T, Derived polymorphism is A
  VARIANT 32: note = Ancestral polymorphism is R, Derived polymorphism is C
  VARIANT 30..110: note = Derived polymorphism lacks residues 30 to 110
  VARIANT 27: note = Ancestral polymorphism is D, Derived polymorphism is N
  VARIANT 23: note = Ancestral polymorphism is A, Derived polymorphism is T
  VARIANT 21: note = Ancestral polymorphism is D, Derived polymorphism is G
  VARIANT 19: note = Ancestral polymorphism is G, Derived polymorphism is E
  VARIANT 17: note = Ancestral polymorphism is R, Derived polymorphism is I
  VARIANT 11: note = Ancestral polymorphism is S, Derived polymorphism is F
  VARIANT 10: note = Ancestral polymorphism is G, Derived polymorphism is R
  VARIANT 9: note = Ancestral polymorphism is G, Derived polymorphism is D
MVNDIHNRDGFVLGTSRGGHDTTKIIDCLQDRDTNQIYIIEGDGIQKGASLHLELLVHVIDKSFGFHAAVEEAQRALNAAHVEVESVDNGIGVVKLMGRNSCFTTACFSS

SEQ ID NO: 2420 - protein, 86 aa, Zea mays
  VARIANT 34: note = Ancestral polymorphism is S, Derived polymorphism is A
  VARIANT 29: note = Ancestral polymorphism is K, Derived polymorphism is R
  VARIANT 17: note = Ancestral polymorphism is L, Derived polymorphism is M
MAFTMRAVKVPPNSASLEEARHRVFDFFKQACRSIPTVMEIYNLDDVVTPSQLRSTIAKEIRKNQNVTNPKVPSRSLSRPPSRFDP

SEQ ID NO: 2421 - protein, 540 aa, Zea mays
  VARIANT 259: note = Ancestral polymorphism is T, Derived polymorphism is A
  VARIANT 249..540: note = Derived polymorphism lacks residues 249 to 540
  VARIANT 123..540: note = Derived polymorphism lacks residues 123 to 540
  VARIANT 105..540: note = Derived polymorphism lacks residues 105 to 540
MAASKVDGPAIGIDLGTTYSCVAVWRHDRGEVIANDQGNRLTPSCVAFTNAEKLVGEAAVNQAALNPTNTIFEVKRLIGRRFNDESVQEDAKLWPFKVVAGNDERPMIMVQYEGKERQFMPEEISAMVLAKMRETAEVYLGKTVKNAVITVPVYFNNSQRQATIDAGAIAGLNVMRIINEPTAAALAYGLEKMPVSNKRRTVLVFDLGGGTFDVSLLNIDPGVDMDKGLFEVVAIAGDTHLGGADFDNEMVKYCLREFTRKHGKMDIHSNQKALRRLRTACEKAKRMLSSTAQTTIEVDCLHDGIDFCATITRSRFEELNKDLFSKCIKALDKCLCDGKMDKGSVHDVVLVGGSTRIPKVQSMLRGFFSGKELCRSINPDEAVAYGAAIQASILSGGTEDGRLVDMLLRDVTPLSLGIETENNFTMSVVIPRNTAIPTKKVQNFTTLYDNQKVVSFPVYEGESASTKDNNLLGEFKLTDIPPAPKHVPSFDVTFDIDANGVMKVSAEDRDTRRKNSITIVNHGGRLRKEEIARLVQEAEN

SEQ ID NO: 2422 - protein, 264 aa, Zea mays
  VARIANT 78: note = Ancestral polymorphism is P, Derived polymorphism is L
  VARIANT 42..264: note = Derived polymorphism lacks residues 42 to 264
MAWAIRESLLDQRASDNSSPVGRSSTGTSNTTPPLAAGSRRQSRMDSMHAMMKEKIGGELVRWNAMRHQRARPIIVDPALQVPNKTEVVTTKEKRSSSWVMLSRSFLEFCLRWDNLPRTLLMYFTNFLSSSEGYFHTVICNSEHYQNTTVNSDLRFMAWDKPPLTHPVNLTTEHFDAMANNGAPFAHSFANDNSVLDMIDAKLLGRAPGRFTPGGWCLGSSVGGKDPCTFLGRSFILRPTKGSAKLEKLLKLLEPDNFRPKQCK

SEQ ID NO: 2423 - protein, 142 aa, Zea mays
  VARIANT 54..142: note = Derived polymorphism lacks residues 54 to 142
  VARIANT 50: note = Ancestral polymorphism is R, Derived polymorphism is W
  VARIANT 46..142: note = Derived polymorphism lacks residues 46 to 142
MGDLQGLNGATVGFSAADGPEETTEEEDMRGCKGCARRWLKSGLSWGCARSRRWRRGESLHHVAHVTKARPPISVYNCMHCKLGVCRALEPRLFNEGYGFGSRGTPGDCASWKRLLSCQLSYFNFGLTIIVCVPLSSIFYLL

SEQ ID NO: 2424 - protein, 245 aa, Zea mays
  VARIANT 228..245: note = Derived polymorphism lacks residues 228 to 245
  VARIANT 218..245: note = Derived polymorphism lacks residues 218 to 245
  VARIANT 154: note = Ancestral polymorphism is A, Derived polymorphism is S
  VARIANT 121..245: note = Derived polymorphism lacks residues 121 to 245
  VARIANT 116: note = Ancestral polymorphism is R, Derived polymorphism is G
  VARIANT 88: note = Ancestral polymorphism is D, Derived polymorphism is G
  VARIANT 60: note = Ancestral polymorphism is D, Derived polymorphism is Y
  VARIANT 45: note = Ancestral polymorphism is D, Derived polymorphism is Y
  VARIANT 30: note = Ancestral polymorphism is Q, Derived polymorphism is R
MNSMNKPAYAAICTHSPNKPVLIFVSSRRQTRLTALDIIQLAASDEKTRQFLSIEDNSLDMVLSQVSDSNLRHTLQFGIGLHHAGLNDRDRSLVEELFSNNKIQLEGSLLVESRHRMINSQGDLRKVLMCIYGWGIYVFFDRTDEVRTFKCSRAMVRALACSAASLMAALSCVEEFINARLRDASITHPCLPNVSALMGNGELATMLSTADLCECATWKYPLLIAKKRCESHELDMPECRDMSMW

SEQ ID NO: 2425 - protein, 139 aa, Zea mays
  VARIANT 65: note = Ancestral polymorphism is D, Derived polymorphism is V
  VARIANT 41: note = Ancestral polymorphism is S, Derived polymorphism is F
  VARIANT 15: note = Ancestral polymorphism is L, Derived polymorphism is S
MASGGPKPKLAYIILYVRDVEKAASFYDAAFGYTVRRLDQSRKWAELESGATTIAFTPLHQRETDELSGAVQLPDSSAAGRGSVEVCFAYADVDAAYKRAVDNGAVAVSAPEDKPWGQKSGFVRDMDGNIVRIASYVRE

SEQ ID NO: 2426 - protein, 136 aa, Zea mays
  VARIANT 17..136: note = Derived polymorphism lacks residues 17 to 136
MEPDPPMYNKQLVFNNRFRAASKGSSRPTICSMDWKLNIGEFDAMVAFSSCELMRVFGCKGEKWKMLMNKKPSSLRKINALKWCPDDRSRIAVAAGDGHLVTIDFLDFKGRHFKRVERYPKQVVFPAYHGAVVVNT

SEQ ID NO: 2427 - protein, 131 aa, Zea mays
  VARIANT 22..131: note = Derived polymorphism lacks residues 22 to 131
  VARIANT 40: note = Ancestral polymorphism is R, Derived polymorphism is S
  VARIANT 47: note = Ancestral polymorphism is E, Derived polymorphism is K
  VARIANT 48: note = Ancestral polymorphism is R, Derived polymorphism is C
  VARIANT 50: note = Ancestral polymorphism is L, Derived polymorphism is R
  VARIANT 51: note = Ancestral polymorphism is A, Derived polymorphism is S
  VARIANT 54: note = Ancestral polymorphism is R, Derived polymorphism is H
  VARIANT 55..131: note = Derived polymorphism lacks residues 55 to 131
  VARIANT 56: note = Ancestral polymorphism is R, Derived polymorphism is S
MASVSLALLPATSAHRTRRASWRDHDRALERWEEADAVRSWLSAIVERNRALRRRRGSTSFCLPRGGLVGTAGSTKERRGRREEANVFCALGVGAKMEEPAVDPGITFFCLATRPSKRGGIGNDDMADFSK

SEQ ID NO: 2428 - protein, 85 aa, Zea mays
  VARIANT 14: note = Ancestral polymorphism is A, Derived polymorphism is T
  VARIANT 61: note = Ancestral polymorphism is N, Derived polymorphism is K
MVQFILRQTNFKGTNLLGASFFDANLTSTEFSCCSIFDDSSADLSDPNFSLANLIKANLSNANLEGALATRNTSFKGADITGAGK

SEQ ID NO: 2429 - protein, 163 aa, Zea mays
  VARIANT 116: note = Ancestral polymorphism is P, Derived polymorphism is L
MSFHIAAAIHCGLGRHANAIPVLERTVKVVKPTQEPSANSKPEAGAASGDDEAAAICRAQLEGGKLRLLKGSSREWSIVVGVVAQMGVLYYMVGVGTHDGLGHNPEQQDAELLFGPGYTGLTDLGNRYIEKQSLKATFASALADPTVDLNMQIVNDNETNLTC

SEQ ID NO: 2430 - protein, 856 aa, Zea mays
  VARIANT 456..856: note = Derived polymorphism lacks residues 456 to 856
MFGNLAIGFLLVIRYNQKGFPFEKHVGAESKNQNGNILLINDKLLYDLFHELRNWPPCAEEFWATAGVLMTVPATEASSAPQGQQAGAPASWEPNGVQVDGVTVDPPLPGRGAMVMLTEEEKASLCLLGLKQSSSTAELDTICGIEGPAAEQIKDEAGGDHVMHDALVGVTETEYQLDSDLRDVRGLLSTGLLEGFRVTYMKDEVEEVGRINGQGYSCGCSKCNYNSNIMNACEFEEHYGQSFDNQIDHIFLDTGISLFRVVEALKPCKLNMLGDFIEEKIGFPPNLDEYNKWKASFQKRKDYLDAVASDGCLTQSSQGLAAGEMIYSLRDYLKDSVSNSISNLNWSASKRRSGRRFRQGDTGTSTPTFSGSPGKGGFGHSTDTSEKKGTEETHSENTGDPLSIDGVKSDSPLPTAVTTNHSKHDSTNLGLSLSSPVKITQRPLRNCSIDSKSKESKTRDTTLHPLIFKEDGLADNTLLTYKLKNGEALKQGYKRGTCIICNCCNQEFSPSHFEEHAGMGRRRQPYHNIYTLEGLSLHKLALQLQDHLNPNGFDNASVSSVSDYHNLTSSGCGREPSTTSGPIVPLKRTLQERVVETESCYFCGYGHTTIGNINPDTIIFCNQCERPCHIKCYNNRVVKKKVPLEILKEYMCFHFLCCQECQSLRARLEEGLEKCVGITFLRRIRSNICWRLLSGMDASRDVKLYMPQVIDIFKDAFMDSTDEHSDIISDMVNGKNGDQEKDFRGMYCALLTASTHVVSAAILKVRIEQIAELVLIATRSECRKKGYFILLLKSIEANLRAWNVSLLTAPVDPEMAQIWSEKLGFTILSAEEKESMLESHPLVMFKNLVLVQKSLA

SEQ ID NO: 2431 - protein, 710 aa, Zea mays
  VARIANT 643..710: note = Derived polymorphism lacks residues 643 to 710
MKPSRAVVEPRPCWKERRIANSKFLSPEQACTQALFCPPRARRDFSTRSPRNLPPFHPWPQSAAPNPPPHPCARNARTPRFLRPQPPQSAAFPSATAIVSIRRRSAATDNFSHAIPCPAPASAHPLALAPVFEEVVTLPPSSTPPALPHPPNPWSLLDSPDYRGAARRIYGAASVLVGIRRGGSCLPGIGAACLRSEMDRIRDDRRGGVSAGGVPRPPRKRLRSNGGGGPRDSPRSERRRGERLMLFGGGGCASRDHSDDISDESLGGDDAEQELARRYHQQRRSPSTAPPPPSPPLLHHASAPRLRNVHPVGVNRIISVGVPRVLPDERIHRFVGTDKFVFLAREALDIFKHRGCCRSTDRQPMLCVALFRSGKRAAQLHPVDPALWACAAVMEDPRGADRRKRRMSREGAGGGTWCRGHLSFQGQDLRAAATTATGRSKSICEKKPEQGIERAFCAGGDLAALVRSSEVEQQGRGRTLVSGRRAAGSGPAASGRFMPLVSFVWAFHAPGFCTCLVTLTKKGELYKTHNERRDRLTMKINIDENGKSLKESGAKQHFVDEFFTLKEQYDLSEDTVIGLRSMGSVSTCSLCLSEWAVARDPKVWSNPLQYRPERFLEENIDIKGSDFKVPSFGVGRHVCPGAQLGINLVAFMIGHLLHYFEWSLPEGTRPEDINMMESPRLVTFMGTLLQAVANPCLEKELYNRAHRCKI

SEQ ID NO: 2432 - protein, 1917 aa, Zea mays
  VARIANT 96..1917: note = Derived polymorphism lacks residues 96 to 1917
  VARIANT 114..1917: note = Derived polymorphism lacks residues 114 to 1917
  VARIANT 480..1917: note = Derived polymorphism lacks residues 480 to 1917
  VARIANT 961..1917: note = Derived polymorphism lacks residues 961 to 1917
  VARIANT 997..1917: note = Derived polymorphism lacks residues 997 to 1917
  VARIANT 1015..1917: note = Derived polymorphism lacks residues 1015 to 1917
  VARIANT 1628..1917: note = Derived polymorphism lacks residues 1628 to 1917
MARAEANWERLVRAALRGERLGSAYGQPVTGIAGNVPSSLGNNVHIEEVLRAADEIQDEDPTIARILCEHGYTLAQSLDPNSEGRGVLQFKTGLMSVIRQKLAKRGGAAIDRSQDIAKLQEFYKLYREKHKVDELIEDEMKLRESAVFSGNLGELERKTRKRKKVLATLKVLWSVIEDMTKDISPEDANKLISEEMKRVMQKDAARTEDVVPYNIIPLDSLTSTTNAIVNFPEVRAAISTLQYYTDLPRLPGTFSVPDARNSDILDLLQCVFGFQGDNVKNQREHIIHLLANEQSRVGKLSGNEPKIDEGAVHAVFSKALDNYIKWCNYLPLRPVWDNNDSLTKEKKLLYVCLYYLMWGEAANVRFIPEGLCYIFHHLARELGVILQKQTAEPAESCNSGGGVSFLDNVIYPFYEIIAAEAANNKNGRAPHSEWRNYDDFNEFFWSHKCFHLRWPWNLSDPFFSKPSRKYKGLLSRNHHYGKTSFVEHRTFLHLYHSFHRLWMFLIMMFQGLTIIAFNDGSFDRKTILQLLSLGPTYVVMKFIESLLDILMMYGAYSTSRGSAITRVAWRFCWFTIASVAICYLYIKTLQDGTESATFKIYVFVISAYVGIKIIFSLLMSVPCCHGLAEACYRWSAVRLVKWMHQENNYVGRGMHESPLDYIKYATFWIAILGAKFSFTYFLQESLIKPLVEPTRTIINFTGLQYAWHDFFSKNNHNALTILSLWAPVLSIYLLDIHVFYTVLSAIYGFLLGARDRLGEISTVEAVHRFFEKFPGAFMHRLHVEVPKRKQLLSSGQEIELNKFDASRFSPFWNEIVRNLREEDYINNFELELLLMPKNDVGVLPIVQWPVFLLASKVFLAKEIAEDCKDSQEELWLRISKDEYMQYAVVESFHSIYHILTSILEKEGRLWVERIYGGIRDSISKRTIQSDLHFKKLLNVIAKLVAVLGILRGTTESSDLKKGLVNAIQDLYDVVHHEAFSVDMSPLFINVSGHIEDWDQINLARAEGRLFNKLKWPNDPKLKDLIKRLYSLLTIKESAATVPKNLEARRRLQFFTNSLFMEMPVARPVSEMVSFSVFTPYYSEIVLYSMAELQKKNEDGITTLFYLQKIYPDEWKNFLTRINRDENAADSELFGNPNDILELRLWASYRGQTLARTVRGMMYYRKALMLQSYLERIQSEDLESTLGLAGSADRHFELSPEARAQADLKFTYVVTCQIYGKQKGEGKAEAADIALLMQRNEALRVAYIDEVENAKNGKPITEYYSKLVKADIHGKDKEIYSIKLPGNPKLGEGKPENQNHAIIFTRGNAVQTIDMNQDNYFEEALKMRNLLEEFSLKRGKHYPSILGVREHVFTGSVSSLASFMSNQETSFVTLGQRVLANPLKVRMHYGHPDVFDRIFHITRGGISKASRSINISEDIYAGFNSTLRQGCITHHEYIQVGKGRDVGLNQIALFEGKVAGGNGEQVLSRDIYRLGQLFDFFRMLSFYVTTVGFYFCTMLTVLTVYIFLYGKMYLALSGVGESIQNRADILQNAALNAALNTQFLFQIGVFTAVPMILGFILESGVLTAFVQFITMQFQMCSVFFTFSLGTRTHYFGRAILHGGAKYRATGRGFVVRHIKFAENYRIYSRSHFVKGMEVALLLVIFLAYGFNNGGAVGYILLSISSWIMALSWLFAPYLFNPSGFEWQKIVEDFRDWTNWLFYRGGIGVKGEESWEAWWEEELQHIYSIRGRILETILSLRFFIFQFGVVYHMNASGGSTALLVYWISWAVLGGLFILLLVFGLNPKAMVHFQLFLRLVKSVALLMVLAALVLAILFTKLSVRDVFASILAFVPTGWGIISIAMAWKPVVKKLGLWKTVRALARLYDAGMGMVIFIPIAICSWFPFISTFQTRLLFNQAFSRGLEISLILAGNNPNAGI

SEQ ID NO: 2433 - protein, 1057 aa, Zea mays
  VARIANT 149..1057: note = Derived polymorphism lacks residues 149 to 1057
MAQTPNPSRRSWVGPAPMPFLTPRPERRHLEMRWADGVSQSAARRSGVGAVARDGCERDQEVNVQVMLRCRPLSEEEQRVNAQSAISCNESKREVTVLHSLFKQADKTFTFDKVFGPQSQQRSIYNHAVAPLVTEVLEGYNCTVFVFGQTGTGKTYTMEGEMRQKVSELPDTAGVIPRAVCHIFEILTARKADYSMKVTFLELYNEDITDLLSLEDQSRFPEGRQKRPITLMEDGKGGAVIRGLEEIVVYSPSDIYSLLEHGSARRRTADTALNKQSSRSHAVFSINIQVKETTVGNEELIKYGRLNLVDLAGSENIARSGAREGRARETGEMNKSLLTLGRVINALVEHSVHVPYRDSKLTRLLRESLGGKAKTCIIATVSPSAHSLEETLVTLDYAARAKSIRNKPEANKKTCKTVVLKELYQEMERMKQDVKAAREKNGIYISHERFAQDETKRKTMKEKIEHLELSLEKQNKEVQKFKALYLAEQECHWDFESQNNDLKVNLESLKGKFIDLEEAHCRAHMSLREKDFIISNLLHSEHLIIERAKDMRNTLENATEDISVLLNKQERQSKTEAENKRLLSGFRAELDRSLGVLHATVVGSVCEQSKILESINEQTKLYFLARNESENQLERRIARAKDMYVSGVQCMKELANTMRQQSIIDSEQMRQNISTNANAIGNFLEVMFSEAEQVLNDVLKSTSDLKELLAFSAELQNTGLRRNLASVQAMSKQSIDFFEDIRIHVSQLMTLMEQNQMERSSKLVKFENEFKETCVKDEQAALNKIAAILSELTAKKTTMVSSYMGQLNERYSEDQKNLKLEISNLQQVSDNGKNESVACVGVIESQFQEDMSSHTKSNDQMEGILKQYSEKGSHFVSYWSHIQSSLHDLVKSSIMETDDFIEESRNKNENIFQEGLLFSSQNDAEFHGITSDVLTVSKNSLLLDHETCKMVETNTTIFSDHLELLNEKHSEGVESTRNMMSDCLEKDYMANSPVRNHPRELLTSANSLESIDKLRASLPDLVAKFRLENKLNEMDKGKQYSDQRTRTPRSPLTPVNQ

SEQ ID NO: 2434 - protein, 175 aa, Zea mays
  VARIANT 146: note = Ancestral polymorphism is C, Derived polymorphism is R
  VARIANT 141: note = Ancestral polymorphism is G, Derived polymorphism is D
  VARIANT 128: note = Ancestral polymorphism is Q, Derived polymorphism is R
  VARIANT 94: note = Ancestral polymorphism is E, Derived polymorphism is K
  VARIANT 90: note = Ancestral polymorphism is I, Derived polymorphism is V
  VARIANT 89: note = Ancestral polymorphism is M, Derived polymorphism is T
  VARIANT 86: note = Ancestral polymorphism is R, Derived polymorphism is H
  VARIANT 83: note = Ancestral polymorphism is R, Derived polymorphism is W
  VARIANT 77: note = Ancestral polymorphism is I, Derived polymorphism is N
  VARIANT 75: note = Ancestral polymorphism is T, Derived polymorphism is A
  VARIANT 71: note = Ancestral polymorphism is G, Derived polymorphism is R
  VARIANT 50: note = Ancestral polymorphism is G, Derived polymorphism is D
  VARIANT 2: note = Ancestral polymorphism is S, Derived polymorphism is P
MSFCFVILFLLYLGGAKLDQFFAIEFMSGLYVQSLHISSVKLNANRLVIGTLRGFDQFMNLVINNTVDVSGNYNTHNGMVFIRGNRVVMIEALELISKSQHNCGGQSYLFPAFPSSYVVLVAMQTSTQVGLANSASPRFNDGFIYCLLSANIDNKSFLLLFYIVVALRPCLVRHM

SEQ ID NO: 2435 - protein, 80 aa, Zea mays
  VARIANT 33: note = Ancestral polymorphism is E, Derived polymorphism is V
  VARIANT 37: note = Ancestral polymorphism is A, Derived polymorphism is S
  VARIANT 68: note = Ancestral polymorphism is Q, Derived polymorphism is R
MAPGDDSNPAASYIHTVQHLIERCMTFGMSMEECMEALAKRADVLPVVTSTVWKELEKENKEFFDKYQEWISEKRSAGTS

SEQ ID NO: 2436 - protein, 198 aa, Zea mays
  VARIANT 25: note = Ancestral polymorphism is G, Derived polymorphism is R
  VARIANT 26: note = Ancestral polymorphism is N, Derived polymorphism is S
  VARIANT 28..198: note = Derived polymorphism lacks residues 28 to 198
  VARIANT 32: note = Ancestral polymorphism is I, Derived polymorphism is T
  VARIANT 36: note = Ancestral polymorphism is T, Derived polymorphism is I
  VARIANT 47: note = Ancestral polymorphism is K, Derived polymorphism is N
  VARIANT 50: note = Ancestral polymorphism is K, Derived polymorphism is N
  VARIANT 61: note = Ancestral polymorphism is E, Derived polymorphism is V
  VARIANT 77..198: note = Derived polymorphism lacks residues 77 to 198
  VARIANT 79: note = Ancestral polymorphism is S, Derived polymorphism is F
  VARIANT 80: note = Ancestral polymorphism is A, Derived polymorphism is P
  VARIANT 91: note = Ancestral polymorphism is D, Derived polymorphism is N
  VARIANT 102: note = Ancestral polymorphism is P, Derived polymorphism is L
  VARIANT 116: note = Ancestral polymorphism is P, Derived polymorphism is L
  VARIANT 120: note = Ancestral polymorphism is R, Derived polymorphism is C
  VARIANT 134: note = Ancestral polymorphism is I, Derived polymorphism is M
  VARIANT 180: note = Ancestral polymorphism is G, Derived polymorphism is A
  VARIANT 189: note = Ancestral polymorphism is A, Derived polymorphism is D
MGAMDIMVDQFEHCASAKIFQSNLGSFQSAFILFITAGDPDLATTSKALKILNSCGSDVIEVGVPYSDPLADGPVIQASATRALKKGTTLDSVIEMLKGVTPELSCPIVLFTYYNLILKRGVGNFMSIIKQAGMHPNLSNCYRYLCLSHIQANNIQLWVRQRLSSLIMANCLSGADLVAGGVAGEDPEAEIGGADLAL

SEQ ID NO: 2437 - protein, 310 aa, Zea mays
  VARIANT 105: note = Ancestral polymorphism is R, Derived polymorphism is C
MASVCSLVEEEYIDLDLSSCGELEFRVRRSGASDELLCRGSRLQPPAPPRPGGKAQEVDVGGGGGCGGAGRRSAATVAPLQHSHSAGFRDDTQPVAARLRTECSRRRKAARTVHAKLLASRAFFRSLFARTTPCSDEQCRGAEVRASTRAAPPPGETKSDCCKAAFAQINNGYGYGYHSGRAAPTTLRSSIEQEKLMDEEELAAAARQRKSFSGVIKWRHAAAAPPAAAPAKPLSSSSSARRSSGAGGGPALKRSSSARSESEGLIQGAIAYCKRSQQQLGLARKSVSDAGASAPSWPARSAVTAAAYCH

SEQ ID NO: 2438 - protein, 851 aa, Zea mays
  VARIANT 26: note = Ancestral polymorphism is A, Derived polymorphism is E
  VARIANT 28: note = Ancestral polymorphism is T, Derived polymorphism is I
MARAVLDTLLRVAVVLLLLPALVAAAFTPADDYLVLCGTAANATVDGRTFLGDDGLPAAAVLPAPRGSEASASAASGSDDAALYRSARVFAAPSSYTFAIKSPGRHFVRLHFFPFRYGSGDLAADAEFSVSAQGLLLIDGYAPANGTPAVREFSVNVAGGTLAVAFAPAAAGKVAFVNAIEVVSHPDDLFADTAQTVSPMGRYAGLSTQALETVNRVNMGSPKITPRNDTLGRTWLPDEAFLVDSSVTVHRDVAPSKLRWTPGLATPETAPGMVYATATEINTNLVSASTISVQFNMTWKLQAAPGSAYLLRLHFCDIVSKAANGLVFNVYVGGWNVLPDYEISRDTFSVPAVPLYKDFVLSAKDAKGNITVSIGTSTLGNAYPDGVLNGLEIMRMVGSTGGGADSSQSGSKKKTVTAIIAGSAIAGVITVVMAVALIVLMLRRRRKKPEKKPSSTWVAFSESALGSRSHSRSFGKSSSAGARNNTVTLGQSAGAGYRIPLAALQEATCGFDEGMVIGVGGFGKVYKGTLRDETQVAVKRGNRRSQQGLNEFRTEIELLSRLRHRHLVSLIGYCDERGEMILVYEYMARGTLRSHLYDSELPPLSWKQRLDVCIGAARGLHYLHTGSAKAIIHRDVKSANILLDDSFMAKVADFGLSKTGPELDKTHVSTAVKGSFGYLDPEYFRRQMLTNKSDVYSFGVVLLEVLCARPVIDPTLPREMVNLAEWATQRLKNGELDSIVDQRIAGSIRPESLKKFVDTAEKCLAEYGVERPAIGDVLWCLEFALQLQEASPDSSGTDNTQLVHRSTSKFHRNQSTVSDGTEATVAANLGDLDGMSMRRVFSKMVNSEEGR

SEQ ID NO: 2439 - protein, 1061 aa, Zea mays
  VARIANT 229..1061: note = Derived polymorphism lacks residues 229 to 1061
  VARIANT 194..1061: note = Derived polymorphism lacks residues 194 to 1061
  VARIANT 135..1061: note = Derived polymorphism lacks residues 135 to 1061
MGKGGQDEGKRRAGSAASDPDPAAPVFPAWARTPSECLAELGVSADRGLSSEEAAARLQRYGPNELERHAPPSVWKLVLEQFDDTLVRILLLAAVVSFVLALYDGAEGGEVGVTAFVEPLVIFLILIVNAVVGVWQESNAEKALEALKEIQSEHATVKRHGRWSHGLPARDLVPGDIVELRVGDKVPADMRVLQLISSTLRVEQGSLTGETASVNKTSHKIELEDTDIQGKECMVFAGTTVVNGSAVCVVTGTGMATEIGKIHAQIQEASQEEDDTPLKKKLNEFGEALTAIIGVICALVWLINLKYFLSWEYVDGWPRNFKFSFEKCTYYFEIAVALAVAAIPEGLPAVITTCLALGTRKMAQKNALVRKLPSVETLGCTTVICSDKTGTLTTNQMSAVKLVAIGRWPDTLRSFKVDGTTYDPTDGKIHDWPSLSMDENLQMIAKIAAVCNDASIAHAEHQYVATGMPTEAALKVLVEKMGLPGGYTPSLDSSDLLRCCQWWNNAAKRVATLEFDRTRKSMGVIVKVDSGKNVLLVKGAVENLLERCTHIQLLDGSVVLLDDGAKALILSTLREMSASALRCLGFAYKDELSEFATYDGEDHAAHKYLLDPSYYSSIESNMIFCGFVGLRDPPREEVHTAIEDCRAAGIRVMVITGDNKETAEAICHEIGVFGPHEDISSKSFTGKEFMALSDKKKLLRQQCGLLFSRAEPKHKQEIVRLLKEDGEVVAMTGDGVNDAPALKLADIGVAMGITGTEVAKEASDMVLADDNFSTIVAAVGEGRSIYNNMKAFIRYMISSNIGEVASIFLTSALGIPEGLIPVQLLWVNLVTDGPPATALGFNPPDKDIMKKPPRRSDDSLITPWILFRYMVIGLYVGVATVGIFIIWYTHGSFLGIDLASDGHTLVSYSQLSNWGQCSSWEGFKVSPFTAGARTFSFDANPCDYFQGGKIKATTLSLSVLVAIEMFNSLNALSEDGSLLSMPPWVNPWLLLAMSVSFGLHFLILYVPFLAQVFGIVPLSLNEWLLVIAVALPVVLIDEVLKFVGRCLTARARKQSGKRKAE

SEQ ID NO: 2440 - protein, 430 aa, Zea mays
  VARIANT 43: note = Ancestral polymorphism is D, Derived polymorphism is N
  VARIANT 66: note = Ancestral polymorphism is A, Derived polymorphism is T
  VARIANT 108: note = Ancestral polymorphism is H, Derived polymorphism is Y
  VARIANT 144: note = Ancestral polymorphism is A, Derived polymorphism is P
  VARIANT 168: note = Ancestral polymorphism is A, Derived polymorphism is V
MHHLRRLVRSPLRHVPPRAAFSGRPSVSHGNDAYGSSHAAASDAIVCLVVAGGGGLEADLDRLFSAVLSHGLVSSVLRALTDRGVPAERFFAWASSLGRGFSPGPRAYNLLVENAGRLDDYGAMSRALALMSERRLSLTDRAFAFLAPSSGSSRSGSVEDAARAVLRALDGVGGPCRASGVFSLVKALASIGEFDAAVLVIEETARKVRYYNVLVAAKCKAGDFVGAREVFDEMRRSGSDPDANTWNYLLGCLLKKGRLAEACGLVEAMERLKRSEIPSSLTYEILTYHACKAGKMDSAMQILDQMFSENLTPRITIHSAFIKGYFYAGRIEDACKYVSDMSTRDRHSVNRNYSLLAKLLWKSGRTIDAGRVLYELMEKGLRPDHSAYVKVAKDLHKMGKGNLACELKMMFQRFSVNSRSETHHQPISGT

SEQ ID NO: 2441 - protein, 553 aa, Zea mays
  VARIANT 307: note = Ancestral polymorphism is A, Derived polymorphism is V
MNSLAFPSCPSALTPASTTAPASSPFPSPRIKIRCPRQEDAAHYHLRLRDRSSSQTVIVAMAAAAPASSVKEVLPSPLTSASEPPPLFDGTTRLYVAYHCPYAQRAWIARNYKGLQDKIKIVAIDLADRPTWYKEKVYPENKVPSLEHNNQVKGESLDLVKYIDSNFEGPSLLPEDPSKKQFAEELLAYTDAFNKALYFCIVSKEDVSEEAVAALDKIEDALGKFNEGPFSLGQFSLVDIAYVPFIERFQIFYSNIKNYDITKGRPNLQKFIEAEWPNANSFLDNALSRRNFNSWIVGHETEYHIIAIFPSVCRFDMEALPPTLTSASEQPPLYDGTTRAADCICPTFARMRNGHGSRGITRYSTQPSLNLPLYMPSKFSLLLWGNQGLQEKIKLVPMNMADKPGWYKEVYPNNQVPSLEHNKRVIGESLDLIKYIDSNFDGPKLTITDVADLVGRLRILKGKVAALDKIDSALLKFDDGPFFLGQLNLVDIAYAPFIEGFQIFFAGMKNCDITQGRVHIQKFIEEMNKIDACTQTKQDPQVLLALTKKKFGI

SEQ ID NO: 2442 - protein, 290 aa, Zea mays
  VARIANT 235: note = Ancestral polymorphism is L, Derived polymorphism is I
  VARIANT 10..290: note = Derived polymorphism lacks residues 10 to 290
MAAAAGPSRWVIDRSVKETLPPALGSTSQPPPVFDGTTRLYICYFCPFAQRAWVTRNLKGLQDKMELVAIDLQDKPAWYKDKVYAQGTVPSLEHDSEVRGESLDLIRYIDSNFDGPALLPEDAAKRQFADELFASANAFTKALYSPLLSHAAVSDEVVAALDKLEADLSKFDDGPFFLGQFSLVPRCILPGLKRGLIAQDIFFTLSNNNMLDPPFQADVAYVTILERVQIYYSHLRNYDIAQGRSNLQEFIDEMNKIEAYAQTKNDPLFLLDLAKNHLKVRLPEDVTKQP

SEQ ID NO: 2443 - protein, 420 aa, Zea mays
  VARIANT 306: note = Ancestral polymorphism is Y, Derived polymorphism is N
  VARIANT 6..420: note = Derived polymorphism lacks residues 6 to 420
  VARIANT 4: note = Ancestral polymorphism is H, Derived polymorphism is Y
  VARIANT 3: note = Ancestral polymorphism is M, Derived polymorphism is T
MWMHAQVMAADWAWWIGLLLGAVPLLVLAVWHSNDAGHCAAFALKRWRHHRGATRPRLPPGHMGLPFVGESLWLLWYYKFARRPGPGPDGFVDARRRRYYGGAARAGDVGVYRTHLFGSPTVLVCSPAANKFVLNSSQDGAFGIRWPAPELVGLSCLVNVEGRQHARLRGFVLAAINRPASLRAIAEVVQPRVVAALRSWADAKGTVSAATEIKKVTFENICKMFASMDPSPVTDMMDGWEEVQRRRRRREGTVDDATSRDLMSGLMEMEDEQGKKLCDDEVVDNIVSLIVAGYESTSNAMMWAVYHLAKSPHALHKLREENSVVSRDNKNGGFITLDDIPTMKYTAKKPPKPGTYQVFGGGPRVCAGNMLARLQLSIMLHHLAVGYKWELLNPDAEVTYLPHSKPVDGAAMSFSRLDSV

SEQ ID NO: 2444 - protein, 322 aa, Zea mays
  VARIANT 85: note = Ancestral polymorphism is D, Derived polymorphism is G
MAAQTTVQCRVIGGGGMRTVECLRGRLLAERVASKAAKEDADQLTKRVHPYIFISYLLQQHIPYCSTLFLVSIGSHTNRTIFSVDFDGRFGSQLDELEKKLAGEVRVRNRAERRLRRAIKKLESLKILDVELSEGSIGSLSSNGRSDHQAPEAEERNGPGSLTTRGSVLASGPSGDPDADADRESSEGSCTQVNSSSRDGSWCSVASEQSRPGSCMDLAGNTTNCGSEGSCGDHDSEREHLDASSGCGSAKSEEAFYESDDRLALSRGLVEPPPAAAGEGPRTQDNDTHAGEVRAMDHEEEEETNKLAIVLADPQPQSQGDV

SEQ ID NO: 2445 - protein, 103 aa, Zea mays
  VARIANT 37: note = Ancestral polymorphism is R, Derived polymorphism is S
  VARIANT 41: note = Ancestral polymorphism is R, Derived polymorphism is S
  VARIANT 55: note = Ancestral polymorphism is T, Derived polymorphism is A
  VARIANT 61: note = Ancestral polymorphism is I, Derived polymorphism is M
MSGRGKGGKGLGKGGAKRHRKVLRDNIQGITKPAIRRLARRGGVKRISGLIYEETRGVLKIFLENVIRDAVTYTEHARRKTVTAMDVVYALKRQGRTLYGFGG

SEQ ID NO: 2446 - protein, 318 aa, Zea mays
  VARIANT 246: note = Ancestral polymorphism is S, Derived polymorphism is G
  VARIANT 218..318: note = Derived polymorphism lacks residues 218 to 318
  VARIANT 178..318: note = Derived polymorphism lacks residues 178 to 318
MPTSVATHASLLLKAAAAKPCFSARAAARIPAPSHRPRPPAGRRLPTTVAALAAAARRFRWPSAAASARGLCAAPHFGGEGMGSDAGAGGRKRRVPAVNGLAKDAPAVNGMRKEEPVAAPPRLLTLPTVLTIGRVAAVPLLISTFYMEGPWAAMATTGIFLAAAVTDWLDGYIARKMQLGTPFGAFLDPVADKLMVAATLVLLCTKPLESSLLNDGPWLLTVPSIAIIGREITMSAVREWAASQNSKVLEAVAVNNLGKWKTATQMTALTLLLASRDPSLPAQGALVAPGVALLYVSTGLAVWSLVVYMRKIWRILLK

SEQ ID NO: 2447 - protein, 664 aa, Zea mays
  VARIANT 93: note = Ancestral polymorphism is G, Derived polymorphism is D
MAPVSLPPGFRFHPTDEELIIYYLKRKINGRQIELEIIPEVDLYKCEPWDLPEKSFLPSKDLEWYFFSPRDRKYPNGSRTNRATKSGYWKATGKDRKVNSHRRAVGMKKTLVYYRGRAPHGSRTDWVMHEYRLDERECETDTGLQDAYALCRVFKKTAPGPKIIEHYGAVHHPIEHPQWMAEAGSVDRHSPTLDLSSDARGDDFESSSFSFPTEAPSMDSMHGMQMSAPHEDGKWMQFLSEDAFNATNNPFFMNPPSSSSFPCLPSKVDVALECARIQHRLSLPPLEVEDFPQDVSLDTKASVLRSNPNEVDILQEFLSVASASQELINGATSSCYAAELWPSGAGTSSTSTHYVNELSSLVELGVKAKEEADNFYYMDCIVGTSVGFSSKSSVQVDEQAVRLVEIADIEGLKQEEKRQVENLRGVRLHNNDLGEIVVQGDESNPTDCITQYPISDYSADNLGEAGHLADPTDVGGGLATAPIFSQSQPDDFAIGFGDVDVNPNASFDLYERVDVKHGLFVSTAGAPKTFFHHVEPSKKVSVYLSPVASDVVGKATEKFHSPITVTATKASVFSKLKALVTRQGQIPGGEDASIMPPEVLRQQRNSGSPTTMNTEQELVKKAKKVMKPGHGGGDGNQACLLLPLSKRSKGISSMFFSVRNGHNF

SEQ ID NO: 2448 - protein, 878 aa, Zea mays
  VARIANT 214..878: note = Derived polymorphism lacks residues 214 to 878
  VARIANT 224: note = Ancestral polymorphism is S, Derived polymorphism is I
  VARIANT 251..878: note = Derived polymorphism lacks residues 251 to 878
  VARIANT 285..878: note = Derived polymorphism lacks residues 285 to 878
  VARIANT 376..878: note = Derived polymorphism lacks residues 376 to 878
  VARIANT 380..878: note = Derived polymorphism lacks residues 380 to 878
MPLLGFPPGAVVDGPEVWRRDAYGFAVRPQHLQRFREYAKIYKEEEEERAHRWRDFLDRLADAANVPTTPSVSPYASTGDPASGAGQAQENSGIGIHCDDEEEGSENAEHNNNLESPKESDASAESREANGKSEDLKDVTNLDKLQEKTGSSSSTEAIKALEGLMETNGDFEELKDLNGSSEELEEENNGNMEKLVELFLDKGLLDELKPIKVESQRRVRAALSIIDKMMSSRVVKGGNGANGIHGNDGAQLTSIEEEGRTAEASDDGDPAEVESCVAEKVELGQETTHDSTGTALDGGNDGSYFPWREELESLVRGGVPMALRGEIWQAFVGVGARRIPGYYNKLLDDRTETLDEKDLVDPVVNEQGSAPRKVTQPEKWKGQIEKDLPRTFPGHPALDEDGRNALRRLLTAYARHNPSVGYCQAMNFFAGLFLLFMPEENAFWALVGVIDDYFDGYYTEEMIESQVDQLVLEEVVRERFPKLAKHMEFLGVQVGWITGPWFLSIFINMLPWESVLRIWDVILFEGNRIMLFRTTLALLDLYGPALVTTKDAGDAITLLQSLAGSTFDSSQLVLTACMGFQSVREMGLQELRKKYRPEILTAMEERSKDRGSWKDKKGLATKLYSFKHDPSYVCSPVKSKEGLDGSKVNGETGPANLETYLSTSSILDNDLDQGVDLQDQVSWLKVELCKLLEEKRSADLRSEELETALMEMVEHDNRRMLSAKVEKLETEAYELRKAFSDKQEQEQVMLQILLRMEQEQKVAEDARIAAERDAAEQKHAAHLLQEKYEAAMTALSQMEKRAVMAETMLEATKQYQVGQVKANQSFTSSSPRADHVPAKINQEPNQTAPIRRIGLLSRGLGWLDKGKGRQNSNETSGA

SEQ ID NO: 2449 - protein, 265 aa, Zea mays
  VARIANT 3: note = Ancestral polymorphism is A, Derived polymorphism is S
  VARIANT 75: note = Ancestral polymorphism is S, Derived polymorphism is L
  VARIANT 83..265: note = Derived polymorphism lacks residues 83 to 265
  VARIANT 87: note = Ancestral polymorphism is V, Derived polymorphism is M
  VARIANT 104: note = Ancestral polymorphism is R, Derived polymorphism is W
  VARIANT 212: note = Ancestral polymorphism is W, Derived polymorphism is C
MAARAPLIMPRAASSAGPVPAAATTVARRQSAQCLHARGAVGGLFFDQRTARPVHHLLPGAKFGAIGSTAEAAPSEGLAQKLQGVDVFDLSGKTVPIVDLWKERKAVVAFARHFGCVLCRKRADLLAAKQDDMQAAGVALVLIGPGSVEQCKTRTTVHCMTNLVIYITEVYADPTHSSYDALEFAFGLFSTFTPAAGLKIIQLYREGYRQDWELSFEKNTRTKGGWYQGGLIVAGPGIDNILYIHKDKEAGDDPDMQDVLRACCS

SEQ ID NO: 2450 - protein, 436 aa, Zea mays
  VARIANT 145: note = Ancestral polymorphism is N, Derived polymorphism is I
MSEKKRRAGASAAGAASSSKKPRASSAASYAESLRSKLRPDASILATLRSLASASASKSKAAARSLADHDPCADPASSYIVVADQDSTSVTSRINRLVLAAARSILSGRGFSFAVPSRAASNQVYLPDLDRIVLVRRESARPFANVATARKATITARVLSLVHAVLGRGIHVTKRDLFYTDVKLFGDQTQSDAVLDDVSCMLGCTRSSLHVVASEKGVVVGRLVFADDGDRIDCTRMGVGGKAIPPNVDRVSGIESDALFILLVEKDAAFMRLAEDRFYNRFPCIILTAKGQPDVATRLFLRRLKVELKLPVLALVDSDPYGLKILSVYMCGSKNMSYDSANLTTPDIKWLGVRPSDLDKYRVPEQCRLPMTDHDIKVGKELLEEDFVKQNEGWVKELETMLRTKQKAEIQALSSFGFQYLTEVYLPLKLQEQDWI

SEQ ID NO: 2451 - protein, 123 aa, Zea mays
  VARIANT 56: note = Ancestral polymorphism is T, Derived polymorphism is A
MDILLGSGRFLARRTPLMLVPRCSRGSRDRSGSDKGETSADWDKAWAKFKKKGKRTLFSDFSPDKYVTWNPRRSEYPLSEEVDPIKRTERSNLMLWTSPQFTLVGAIIIVLTLLIYTLVVPPK

SEQ ID NO: 2452 - protein, 57 aa, Zea mays
  VARIANT 28: note = Ancestral polymorphism is D, Derived polymorphism is G
MDKQDERKKPHGKTDPKRGDIMKRIIKDLTGGGNDGGGGASDGGGNSGSGSTPAGAD

SEQ ID NO: 2453 - protein, 282 aa, Zea mays
  VARIANT 23: note = Ancestral polymorphism is L, Derived polymorphism is F
  VARIANT 127: note = Ancestral polymorphism is F, Derived polymorphism is I
  VARIANT 251: note = Ancestral polymorphism is P, Derived polymorphism is R
  VARIANT 271: note = Ancestral polymorphism is H, Derived polymorphism is Y
MAKNYPTVSAEYSEAVDKARRKLRALIAEKSCAPLMLRLAWHSAGTFDVSSRTGGPFGTMKHQSELAHGANAGLDIAVRLLEPIKEEFPILSYADFYQLAGVVAVEVTGGPEIPFHPGREVRFSSFFLSSIFICLWDKPQPPPEGRLPDATKGRSLVFTMIVLNDELIGSDHLRQVFGKQMGLSDQDIVALSGGHTLGRCHKERSGFEGAWTTNPLVFDNSYFKELLSGDKEGLLQLPSDKALLSDPVFRPLVEKYAADEKAFFDDYKEAHLKLSELGFADA

SEQ ID NO: 2454 - protein, 101 aa, Zea mays
  VARIANT 55: note = Ancestral polymorphism is V, Derived polymorphism is A
MQCKDKFLIQSTKVATGTEMDEIPLIRHTLYTVTLHVRSSTRKADKVIEEMKLKVVYTLPSYGGSNDSSVSFLGSRSFKAASDDLMMLKNASLEEHFPKNI

SEQ ID NO: 2455 - protein, 376 aa, Zea mays
  VARIANT 352..376: note = Derived polymorphism lacks residues 352 to 376
MSSAGGMDGSPPVAEFQPTVTHGGRFLRYNIFGNLFEITRKYQPPVMPIGRGAYGIVCSVMNFETREMVAIKKIANAFDNHMDAKRTLREIKLMRHLDHENIIGIRDVIPPPIPRAFNDVYIGMEFMETDLHQIIRSGQELSEEHCQYFLYQILRGLKYIHSAGVIHRDLKPSNLLLSANCDLKICDFGLARPSSDSDMMTEYVVTRWYRAPELLLNSTDYSAAIDVWSVGCIFMELIDRRPLFPGRDHMHQMRLITEVIGTPTDDELGFTRNEDARKYMRHLPQFPRRPFASLFPRVQPLALDLIERMLTFNPLQRITVAEALAHPYLERLHDVDDEPVCTEPFSFDFERQALTEDQMKQLIFNEAIELNPSFRY

SEQ ID NO: 2456 - protein, 139 aa, Zea mays
  VARIANT 51: note = Ancestral polymorphism is V, Derived polymorphism is I
  VARIANT 72: note = Ancestral polymorphism is S, Derived polymorphism is P
MSEALEKDKEIDEEEEEYVLLELDNCLYSDMSPGAPFVLSGLDTLTPTLIIGDSLKMIGEYEETIGTCYLFSETEAEPKPTSNEMAPSEENTDKQVSSSKEAPSKEVNHLASVQKILKFRPINAEHSQHRAYQHKDKEF

SEQ ID NO: 2457 - protein, 242 aa, Zea mays
  VARIANT 183: note = Ancestral polymorphism is R, Derived polymorphism is M
  VARIANT 182: note = Ancestral polymorphism is I, Derived polymorphism is T
MLAKGRRLAGRGGEMSAHYPFGPQDDDAIIKHRLLTRTTTTRGEPPLKKLQKKFMSFATEIEKDADNITDCERLYKAFLHEINTFELPLLKSKAVVDANIREKESFNELQVEIERQILQAKTDIEVLKKQLEQSKIERQHKEECEAIRKLICLQPPRSETEKLIADLEKEIADLEDENVACTRTLELRKKQFALLLHVVEELKISIEDEQKSIADELRAITGEQKMSTGEGSVGASDSMVVD

SEQ ID NO: 2458 - protein, 235 aa, Zea mays
  VARIANT 180: note = Ancestral polymorphism is A, Derived polymorphism is T
MDDYGNASAGTAAPQPQQYYCRSVSPPSRVSSSCSPPPPPPPPAVLQVVGNVPPPTVVLSPCAACKILRRRCADGCVLAPYFPPTEPAKFTTAHRVFGASNIIKLLQDLPESSRADAVSSMVYEAEARLRDPVYGCAGAVCRLQKQANELKVQLARAQADLLNAQAKHANLLALFCVEMANRRGNQQHPSPLTTMMDGGGGGGFGAAAYYQQTTLYDSDLDSATTWPDHEAQLWT

SEQ ID NO: 2459 - protein, 140 aa, Zea mays
  VARIANT 30: note = Ancestral polymorphism is T, Derived polymorphism is K
  VARIANT 59: note = Ancestral polymorphism is A, Derived polymorphism is V
  VARIANT 66..140: note = Derived polymorphism lacks residues 66 to 140
  VARIANT 73: note = Ancestral polymorphism is A, Derived polymorphism is V
  VARIANT 74: note = Ancestral polymorphism is V, Derived polymorphism is M
  VARIANT 75..140: note = Derived polymorphism lacks residues 75 to 140
  VARIANT 89: note = Ancestral polymorphism is V, Derived polymorphism is M
  VARIANT 90: note = Ancestral polymorphism is R, Derived polymorphism is C
  VARIANT 97: note = Ancestral polymorphism is G, Derived polymorphism is D
  VARIANT 104: note = Ancestral polymorphism is P, Derived polymorphism is L
  VARIANT 107: note = Ancestral polymorphism is V, Derived polymorphism is I
MATNPSNGAGADVPAAPAPVRLSVAAQAATIQPSSPRFFFFSSLAGSNPASPHRRIAIAVDLSDEYAFAVKWAVQNYLCPGDAVVLLHVRPTSVLYGVDWGSIPVSVADEDDAAEDAAFTSGGAAKEAGGELRRLHLTKA

SEQ ID NO: 2460 - protein, 351 aa, Zea mays
  VARIANT 100: note = Ancestral polymorphism is L, Derived polymorphism is P
  VARIANT 129: note = Ancestral polymorphism is R, Derived polymorphism is C
  VARIANT 203: note = Ancestral polymorphism is A, Derived polymorphism is V
MGSSTDHAAGARGKKQGSQLWKKALLHSSLCFVMGFFTGFAPSSVSDWTSAAAAAGGRVGSSHVVRALPAGGAGAVNRSLLAHDAGGGGLPRDPASPRPLLVVVTTTESTPAATGERAAALTRAAHALRLVAPPLLWVVVEAAPDAPATARLLRATGLMYRHLTYKDNFTSADAAAGRERHHQRNVALGHIEHHRLAGVVLFAGLGDVFDLRFFDELRGISAFGAWPVATMRRGERKVVVRGPACSSAAVTGWFSQDLGGSGTAAASASTARPGELDVHGFAFNSSVLWDPERWGRYPTSEPDKSQDSMKFVQQVVLEDFSKVKGIPSDCSEVMVWHVDTAAPSLQNKKRR

SEQ ID NO: 2461 - protein, 183 aa, Zea mays
  VARIANT 47: note = Ancestral polymorphism is H, Derived polymorphism is R
  VARIANT 1: note = Ancestral polymorphism is M, Derived polymorphism is T
MPSRRCRLYFPTLNSSFPLSLPSPSLSSPSVLAMDLGAPARRRLPIRLLLVSLTVLVVLTARSSAEVITLTEETFSDKIKEKDTVWFVQFCVPWCKHCKNLGTLWEDLGKVMEGADEIEIGQVDCGVSKPVCSKVDIHSYPTFKVFYEGEEVVKYKGPRDVESLKNFVLNEAEKAGEAKLEAD

SEQ ID NO: 2462 - protein, 404 aa, Zea mays
  VARIANT 94: note = Ancestral polymorphism is V, Derived polymorphism is M
  VARIANT 119..404: note = Derived polymorphism lacks residues 119 to 404
  VARIANT 126..404: note = Derived polymorphism lacks residues 126 to 404
  VARIANT 133: note = Ancestral polymorphism is K, Derived polymorphism is M
  VARIANT 151: note = Ancestral polymorphism is P, Derived polymorphism is L
  VARIANT 196..404: note = Derived polymorphism lacks residues 196 to 404
  VARIANT 212..404: note = Derived polymorphism lacks residues 212 to 404
  VARIANT 282: note = Ancestral polymorphism is L, Derived polymorphism is H
MAAAAAETQMGDGAPPPGALYSFGTPWPELNQGLTYTDTFRCAVDGFSCGFNDDGGVLRRWIKRIRNGQITVDGEVVTDPDMTLEPFAPYLLEVLYEDDDMVALNKPSGLQVLPKGLFQQRTVLAQLQLKDWKMASSCRFKRKDVQSHPVPVHRLGRGTSGLLLCAKTKVAKVRLASYFAEGAINAAKKRCKNLSLILEDIFSSIHIMYAVQVIEMIYRDKSEFSEERKISKFYRALVTGILDDDEVVVTQPIGLVHYPGVAEGLYAACSSGKPAMSKVCVLERLAHQNHTLVQVEIHSGRPHQIRIHLAYIGHPLVDDPLYGIGGHPNFVEPESTGTDSSFASDGGYERPLQPVPGDCGYHLHAHWLVLCHPTTNKMVKITAPLPQILQTREERRAAAEQTGG

SEQ ID NO: 2463 - protein, 273 aa, Zea mays
  VARIANT 200: note = Ancestral polymorphism is Y, Derived polymorphism is H
MCSRATGCPSPAPHRLTAPIPSRSRRSSCASTRPLDGGAYFFVGANSQVFANTGTLVTCVNNFPKTRDVGLGILKGFVGLYGGEDAESLILLVAWLPAAVSVAFVHTVCYMLYPRWWAGDELRPFFCFLYLSIALACFLLVMIVVQGQVPFSRAAYGVAAAPLLILLYDHELGEDYQVLSDLGKRRLMISVERWVFPLFYNTFWDNMVDLAVVFEMLFGSDYFEDYVGQLALASIASVEVEENSNRQEARAKVQEKIKELQNEREQKLTQHRR

SEQ ID NO: 2464 - protein, 169 aa, Zea mays
  VARIANT 156: note = Ancestral polymorphism is A, Derived polymorphism is T
  VARIANT 152: note = Ancestral polymorphism is R, Derived polymorphism is H
  VARIANT 122: note = Ancestral polymorphism is G, Derived polymorphism is S
  VARIANT 85: note = Ancestral polymorphism is R, Derived polymorphism is H
  VARIANT 15: note = Ancestral polymorphism is R, Derived polymorphism is C
  VARIANT 2: note = Ancestral polymorphism is S, Derived polymorphism is L
MSSLLQQGKAGVALRLLLAAALAGFLLVFATRTLVTSPVSASPSCSSEPLPRPVAEALVHYATSNTTPQQTSEEIGVALRVLQRHAPCNFMVFGLGLDSPMWAALNHGGRTVFLEEDAAWIGSLRGRHPALESHHVAYDTALADADALLGLRAHPACIAQPDRRGERGE

SEQ ID NO: 2465 - protein, 133 aa, Zea mays
  VARIANT 55..133: note = Derived polymorphism lacks residues 55 to 133
  VARIANT 85: note = Ancestral polymorphism is T, Derived polymorphism is K
  VARIANT 118: note = Ancestral polymorphism is T, Derived polymorphism is M
  VARIANT 125: note = Ancestral polymorphism is N, Derived polymorphism is T
MSKVIGDGDMVQQKLEEVDQDRREERVSDALENMSSNDVKKVVDGAVRASKVINWDNMAKLLVSDEIGAVKIMTNYLIRTRHQITKFYALKSQLQGVSLRIQTLKSTQAMGEAMKRVTESMWQMTRQMNLLAL

SEQ ID NO: 2466 - protein, 208 aa, Zea mays
  VARIANT 60: note = Ancestral polymorphism is L, Derived polymorphism is I
  VARIANT 92: note = Ancestral polymorphism is T, Derived polymorphism is A
MIFMVAETKKEALIVKTTIHGIMNQMIRDLPITNPVYLMLGTSFGSSAKGTGLKALEFALSICDSVDMYGFTVDPGYKEWTRYFSEVRKGHAPLHGRAYYQMMECLGLVKIHSPMRGGPGRTVRWLPTKATIEAARVASEKLLKRPGAESDDPLGTCTMIKKHKKGKAPNRSGLRDAAMKHLEDMKGATTYPLEQNAGGGYLCMINDR

SEQ ID NO: 2467 - protein, 613 aa, Zea mays
  VARIANT 166: note = Ancestral polymorphism is G, Derived polymorphism is V
  VARIANT 249: note = Ancestral polymorphism is R, Derived polymorphism is S
  VARIANT 277..613: note = Derived polymorphism lacks residues 277 to 613
  VARIANT 534: note = Ancestral polymorphism is P, Derived polymorphism is L
MAAAAATFGFLHPPIRKPAVPPLYILRLPTKPHSKTHPRSPPLLFLLLGRRRGGPIAAFPNTTSSSTNAPASPTYDVREAEAAVADLLREGGASADDAASIAARAPAYAAMLADGVRELDELGLWASWSSGARARLGLSGVVEMEMGRLGFRRKVYLMGRSKPDHGVVPLLESLGMRLSSAKLIAPYVAAAGLTVLIDRVKFLKEMLFSSSDYAILIGRNAKRMMTYLSIPADDALQSTLSFFEKMEARYGGVSMLGHGDVSFPYLIESFPMLLLCSEDNHLKPLVDFLEHIGIPKPKIASVLLLFPPIILSDVENDIKPRIREWEKAGIEQDYVSRMLLKYPWILSTSVIENYSQMLLFFNQKRISSTVLAIAVKSWPHILGSSSKRMNSVLELFHVLGISKKMVVPVITSSPQLLLRKPDQFMQNVLFFREMGVDKKTTGKILCRSPEIFASNVDNTLKKKIDFLTNFGVSKHHLPRIIRKYPELLLLDINCTLLPRMNYLLEMGLSKKDLCSMIFRFSPLLGYSIELVMKPKLEFLLRTMKKPLKAVVEYPRYFSYSLEGKIKPRFWVLQSRNIDCTLTEMLAKNDELFAEEYLGLGGLLEKPLQSSIGS

SEQ ID NO: 2468 - protein, 170 aa, Zea mays
  VARIANT 90: note = Ancestral polymorphism is P, Derived polymorphism is S
  VARIANT 89: note = Ancestral polymorphism is V, Derived polymorphism is I
  VARIANT 82..170: note = Derived polymorphism lacks residues 82 to 170
  VARIANT 78..170: note = Derived polymorphism lacks residues 78 to 170
  VARIANT 21..170: note = Derived polymorphism lacks residues 21 to 170
  VARIANT 3: note = Ancestral polymorphism is R, Derived polymorphism is C
MARMLCSRSAVLARRLGTQPQHDVVLSRRHNHTRQCAVKVLEEDAAGPSAPATDASEQSRRLEEAIDSAMARMAEPDWAPFQPGTSYFVPSRPADAALGVLALIGHAGSSWAPRQRRGTDSLPTWSAPSPPPPAGTRARPTSSKVSDYLGYPLRYSDVLNSELKHVHKNF

SEQ ID NO: 2469 - protein, 376 aa, Zea mays
  VARIANT 99: note = Ancestral polymorphism is A, Derived polymorphism is T
  VARIANT 168: note = Ancestral polymorphism is A, Derived polymorphism is V
  VARIANT 224: note = Ancestral polymorphism is E, Derived polymorphism is D
  VARIANT 297: note = Ancestral polymorphism is A, Derived polymorphism is G
MAISCFNGGAGWPEPVVRVQAVSDTCGDTIPERYVKPLSERPRLSPASDGSGPNIPVVDLSMLDVDATSSAVAAACREWGFFQAVNHGVRPELLRGARAAWRGFFRQPAEVRERYANSPATYEGYGSRLGTAKGGPLDWGDYYFLHLLPASLKSHEKWPSLPSSLRGATEEYGEEVLQLCRRVMRLLSSGLGLEAGRLQAAFGGEGGEGACLRVNFYPQCPQPELTLGVAGHSDPGGMTMLLVDDHVKGLQVRSPDGQWIVVEPVPDAFIVNVGDQIQVLSNAAYKSVEHRVTVSAAEDRLSMAFFYNPRSDLPIAPMAELVGPDRPALYPEMTFDEYRVFIRQRGLAGKAQLESLQVKATAGGGGCSAAAASSTS

SEQ ID NO: 2470 - protein, 212 aa, Zea mays
  VARIANT 25: note = Ancestral polymorphism is V, Derived polymorphism is I
MAMGAAAAASTCTRPASPGLARRRVRAQATSSWAGGAEALVRSGAVRAVRPRDAAEALGGEGFRLLDVRPEWERARASVRGSVHVPLFVGDDDMGPVTLLKKWVHLGYIGLWTGQAFTKMNERFVDDVAAAVDGSKDAKLLVACGEGLRSLIAVRMLHDDGYRNLAWLAGGFSKCADGDFADVEGESKLQYATIGGASYIFLQILLFLGVVK

SEQ ID NO: 2471 - protein, 135 aa, Zea mays
  VARIANT 114: note = Ancestral polymorphism is P, Derived polymorphism is L
  VARIANT 88: note = Ancestral polymorphism is E, Derived polymorphism is K
  VARIANT 87: note = Ancestral polymorphism is V, Derived polymorphism is I
  VARIANT 78: note = Ancestral polymorphism is C, Derived polymorphism is Y
  VARIANT 72: note = Ancestral polymorphism is R, Derived polymorphism is W
  VARIANT 66: note = Ancestral polymorphism is R, Derived polymorphism is C
  VARIANT 56: note = Ancestral polymorphism is P, Derived polymorphism is L
  VARIANT 55: note = Ancestral polymorphism is R, Derived polymorphism is M
  VARIANT 40: note = Ancestral polymorphism is A, Derived polymorphism is T
  VARIANT 29: note = Ancestral polymorphism is E, Derived polymorphism is K
  VARIANT 27: note = Ancestral polymorphism is Q, Derived polymorphism is P
  VARIANT 22: note = Ancestral polymorphism is P, Derived polymorphism is S
  VARIANT 12..135: note = Derived polymorphism lacks residues 12 to 135
MAELLGDPAWSQLHPWPCTNTSWSGLQCELVSDDARVLRATRLHLGPDVATPPFRPEARLDPTSLRGLPHLRTLSIFCCFGATQAPVELPPVLFTSSSSLEQIVLKSNPGLIGPIPATLVLILVNIVLYTPMITS

SEQ ID NO: 2472 - protein, 300 aa, Zea mays
  VARIANT 46..300: note = Ancestral polymorphism lacks residues 46 to 300
MWVAYNVVTHFLLHCTDCKAQAHWRVRPPEDYAIQGVRKWLIGASRLGDGGQRESRARRRPCIVATHSVPPFHHRSIAVSSHSFLRWHSFPSSIPPAPAPASLIRSFLLAVPPPPYSTTSSSAPNVDASSAMPSDRPSSPNISLPHMPAAAASHPARTPPPCTRAWMPLHAYYGRGTPTIEAPIHDPIPNPASNLPQSAVNLPPNIFPLYIVVSAIKDLTEARPPNHYHSPPIHWSRETLEALRRSSLICSLLQRGESHLMFGTFCFLGMWVHFGCFRGSGKHFALYIFLHLFNVGPQMI

SEQ ID NO: 2473 - protein, 206 aa, Zea mays
  VARIANT 151: note = Ancestral polymorphism is V, Derived polymorphism is A
  VARIANT 119: note = Ancestral polymorphism is D, Derived polymorphism is E
  VARIANT 117: note = Ancestral polymorphism is T, Derived polymorphism is A
  VARIANT 115..206: note = Derived polymorphism lacks residues 115 to 206
  VARIANT 110: note = Ancestral polymorphism is E, Derived polymorphism is V
  VARIANT 104: note = Ancestral polymorphism is N, Derived polymorphism is K
MATMDARLHLPRPRRALRRRFIPSPMETGKAQGTDRQPLLIMRSIPCVLASFHCCWRLGVWGDRCGLVVASILDSWSILTVRGSRATWTSRRKHRVFATPDNQNRRRHWELLVIERTCDRIIWLAISEESVANLQLLVSWKLARHSGCATVRVKARTCLCDDRSPPNPVPDDRTKQLETSDWSSVDVATRWIATTHTLTPALISYR

SEQ ID NO: 2474 - protein, 555 aa, Zea mays
  VARIANT 287: note = Ancestral polymorphism is G, Derived polymorphism is R
MQQRRKSVFASAPFAMKQAALGAGVAARKNGAPLSLAAVVFALFVFATFLYNEDIKSITDFQFSSGAIRAKSPDLHLLQEAEAAAHAAVNTLAKRGEEVIVRVLEVEAPPVVNTSSVLAAAAKASAKANAVDVGQEKERDVTLPTVTGGRGGADEAQRRADEEVAEKAASAKAAAATAALRGVVSVPQTCDLYRGSWVYDEVSAPVYKEGECEFLTEQVTCMRNGRRDDSYQKWRWQPAGCDLPRFDARLLLERLRNKRLMFVGDSLNRNQWESMVCLVQSVIPDRGQKTLTKFVNGGSSNVFYAHEYNATVEFYWAPFLVESNSDNPKVHSVPDRVIQWHAIAKHARNWIGVDYLVFNTYIWWLNTLDIKVLKQGSSFDDQGSTEYVEVDRPVAYKEVLTTWAKWVDRNIDPNRTTVFFMGMSPNHITPEAWGNKGGIKCAMETLPIASNRSAALDVGTDWRLYAGAREVLPTLRRVPVHFVDITALSELRKDAHTSVHTLRQGKLLTPEQQADPKTYADCIHWCLPGLPDTWNQFLYARIASSPWPNDAQAQQ

SEQ ID NO: 2475 - protein, 388 aa, Zea mays
  VARIANT 133: note = Ancestral polymorphism is C, Derived polymorphism is R
MSCTVAIPSSPVFSPSRRPLSCKAASASPEPTVPASTAAPAPAAAAGSPLRPFALRALLREEVSPSPPPQPTSAAAVALVPSGAALKRRRPTPLVVPASGAAAAAAAAAAVAAVEADPRNEVEEEGEEFAAYCRRGKGRRRVEMEDRHVAKVALGGDPQVALFGVFDGHGGKNAAEFAAENMPKFMAEELTKVNGGEIEGAVKRGYLKTDEEFLKRDESGGACCVTAVLQKGGLVVSNAGDCRAVLSRAGKAEALTSDHRASREDEKERIENLGGFVVNYRGTWRVQGSLAVSRGIGDGHLKQWVVADPDTTTLLVDQQCEFLILASDGLWDKIDNQEAVDLARPLCINNDKTSRMAACRMLTETSISRGSTDDISVVIVQLQKFSSS

SEQ ID NO: 2476 - protein, 225 aa, Zea mays
  VARIANT 137: note = Ancestral polymorphism is W, Derived polymorphism is C
  VARIANT 118: note = Ancestral polymorphism is T, Derived polymorphism is I
  VARIANT 53: note = Ancestral polymorphism is K, Derived polymorphism is M
MAEPAEHRPAEEEEAAAAGEDEDTGAQVAPIVKLEEVAVTTGEEDEDALLDMKAKLYRFDKEGNQWKERGTGTVKLLKHKDTAKVRLVMRQAKTLKICANHLGFDIGEYSLPLFSVRTVVATTKMQEHAGSDKSCVWHALDFADGELKEEMFAIRFGSVENCKKFKDTVEEIAEQQGKSEEKENDEVSTAASDLAQKLTVAEPSKEENAEKEEAPASDDKKDAKE

SEQ ID NO: 2477 - protein, 258 aa, Zea mays
  VARIANT 234: note = Ancestral polymorphism is T, Derived polymorphism is R
MAATSLSSSLPRATAKLTGVPRSSSYYTQLIFCSRHPFQKAAAAAAFQKLPPELLRLSYPARNNKHARTSWRRATDNDQAAPAAAQGTTSTPPLPGSPVPSAERSPVTPGNGQPQQPVADANGSAPSEPPKRAPLTARERLRAARVLGKYAEPSVKGSSSKPAKPEFGSGVLDALREADAKKAGGGGGGGRRGSRLPEAPGNLFDDSKRGMPKDGWTFELPFGVDVFLVLVSFTLITTIMFGTAFLVWKLGAIHFNEY

SEQ ID NO: 2478 - protein, 1006 aa, Zea mays
  VARIANT 234: note = Ancestral polymorphism is T, Derived polymorphism is R
  VARIANT 488..1006: note = Derived polymorphism lacks residues 488 to 1006
MAATSLSSSLPRATAKLTGVPRSSSYYTQLIFCSRHPFQKAAAAAAFQKLPPELLRLSYPARNNKHARTSWRRATDNDQAAPAAAQGTTSTPPLPGSPVPSAERSPVTPGNGQPQQPVADANGSAPSEPPKRAPLTARERLRAARVLGKYAEPSVKGSSSKPAKPEFGSGVLDALREADAKKAGGGGGGGRRGSRLPEAPGNLFDDSKRGMPKDGWTFELPFGVDVFLVLVSFTLITTIMFGTAFLFSGAGAGAGAETKGDERGRKQVMVVLVGPPGSGKSTFADAVVGGSTAGRHWVRVCQDTIGNGKAGTKIQCLKAASDALKEGKSVLVDRCNLEREQRADFVKLGGTLRADVHAVSLDLPAKVCISRAVSRKGHEGNLQGGKAALVVNRMLQKKETPLLTEGFSRIMCCNDDGDIKKAVDLYNGLGPSDSLPSGVFGQKSKRPVQVGIMKFLKKTDASVVETSSGPKQALTEIKPAQQNPLPKQENVEAGFACSMEVEKGLNDKMENEEHAKGSDYCDVGSRTLAFPSISTADFQFDLDRASDIIVDTAANFLQKFDNIRLVLVDLSEKSRILSLVKQKAAKKSIDSNRFFTYVGDITQLHTKGGLQCSVIGNAANCCVIMFLGEPNWLFRFWRRRLKPGGGGVNTAIYSAAGESLQHATKKCADALRPGTSVVVPLPSTSPLHQREGVTHVIHVLGPNMNPMRPDCLKNDYTRGSKILREAYTSLFENFASIVQSYMGKQNNESGAEKSASGRISPNDTKMKREDNHESERMKKHKLFQPIMTAKRQHECTKVNAPNCHDNAMTSSAAPSQTRQVDNKRNDVVTSKTWGSWAQSLYELAMNPEKYKNSDSILETSDEYVVLKDLYPKAKRHVLVIARMDGLDSLADVKKEHLPLLRRMHSAGVKWAHKFLEEDAALEFRLGYHSVPSMRQLHLHIISQDFNSASLKNKKHWNSFTTSFFRDSVDVIEEIEQNGSTTTSSDEKRPLPVLACLLKIIGDGSSI

SEQ ID NO: 2479 - protein, 606 aa, Zea mays
  VARIANT 372..606: note = Derived polymorphism lacks residues 372 to 606
  VARIANT 359: note = Ancestral polymorphism is N, Derived polymorphism is I
  VARIANT 353..606: note = Derived polymorphism lacks residues 353 to 606
MDTHIGSVNGAASNQTVGCPASAPGCPMASTPAQPAATLSAGEASLGRHLARRLVQVGVNDVFAVPGDFNLTLLDHLIAEPGLRLVGCCNELNAGYAADGYARARGVGACAVTFTVGGLSVLNAIAGAYSENLPVICIAGGPNSNDYGTNRILHHTIGLPDFSQELRCFQTVTCHQAVVNNLDDAHEQIDTAIATALRESKPVYLSISCNLPGLPHPTFSRDPVPFFLTPRTSNKMGLEAAVEATVEFLNKAVKPVLVAGPKLRVAKAGKAFVDMVDASGYAYAVMPSAKGLVPETHPHFIGTYWGAVSTAFCAEIVESADAYLFAGPIFNDYSSVGYSFLLKKEKAIIVQPERVIVGNGPAFGCVMMKEFLSELAKRVNKNTTAYENYKRIFVPEGQPLESEPNEPLRVNVLFKHVQKMLTGDSAVIAETGDSWFNCQKLKLPEGCGYEFQMQYGSIGWSVGALLGYAQGANHKRVIAFIGDGSFQVTAQDVSTMLRCEQNSIIFLINNGGYTIEVEIHDGPYNVIKNWNYTGFVDAIHNGLGKCWTSKVKSEEELTAAIETALGEKKDCLCFIEVIAHKDDTSKELLEWGSRVSAANSRPPNPQ

SEQ ID NO: 2480 - protein, 354 aa, Zea mays
  VARIANT 305: note = Ancestral polymorphism is C, Derived polymorphism is Y
  VARIANT 250: note = Ancestral polymorphism is S, Derived polymorphism is L
  VARIANT 245: note = Ancestral polymorphism is N, Derived polymorphism is K
  VARIANT 167: note = Ancestral polymorphism is S, Derived polymorphism is F
  VARIANT 111..354: note = Derived polymorphism lacks residues 111 to 354
MSDQRSTLARLKRYSIDIIVIVVDIMPPRKYASGSQKRKRRKHTEDFVLSQKGAMDKFLKRDMGYPRNTNELAIVLVEPVDEQIGGNSEYQGPTDHNVSDHDNISHPTATESASVDEPPVVTIDIYDPRNWNNLDNKARDTLVEKGPIREKNLVFPMDGNSRHFSYSHYFRKLSNAHDGYRDWKHISERLKEHENSAEHITDVSHEEQMSLIVRCVKISSNNIEVEEYFLGFLKVDDTSGLGLFNVLIDSLESFGLNIDDIRGQGYDNGSNMKGKHQGVQKRLLGKNPRAFYMPCACHSLNLTLCDMAKSCSKVVSFFGIVQRIYTLFSGSTKRWKVLLDHVPSLTVKSLCNTR

SEQ ID NO: 2481 - protein, 423 aa, Zea mays
  VARIANT 98..423: note = Derived polymorphism lacks residues 98 to 423
  VARIANT 340..423: note = Derived polymorphism lacks residues 340 to 423
MMREGDARVTLLRSKLHGLVERNRDLEEENKQLRHQVSQLKGQISSLEGQETNKRMLWKKLENSATGISYSKEKQFVQSNDGAKEAVDLNSSLSHSRQQFSSVNQVRSRAPRVPNQPPNPTSTQPKATVRKEGCMAPPPPPPPLPSKLQRSTKAIQRVPEVVELYRSLVRREGKNNAKSGSVGIPAATNSREMIGEIENRSAYVLAIKSDVENQGNFVNFLASEVQNAAYKKIADVEEFVKWLDGELSYLVDERAVLKQFPNWPEKKADALREAAFNYRDLKNIESEASSFHDDRRVATPMALKRMQALQDKIEQGIHNTERVRDSASGRYKDLKIPWEWMLDSGVISQVCLPFTLKMASLKLAKEYMNRIVKTLKSDPFANEEELLLQGVRFAFRIHQLAGGFDEGCRKAFQELNTNASKSE

SEQ ID NO: 2482 - protein, 312 aa, Zea mays
  VARIANT 95: note = Ancestral polymorphism is P, Derived polymorphism is L
  VARIANT 103..312: note = Derived polymorphism lacks residues 103 to 312
  VARIANT 198..312: note = Derived polymorphism lacks residues 198 to 312
  VARIANT 200: note = Ancestral polymorphism is R, Derived polymorphism is W
MLIPAYSRCNTAPASQPRPPARRDSRDPPAHRIPRRELPTRPPQSPPRTPHPPSTIPACHVRNSSPRPAKQFGAGAAVALAAALVGILACLVLGLKPPAYAVQVLAIFSLGNASSSAALSPGFDATVRTDNRNDRLGVRYEGGRGRVSVSYGGALLADDARPALYQAPRNVTVVVARARGSGVRLSRSVREQLAAAERLRLVSFDVDVDVPVRLQLGEVRTWAVPLRACCTVAVDRLAVDARVVSSSCDVKPPSIVTDVDCTTCDSKRPGKNCLIKLEWVCDYYHIKRQIESELIQSGGIASSKPFLDLSKP

SEQ ID NO: 2483 - protein, 305 aa, Zea mays
  VARIANT 48..305: note = Derived polymorphism lacks residues 48 to 305
  VARIANT 101: note = Ancestral polymorphism is P, Derived polymorphism is S
  VARIANT 113: note = Ancestral polymorphism is G, Derived polymorphism is E
  VARIANT 155..305: note = Derived polymorphism lacks residues 155 to 305
  VARIANT 168..305: note = Derived polymorphism lacks residues 168 to 305
  VARIANT 197: note = Ancestral polymorphism is P, Derived polymorphism is L
  VARIANT 228..305: note = Derived polymorphism lacks residues 228 to 305
  VARIANT 231..305: note = Derived polymorphism lacks residues 231 to 305
MIDVLFGVLLSGGLDSSLVAAIIVRHLTGTEAARRWGTKLHSFCVGLEGSTDLKAAREVAEYLGTLHHEFHFTVQDDIDAIEDVIYHTETYDVTTIRASTPMFLMSCKIKSLGVKMVISGEGSDELFGSYLYFHKAPNKEELHRETCRKVKALHQYDCLRANKATSAWGLEARVPFLDKEFINAAMSIDPEWKMVWPDLGRIEKWVLRKAFDDEEQPFLPKVHILYRQKDQFSDGVGYSWIDGQKAHATSNIASGDDGEHRTKMWTEHRGWMKQPARHGGRSNSGQWQSSESRLSKRCELRCMGD

SEQ ID NO: 2484 - protein, 178 aa, Zea mays
  VARIANT 1: note = Ancestral polymorphism is M, Derived polymorphism is I
  VARIANT 10: note = Ancestral polymorphism is R, Derived polymorphism is P
MRRLFLGDWRAAASAVNAHSAAAGRRFNRTLVQCQTRVRTLKHKQRYKEELLKQPASGWCHLPRLHAFLASPDESTPGFPAKAPAFVKQEEEEKVAGGGIGLVGSWTVPRRPRNAAAAGTGFCPGAVVTKLAEVYERVELARIGAEKVKTEMQQEMGGVEGHVQRPEGGAVEAENYCH

SEQ ID NO: 2485 - protein, 127 aa, Zea mays
  VARIANT 80: note = Ancestral polymorphism is R, Derived polymorphism is H
  VARIANT 60: note = Ancestral polymorphism is E, Derived polymorphism is K
  VARIANT 59: note = Ancestral polymorphism is T, Derived polymorphism is A
  VARIANT 53: note = Ancestral polymorphism is A, Derived polymorphism is V
  VARIANT 43: note = Ancestral polymorphism is G, Derived polymorphism is R
  VARIANT 30: note = Ancestral polymorphism is E, Derived polymorphism is V
  VARIANT 18: note = Ancestral polymorphism is A, Derived polymorphism is T
  VARIANT 15: note = Ancestral polymorphism is R, Derived polymorphism is M
  VARIANT 9: note = Ancestral polymorphism is G, Derived polymorphism is R
MARESNMAGVKSFDRLSAYNFDLFGDIFNEIQLKHLCIVFQRGVDQDMVILMAAKASHTENQDDIDAIIVGMMADPKEARAGVQEIHFLLVNPSNKRTALTYLDGEGRMHRVSKGAPEQVLFSFLST

SEQ ID NO: 2486 - protein, 1040 aa, Zea mays
  VARIANT 756..1040: note = Derived polymorphism lacks residues 756 to 1040
  VARIANT 678..1040: note = Derived polymorphism lacks residues 678 to 1040
MVPRSDVGGGGSSNASGVVEIDEDLHSRQLAVYGRETMRQLFASNVLISGLNGLGAEIAKNLALAGVKSVTLHDTGNVEMWDLSGNFFLSEDDIGKNRAVACVAKLQELNNAVLIYTLTEELTTEHLPKFQWSYLQLFDFQVVVFTDISLDKAFEFDDYCRNQQPPISFIKTEVRGLFGSVFCDFGPEFSVLDVDGEDARTGIIASISITTDNRTMVSCVDDERLDFQDGDLVVFSEVQGMTELNDGKPRTVMCAGPFSFCIEDTSNFGTYTKGGIVTQVKERKILKFKSLRDSIREPGNFPLSDCSKFTRPPLLHFAFIALDKFRKEFGRFPGVACGLDAQRFVEFTASINEATIDYKIEDELDENLLRLFASGSKAVLNPMATMFGGIVSQEAVKACSGKFHPLYRFFYFDSSESLPTHQLDPKDLKPLNSRYDAQISVFGSKLQKKLRDANVFVVGSGALGCEFLKNLALMGVSCSRKGKITITDDDVIEKSNLSRQFLFRDWNIGHPKSTVAATAASAINSCLHIDALQNRACLETEHVFHDAFWEILDVVINALDNVNARMYMDMRCLYFQKPLLESGTLGTKCNTQVVIPHLTENYGTSRDPPEKQAPMCTVHSFPHNIDHCLTWARSEFEGLLEKTPKEVNSFLSNPAQYAASMKKAGDAQARELLEHVCECLEKECCGTFDDCITWARLKFEDYFSNRVKQLTFTFPEDAATSMGAHFWCAPKRFPHPLEFSAADSSHIQFIMSASILRALSFGISIPDWAKDTDNLADAVSKVAVPEFKPKSGVKIETDVKAENISSASVDDAAVIEDLLSRLKACTKKLPPRFQMKPIQFEKDDDTNFHMDLIAGLANMRARNYGIQEVDKLKAKIIAGRIIPAIATSTAMATGLVCLELYKVLARGHPIEDYRNTFANLALPMLTTSEPLPPTVIKHGDMTWTVWDRWSIEGDITVAELLKWLSDKGLSAYSVSCGTSLLYNIMFTRHKDRLSKKIRDVAKEVAKVDIPEYRKHLDVVVACEDDNGKDVDIPLISIYFR

SEQ ID NO: 2487 - protein, 405 aa, Zea mays
  VARIANT 60: note = Ancestral polymorphism is C, Derived polymorphism is Y
  VARIANT 288: note = Ancestral polymorphism is R, Derived polymorphism is Q
MEKGQLSNEWAQEHNEQYLHDDWADSLGVFIENPEYVNTFEIDDAVKMYEEKEAFQFLHCWKMLRNEPKWNDKVLELNNTPTRKTQQPQGPCNPIGTQPSNENATIARLEGRDSAKNEEVLQQMQERNEKTEEKQEQQMQEILTLKGNKMRLIEKMFDLQKHEMEVRSKLKEEQLSLTKQDIEARAKQSEAQLLTTELGIMGADLDKLSPSIDDAVKMYEEKEAFQFLHCWKMLRNEPKWNDKVLELNNTPTRKTQQPQGPCNPIGTQPSNENATIARPEGRDSAKKRSKCKRGMKKTEEKQEQQMQEILTLKGNKMRLIEKMFDLQKHEMEVRSKLKEEQLSLTKQDIEARAKQSEAQLLTTELGIMGADLDKLSPSVRAYYSAMQQQIMERRGIITPHDSNGA

SEQ ID NO: 2488 - protein, 66 aa, Zea mays
  VARIANT 51..66: note = Derived polymorphism lacks residues 51 to 66
  VARIANT 47: note = Ancestral polymorphism is R, Derived polymorphism is H
  VARIANT 34..66: note = Derived polymorphism lacks residues 34 to 66
  VARIANT 22: note = Ancestral polymorphism is S, Derived polymorphism is F
MFTALESLKKKGNKNRADGPSSRKNHGAGPALQQSRNCLKGGLLGSRAAHYCLASFTADDWLDNRI

SEQ ID NO: 2489 - protein, 216 aa, Zea mays
  VARIANT 176: note = Ancestral polymorphism is G, Derived polymorphism is R
  VARIANT 141: note = Ancestral polymorphism is T, Derived polymorphism is I
  VARIANT 134: note = Ancestral polymorphism is G, Derived polymorphism is S
  VARIANT 129: note = Ancestral polymorphism is C, Derived polymorphism is S
  VARIANT 109: note = Ancestral polymorphism is S, Derived polymorphism is N
  VARIANT 79: note = Ancestral polymorphism is I, Derived polymorphism is F
MDSRLAIAALLLLASASSAAAAADGGKVAVALYYESLCPYSARFVVNHLAKVFADGLREVVDLTLVPYGNARIHPGGEISCQHGPYECLLNTVEACAIDAWPDLDVHFSFIYCVEDLVVKRQYKDWESCFEKLGLDPKPVTECYKSEHGHKDYENFEAYICKAYKGTPPKACQGLGRLQMALETAAEARNGVSYNSGVSKLATAEDEGGEHKVGEY

SEQ ID NO: 2490 - protein, 94 aa, Zea mays
  VARIANT 85: note = Ancestral polymorphism is S, Derived polymorphism is Y
  VARIANT 64: note = Ancestral polymorphism is D, Derived polymorphism is H
  VARIANT 48: note = Ancestral polymorphism is R, Derived polymorphism is L
  VARIANT 39: note = Ancestral polymorphism is Y, Derived polymorphism is N
  VARIANT 37: note = Ancestral polymorphism is L, Derived polymorphism is H
MAGPRRLLLLVPLLVLLGAHPPQCGSAEEGTKVSLELYYESLCPYCSRFIVNRLAGIFEDGLIDAVHLRLVPYGNARVASNSEISCQKHLATQQ

SEQ ID NO: 2491 - protein, 170 aa, Zea mays
  VARIANT 115: note = Ancestral polymorphism is G, Derived polymorphism is D
  VARIANT 111: note = Ancestral polymorphism is T, Derived polymorphism is A
  VARIANT 62: note = Ancestral polymorphism is D, Derived polymorphism is N
MDEIMNKVGAYWLGQRANKEISSAGDDLDSLSTSVGDGAKWLVNKLKGKMQKPLADLLKEHNLPVGLFPREATNYEFVPETRRLTVYIPSPCEVGYRDGSELRFDATVSGTLGEGRLTEVEGIKTKVLVWARVTAVKADAAKVHFTAGIKRSRSRDAYEVVRGGITVDEF

SEQ ID NO: 2492 - protein, 192 aa, Zea mays
  VARIANT 77: note = Ancestral polymorphism is H, Derived polymorphism is Y
MYTARKKIQKEKGLEPSEFEDSVAQAFFDLENGNQELKSDLKDLYINNAIQMDVTGSRKAVVIHVPYRLRKAFRKIHVRLVRELEKKFSGKDVVIVATRRIVRPPKKGSAVLRPRTRTLTAVHDGILEDVVYPAEIVGKRVRYRLDGSKIIKIFLDPKERNNTEYKLETCTAVYRRLCGKDVVFEYPMTENA

SEQ ID NO: 2493 - protein, 222 aa, Zea mays
  VARIANT 29..222: note = Derived polymorphism lacks residues 29 to 222
  VARIANT 30: note = Ancestral polymorphism is R, Derived polymorphism is M
MARVYVGNLDSRVTSGELEDEFRVFGVLRRRDAEDAISDLDGKNGWRVELSRNSSGRGGRDRYGGSESKCYECGETGHFARECRLRIASGGLGSGRRRSRSRSRSRSGSPRYRRSRSRSRISVDEAHAFIYMNIFLTMFFFFLFSCHANQWALLPLFLRPVVRFAARVAEGGPAAAVATILHRAGALPRNRGLERLVRDDALHGRGQDCIASFVVGVMRCLC

SEQ ID NO: 2494 - protein, 290 aa, Zea mays
  VARIANT 16: note = Ancestral polymorphism is S, Derived polymorphism is L
  VARIANT 26..290: note = Derived polymorphism lacks residues 26 to 290
  VARIANT 149..290: note = Derived polymorphism lacks residues 149 to 290
  VARIANT 192..290: note = Derived polymorphism lacks residues 192 to 290
  VARIANT 196..290: note = Derived polymorphism lacks residues 196 to 290
MAADSTMGFHQGITASLYNHHMLSFQSNNDVGIDGGDDATGGMVMAPGSVSGGSGNAGLFLSPNTGVVGNAPGVAPSRNSSGDAFRGTGTPKYKGEGHARRPSRSSSFGGHRGGGVGGAGKGGAGSSGQPPLSSNRSIRKPGNGHGRHQRVVNQPDTTGFQPAPAPGLLQTPARSPPAPQNAAMHVPVSASWLQHQDPHVSSSLSASEKPANPLLPLPKATHAAPRALPKNSNTALPQGGSQGETSKGFNFQFGSINMNGLPQFPARTSSTPPNLDEQKRKQLSCLLLFI

SEQ ID NO: 2495 - protein, 153 aa, Zea mays
  VARIANT 106: note = Ancestral polymorphism is R, Derived polymorphism is C
  VARIANT 110: note = Ancestral polymorphism is R, Derived polymorphism is H
MQRDTSSSDVSASHVGRVRRRKHPTENKYKSMLSRTYSTVWMIGGFAFIIYMGHLYIWAMVVVIQIYMARELFNLLRKSSEEKQLLGFRVLNWHFFFMAMLYTYGRFLSHQLMNTLTSDHLLYKVVSGLIKYHMVICYFLYIAGRLSIPWNMQ

SEQ ID NO: 2496 - protein, 327 aa, Zea mays
  VARIANT 106..327: note = Derived polymorphism lacks residues 106 to 327
MEFTAPPPATRSGGGEERAAAEHHQQQQQATVEKEHMFDKVVTPSDVGKLNRLVIPKQHAERYFPLDAAANDKGLLLSFEDRAGKPWRFRYSYWNSSQSYVMTKGWSRFVKEKRLDAGDTVSFGRGVGEAARGRLFIDWRRRPDPPVVHHQYHHHRLPLPSAVVPYAPWAAAAHAHHHHYPAAGVGAARTTTTTTTTVLHHLPPSPSPLYLDTRRRHVGYDAYGAGTRQLLFYRPHQQPSTTVMLDSVPVRLPPTPGQHAEPPPPAVASSASKRVRLFGVNLDCAAAAGSEEENVGGWRTSAPPTQQASSSSSYSSGKARCSLNLDL

SEQ ID NO: 2497 - protein, 607 aa, Zea mays
  VARIANT 23: note = Ancestral polymorphism is C, Derived polymorphism is Y
  VARIANT 31: note = Ancestral polymorphism is L, Derived polymorphism is H
MATMARSGAVKLCCCTSALLLLCCFLLPGALAEERFYEFVVRGTPVKRLCKTQEIITVNGQFPGPTIEVYSGDTLAVRAVNLARYNVTLHWHGLRQLRNGWADGPEFVTQCPIRPGGSYTYRFTVEGQEGTLWWHAHSSWLRATVHGALIIHPRRGVPYPFPKPHTEAPVILAEWWRRDPIAVLRQSMITGAPPNVSDALLINGQPGDLLPCSSQETSIIPVVAGETSLLRIINAAMNTELFVSLAGHRMTVVAADAMYTKPFETDVVLLGPGQTTDVLVTAHAAPGRYYLAARAYASAQGVPFDNTTATAIFQYKNAPGCPTTSGAGAGAGAGAGTFSGPVGRSSRSSGYLGRAGPQPMLPFLPAFNDTNTATAFSNRLRSPVPVKVPGPVTQEVFTTVGFGLFNCRPGPFCQGPNNTRFGASMNNVSFQLPDTVSLLQAHYHHIPGVFTDDFPALPPVFFDFTSQNVPRALWQPVKGTRLYRVRYGAVVQIVFQDTGIFAAEEHPMHIHGYHFYVLATGFGNYDPRRDAARFNLVDPPSRNTIGVPVGGWAVVRFVADNPGVWLVHCHIDAHLTGGLAMALLVEDGESELEATVAPPLDLPICVL

SEQ ID NO: 2498 - protein, 161 aa, Zea mays
  VARIANT 43: note = Ancestral polymorphism is I, Derived polymorphism is T
MGNSLRCCLACVLPCGSFDVIRIVHLSGHIEEYARPVTAGEVTAAHPNHVLSRPCSQGGARRILIVAPDSELKRGCFYFLVPASSVPEKKRRPQPQQKKARPQKTPPPSAAVAKEAKDNGDRYLAEVLSEGKASLKRRRSSRSTVWRPHLHPILEEAASDS

SEQ ID NO: 2499 - protein, 122 aa, Zea mays
  VARIANT 35: note = Ancestral polymorphism is S, Derived polymorphism is R
MAMVTIDNAAATIAAAEKPQDAEKPDYAPYNGTSSAADGGTGAGVRGGGGGGRVVDSVVARYLLAIVSLGLLYSLAQAVRRAYRMRGGADPVSSASGRLLDFVGDQASGCFQLLVCNYILLA

SEQ ID NO: 2500 - protein, 446 aa, Zea mays
  VARIANT 3..446: note = Derived polymorphism lacks residues 3 to 446
  VARIANT 12..446: note = Derived polymorphism lacks residues 12 to 446
  VARIANT 202..446: note = Derived polymorphism lacks residues 202 to 446
MGQGSPGGMGKQPGLPGDRKQGDGKKEKKYEPPAAPSRVGRKQKRQKGSEAAARLPAVAPLSKCRLRLLKLERVKDYLLMEEEFVASQERLRPSEDKTEEDRSKVDDLRGTPMNVGSLEEIIDESHAIVSSSVGPEYYVGILSFVDKDQLEPGCAILMHNKVLSVVGILQDEVDPMVSVMKVEKAPLESYADIGGLDAQIQEIKEAVELPLTHPELYEDIGIRPPKGVILYGEPGTGKTLLAKAVANSTSATFLRVVGSELIQKYLGDGPKLVRELFRVADDLSPSIVFIDEIDAVGTKRYDAHSGGEREIQRTMLELLNQLDGFDSRGDVKVILATNRIESLDPALLRPGRIDRKIEFPLPDVKTRRRIFQIHTSKMTLADDVNLEEFIMSKDEFSGADIKAICTEAGLLALRERRMKVTHADFKKAKEKVMFKKKEGVPEGLYM

SEQ ID NO: 2501 - protein, 170 aa, Zea mays
  VARIANT 50: note = Ancestral polymorphism is K, Derived polymorphism is I
MGKHLPAAATAAAAAAVRSYARSLRVPSDTAASAGRADKTPSAPLDTPRKSAAAAAAASSGRAEVRDLAAACGLEADERVPLAEVVSDCTRRWFQDALKEARAGDITMQVLVGQMYRSGYGVNKNEHKARVWMEKASRYRSTVWKVSNKRPGYNASDSDSGTDDAKETCK

SEQ ID NO: 2502 - protein, 262 aa, Zea mays
  VARIANT 63: note = Ancestral polymorphism is E, Derived polymorphism is K
MLNVTLLYPYIKHPTHTQSIQASTASSAPLLPSPSIALTRSHSHPRRLAVSAAEPLERRPRQELATPRPGLGAAPPRPHETAELDAEAALGGESAEERNRFLVLRLYEALNARDARRAQELLAPDLEWWFHGPPARQHMMRLLTGALDHRGFVFSPRSVDAFGSTVVAEGADDARQLYWVHAWTVGPHGVITQLREYFNTDLTLLSGQPDVVAAGAAPPKQKDAASSSSPSVAAPAAGPKCLWQSRRADSAHKSLPGLVLAI

SEQ ID NO: 2503 - protein, 564 aa, Zea mays
  VARIANT 121..564: note = Derived polymorphism lacks residues 121 to 564
MPPDSNGSFDGHEIVEVVGEPGTPSGTTARLMDFIPIDIYIPSVERGALSESRRKRRFLDFLRAHPSKDWFLRSTFVGRLRRRSHGHQESADDGSDDGGRRGPRRRFRVPFVRKIKWRKLWTYAVSWCRKPENFAMIIWLAFVGAGLLLLLMLMTGMLDAAIPDDERRKKWTEVINQILNALFTIMCLYQHPKIFHHLVLLLRWRPDGDREEIRKVYCKDGAARPHDRAHMLLVVALLHVTCFAQYYCCALFWSYTRKDRPDWALNIGYGLGTGCPVVAGLYTAYSPLGRKEPDTESSSAAPADAAQQDHHTSRTENDGVEITIYNRRVVVSSPEWSGGLFDCCDDGTVCALSATCTFCVFGWNMERLGFGNMYVHAFTFILLFVAPFLIFSVTALNIHDDEIRDTVVAVGVLLGFCGFLYGGFWRSQMRKRYKLPGGRSWWWCGSAAVGDCAKWLFCWTCALAQEVRTANFYDVEDDRFVAILGARNGEGRPVLLPLPREASTTTYTRSMSCPPKLDDAEDAGGVTSSLGLEMVEAAAAMERSATYHPMRPPLPPLMNERRQE

SEQ ID NO: 2504 - protein, 447 aa, Zea mays
  VARIANT 410..447: note = Derived polymorphism lacks residues 410 to 447
  VARIANT 402..447: note = Derived polymorphism lacks residues 402 to 447
  VARIANT 256: note = Ancestral polymorphism is G, Derived polymorphism is R
  VARIANT 254..447: note = Derived polymorphism lacks residues 254 to 447
  VARIANT 244..447: note = Derived polymorphism lacks residues 244 to 447
  VARIANT 176: note = Ancestral polymorphism is G, Derived polymorphism is D
  VARIANT 172: note = Ancestral polymorphism is C, Derived polymorphism is Y
  VARIANT 144: note = Ancestral polymorphism is V, Derived polymorphism is I
  VARIANT 123..447: note = Derived polymorphism lacks residues 123 to 447
  VARIANT 119..447: note = Derived polymorphism lacks residues 119 to 447
MWAERVVGERRMRQIQRFARNAKLTVVCLLLTVVVLRGTVGAGRFGTPQQDLIELRQHFVSHPHRALAEHHDARSRASTTTTSSSSSSARRDDDPDPPPRTLRDPPYTLGPKISDWDEQRAAWHRRHPETPPFLNDIKPRVLLVTGSSPKPCENPVGDHYLLKSIKNKMDYCRVHGIEVFYNMALLDAEMAGFWAKLPLMRALLLAHPEVEFLWWMDSDAMFTDMAFELPWERYGPYNLIMHGWDEMVYDDKNWIGLNTGSFLLRNCQWSLDMLDTWAPMGPKGPVRIEAGKVLTKSLKDRPVFEADDQSAMVYILATQREKWGDKVYLENGYYLHGYWGILVDRYEEMLENYKPGLGDHRWPLVTHFVGCKPCGKFGDYPVERCLKNMDRAFNFGDNQILQMYGFTHKSLASRRVKRTRNETSNPLETKDELGLLHPAFKAVKTST

SEQ ID NO: 2505 - protein, 416 aa, Zea mays
  VARIANT 277..416: note = Derived polymorphism lacks residues 277 to 416
MESSAKKLSSLRITSLDGDDDETEDPHQPPPAGPSAAAADSDDDDEEEEAEVTLGVLSKPKHPGLLLRHLFPSKAGGIPAWLDPVNLPSGKSSCCGFCGEPLQFVLQIYAAVEDNVAAFHRTLFMFMCPSMACLLRDQHEQWKHKHGNPCRSVKVFRCQLPRTNAFYSAQPPKHDRSDKPLCPGGSAYLLLHGRTYGTCKFYSKEVYLELYLSRGCQRVNVTKFFQMPKYLLPAHVCHWCGTWKGDKICSSCKKARYCSEKHQALHWRTGHKNDCLQIISSSAASNSVLPTVGKVPANTFWPEFEIKIDYEGRFDSDSGDENNSKLLVMQRHGKPDAMMQSWMDQFEADSDNKCWASFQERVSRAPNQVLRYCREPNAKPLWALSSGCPSNADIPSCSYCKGPLCYEFQVGQISSL

SEQ ID NO: 2506 - protein, 329 aa, Zea mays
  VARIANT 21: note = Ancestral polymorphism is A, Derived polymorphism is V
  VARIANT 6: note = Ancestral polymorphism is A, Derived polymorphism is E
MVGRGAATALVWAAVVAVATVVSRAQQLQVGFYDTLCPAAEIIVQEEVSKAASGNPGVAAGLLRLHFHDCFVRGCDASVLLDSSAGNQAEKDAAPNASLRGFEVIDSAKTRLEQACFGVVSCADVLAFAARDALALVGGDAYQVPAGRRDGNVSSAQEAGANLPPPTASASQLTQAFGAKGLSQAEMVALSGAHTVGAARCSSFAPRLYSYGPSGAGQDPSMDPAYLAALAQQCPPQGTGAADPPLPMDPVTPTAFDTNYYANLVARRGLLASDQALLADPATAAQVLAYTNSPATFQTDFVAAMIKMGAIQVLTGTAGTVRTNCRVAS

SEQ ID NO: 2507 - protein, 629 aa, Zea mays
  VARIANT 159..629: note = Derived polymorphism lacks residues 159 to 629
MAPVAAPIRDLLTSFSPGADFLALSSGDGRIKVWDAVRGRLQTEFADIPAVEAVAVAESKRGHLALDYTCMKWVQLSSKKKRKAGSSLIVLGTGSGDVLALDVAAGHWKWKVSDCHPGGVTAVEYSKHGRNVYTAGADGMVCRIDASNGAVVGKFKSSSKAISALAVSSDGNMLATAAGQLRTFDTSSNKKIKKFSGHPVAVRSMVFSNDSQYVLSSGVGERYIAIWKLGSGKTQSSNCILSMEHPAMFVDCKCSDKGEIHILAISEIGVCYFWSANVVDDLRNKKPTKIILSESSVSTTHQALSIFAAKLQGVDGPNSAHVLLAYGSVVKPSFDKLLVCYGTDISLGISQDGVLLPNTQTTMAKKGQSVKKHETVIALDRANAEDAILPLPKLHTQEKKRKHGVTKPSGDVEPEIHSDLTTTRSIHKRVPVQRIEDDSTCIEDMMRECGIIETRVDESMKGHAGIPFNILSCLFGDGSIKVDANLPSKKIRGHLRSLKPGDACKLLDKLVSAWKTRSGSTELVLRWIYCLLVIHGRFICSEESINNLEKMCAERYTVTEDLLKLSGRLRLITAQVDKAASNMSEPTSGEMQDAAFQSDEEEEDEDVDETVFGQDSDSSQNSGTDDDAK

SEQ ID NO: 2508 - protein, 160 aa, Zea mays
  VARIANT 42: note = Ancestral polymorphism is S, Derived polymorphism is R
MASTNSWTVEIASPVAAPRLFRAAVMDWHTLAPKVTSHVVASAHPVEGEGGVGSVRQFNFTSAMPFGFVKERLEFLDVDKCECKSTLVEGGGIGVAIETAASHVKVESAAGGGCVVKVDSTYKLLPGVEVQDEITKAKESVTNIFKAAEAYLVANPEAYN

SEQ ID NO: 2509 - protein, 249 aa, Zea mays
  VARIANT 79..249: note = Derived polymorphism lacks residues 79 to 249
  VARIANT 134..249: note = Derived polymorphism lacks residues 134 to 249
MRSRRTGTPIRSRDDKAKPTMHKCYESEAEKYHASETVSVPRASSLPSPPYRATDMYGTSRYVTDQSVLLQKSEALHHRGFTRPEDGENMNHVGKGNVDRWLHMLMDNQQEDHVAYHSSDEHDNDEENASDEQRTQSRVDEESCRNGITEYSDEIVEVEDEIVSDQGAERGRNNFGIKDREEKKIWFHRTDSTWGFWSLPSSPSMILGMRKGVERTAVDDDRKYGYEDSVSRSSTKFPRPAACAAAPRR

SEQ ID NO: 2510 - protein, 566 aa, Zea mays
  VARIANT 475: note = Ancestral polymorphism is S, Derived polymorphism is L
  VARIANT 309: note = Ancestral polymorphism is T, Derived polymorphism is M
MKGAVIGASTVLVVAVVATICVVSFKGSGDGGRAEEGEMSTSVKSIKSFCQPVDYRETCEKALEAAAGNATSPTELAKAIFKVTSDRIAKAVRESALLNELKHDRRTSGALHNCGELLDYAIDDLRTTFDRLGGFEMTNFKSAVDDLRTWLSSALTYQETCLDGFENTTTPAAGKMRKALNSSQELTENILALVDEFSETLANLGLPSFHRRLLAEHARGAPSWMPDAKRRLLLVSPGEKGFRPDVTVAKDGSGDFRTINAALAKVPLKSATTYVMYVKAGKYREYVSVARNVTNLVMVGDGATKTVITGHKSFMMNITTKDTATMEAIGNGFLMRGIGVKNTAGAKNHQAVALRVQSDMSAFYECRFDGYQDTLYTHTSRQYYRDCVITGTIDFIFGNAQVVFQNCLIQVRKCMDNQQNIVTAQGRKERRSVGGTVIHNCTVAPHPEFEKSVGRFRTFLGRPWKEHSRTLYIQSEIGGFIDPQGWLPWLGDFGLSTCYYAEVENHGPGANMTRRVKWRGIKNITYQHALQKYTVESFIQGQHWLPQLGVPFIPGLLPQQQSGRIH

SEQ ID NO: 2511 - protein, 168 aa, Zea mays
  VARIANT 39: note = Ancestral polymorphism is A, Derived polymorphism is V
MDGGGSGNASGGSGGASTCCYYALLGIRKNASATDIRAAYRRLAMKWHPDRWASDPGAAGEANQRFQRIQEAYSVLSDKGKKAMYDAGLFDPLDDDDQDFSDFMQEMLVMMDSVKNEKPDTLEDLQKMLEDIVKGDGGGGSGAGGRAPTDGARRTRVAPYPQPQRARR

SEQ ID NO: 2512 - protein, 401 aa, Zea mays
  VARIANT 253: note = Ancestral polymorphism is F, Derived polymorphism is S
  VARIANT 75: note = Ancestral polymorphism is D, Derived polymorphism is G
  VARIANT 57: note = Ancestral polymorphism is L, Derived polymorphism is I
  VARIANT 36: note = Ancestral polymorphism is S, Derived polymorphism is P
  VARIANT 12: note = Ancestral polymorphism is R, Derived polymorphism is W
MMADEAERVPPWQQGGWLDGHENIIYDILLRLPPKSVVRCRAVCKSWLRLASDHIFLVDHHRCQPSLPLLYFILDDVRDPDISEYRLEELDLHTNDNELQTVLGFSSHVNWWMPHGRERRLALHGSCDGVLLLSSDDSLYLYNPTTRHWGCLPPLHSDNTIAGFYWHRISDDYRVLYFRRHEDGKYCYYVMEAGTKRQRLVSRQVSLIHSSWPTKCARRTPPVLLHGNLHWPPVSSRPETIAVFDTVAEVLRFMLSPAVYVNSLFDSNVKLLDMDGVLAMSGSCREAIGDDGPSRVDLWFLEDYNDRVWVCKYRIELPVEDISRFHEFEDVWNAVVVSHEGDVLVDLWNRLLGYDREGNSVANLLCDCSLMEIGPHMLKRSLVPHALLGMNNHSPNKPPFL

SEQ ID NO: 2513 - protein, 408 aa, Zea mays
  VARIANT 52: note = Ancestral polymorphism is H, Derived polymorphism is Y
  VARIANT 15: note = Ancestral polymorphism is S, Derived polymorphism is W
MAEAARVQPRQQGGSLDGFEDIMYGILLRLPPKSVVRCRAVCRSWLRLASDYIFLLDHRRRQPSLPLVSFILDDVGDPEVGQYRLDVLDLHANDNVLQTVLGFSSHVDWWMPHDRERRLALHGSCDGVLLLSTDNSLYLCNPTTRHWGGLPPLHRNNTIAGFYWHRISDDYRVLYFRRHEDGKYCYYVMEADTRKQRLVSRQESLIHSSWPAGCARRSPPVLLHGNLHWAPVSSRPESIAVFNTVAEEFWLMPSPAVYVNSLLISNVKLLIMEGVLALSCSCGETVGDHGPSRVDLWFLEDYKDHVWACKYRIELPVEDICRFIRFLDVRNAIVVSHEGDVLVDLWNRLLVYDREGNSVANLPLNCSLLEIGPHMLKRSLVPHASLGMNNHSPNKPAFLPLEFLAVGS

SEQ ID NO: 2514 - protein, 411 aa, Zea mays
  VARIANT 282: note = Ancestral polymorphism is D, Derived polymorphism is G
MMAEAARVQPRQQDGWVDEFEGVMYDIFLRLPPKSVVRCRAVCRSWLRVASDRRFLLDHHRRQPSLPLLYFILDDLRGPEVSQSEYRLEVLDLRANDNKLQTVLGFSSHVNWLMIPHDHERRLALHGSCNGVLLLSSDDRQLSSVDRLYLYNPTTRHWGCLPPLHSDNTIAGLYWHRISDDYRVLYFRLHEDGKYCYYVMEAGTRKQRLVSRQVSLIHSPWPAGSARRSPPVLLHDNLHWPPVSSRPESIAVFNTVTEEFWFMRSPAIYVDSLLISNVKLLDMEGVLALSSSCREATGDDGPLRVDLWFLEDYNNDRVWVCKYRIELPVEEISRFHAFLDGWNAVVVSHEGDVLVYLWNLLLGYDSEGNSVANLPCDCRFLEIGPHMLKRSLVPHASLGMYNPTNHLFSDD

SEQ ID NO: 2515 - protein, 373 aa, Zea mays
  VARIANT 89: note = Ancestral polymorphism is M, Derived polymorphism is T
  VARIANT 149: note = Ancestral polymorphism is P, Derived polymorphism is L
  VARIANT 167: note = Ancestral polymorphism is P, Derived polymorphism is S
  VARIANT 182..373: note = Derived polymorphism lacks residues 182 to 373
MLWVARLSGFLSAAMVMVVLSPSLQSFPPAEAIRSSQFDGSVRFPGQIAGGARGVAFRRAPSFRNAADCGAGAGNGTAANVCDPSLVHTAITLDEEYLRGSVAAVHSVVQHARCPESVFFHFLVSDPSLGDLVRAVFPQLRFKVYYFDPGRVRGLISTSVRQALEQPLNYARNYLADLLEPCVRRVIYLDSDLVLVDDVAKLWRTDLGGRTVGAPEYCHANFTKYFTSRFWSDQRFAGTFVGRRPCYFNTGVMVLDLERWRRAGYTQRIERWMEIQKSPPGRIYELGSLPPFLLVFAGHVAPIEHRWNQHGLGGDNVLGSCRDLHPGPVSLLHWSGSGKPWARLGAGRPCPLDALWAPFDLYGPAGAGGEESR

SEQ ID NO: 2516 - protein, 315 aa, Zea mays
  VARIANT 197: note = Ancestral polymorphism is G, Derived polymorphism is S
MSLSSICCAKFHLLRNSIGDTCSVRWLKYHSRLIYETFLSSRIHQSRPPSTTVLARSTRKGSKQSFSNGRHLHSKSVESSIEVFKQSELEQLKSLHCYNVEEEFSEVKTEWPATILVFDIETTGFSRRDDRIIEFAVRDLMGGKNSTFQTLINPEKDVKNTYVHGINNSMLCRPDVPRFGEIIPILLQYVWSRQMDGKPVLWVAHNGRSFDVPFLMFEFRRCKVEMPGDWLFVDTLPIAKQLVDSNGSKLSSVSLKFLRERYKIPLTGSAHRAMQDVTTLSYVLQKLTFELKLTVPQLLEKSFRASDLPANRPAK

SEQ ID NO: 2517 - protein, 64 aa, Zea mays
  VARIANT 21: note = Ancestral polymorphism is G, Derived polymorphism is D
  VARIANT 20: note = Ancestral polymorphism is P, Derived polymorphism is H
  VARIANT 16: note = Ancestral polymorphism is Q, Derived polymorphism is E
MTISTNIGIPWIMSKQTKAPGDVISQAKKKTAARWLILVFSLSLATSGILYGLKIEWVQACYRR

SEQ ID NO: 2518 - protein, 256 aa, Zea mays
  VARIANT 19: note = Ancestral polymorphism is P, Derived polymorphism is L
  VARIANT 37: note = Ancestral polymorphism is D, Derived polymorphism is Y
  VARIANT 58: note = Ancestral polymorphism is T, Derived polymorphism is M
  VARIANT 89..256: note = Derived polymorphism lacks residues 89 to 256
  VARIANT 133: note = Ancestral polymorphism is R, Derived polymorphism is W
  VARIANT 177: note = Ancestral polymorphism is A, Derived polymorphism is T
  VARIANT 204: note = Ancestral polymorphism is H, Derived polymorphism is Y
MRSTVVPLYQPARLAGLIPVMQSYVDTLAANIAACPDQDCIPFCQLSLRMAIDIIGRTAFGIEFGLSKNVMDLTSSLSTILGLSLPCVQTPCKRLLRRVPGTADYKMDQNECRLYSRIDAIIAGRWRDRATRRRCGPGAAPAPLDFIAALLDAMENDGDSGAGANKDFALADRHMCALAYEHLIAGTKTTTFTLSSVVYLVSCHLLVEAKLLREVDGFTPRARAGRRRAPKRVPLPRPGHQGGQCSYHIEEGEKEI

SEQ ID NO: 2519 - protein, 242 aa, Zea mays
  VARIANT 102: note = Ancestral polymorphism is A, Derived polymorphism is S
  VARIANT 123: note = Ancestral polymorphism is L, Derived polymorphism is I
  VARIANT 135: note = Ancestral polymorphism is P, Derived polymorphism is L
MASSESPNTAPAAAAVASQPARDFLAHLEAYLARRDGVDKLLKISRYATRLALAAGPPLPPGASARLKSFESSVGLSRKAFRLGKFVQSLNALLAHPHPPPSLALLAYGGEGVYYFVEQFVWIAKAGLLPAHLLPRLQRLSAWAELLGYVGSILIKLEEVAKIESSIKKRLVKDCDKESEAVKTMQGKLLLKRMSVVQDVADAVMALGDVTDGKGLLGSSTLMAAAGLLSALISTHKNWNSC

SEQ ID NO: 2520 - protein, 127 aa, Zea mays
  VARIANT 83: note = Ancestral polymorphism is S, Derived polymorphism is R
  VARIANT 109..127: note = Derived polymorphism lacks residues 109 to 127
MAAADYGRAYLPYAAAAPAGEYDRPCRNEVVPYGDRRLDTVVKPPAGSPAPPLPVSTRSGGRGVGSAWCFSDPEMRRRRRVASYKAYSVEGKVKASFRRGFRWIKAKTWDIGEILFRCHGGNCSYNA

SEQ ID NO: 2521 - protein, 164 aa, Zea mays
  VARIANT 117: note = Ancestral polymorphism is V, Derived polymorphism is G
MKCQQIVKGLPQPIFTPSRCPNPRLRLRRRHPGGLLPSSLCLRAVPPTLLNPRRATRVQAGRPPGCEGGTGAGEPQSAPPHSAPSEAPSRAGAAKQASVRLAESRGGGSNQQGKLFVLANVTCIFPPECRVRPQAVRAECATSGSLEGRKKLTTVSPSESGLVG

SEQ ID NO: 2522 - protein, 84 aa, Zea mays
  VARIANT 32: note = Ancestral polymorphism is G, Derived polymorphism is V
  VARIANT 33: note = Ancestral polymorphism is C, Derived polymorphism is Y
  VARIANT 37..84: note = Derived polymorphism lacks residues 37 to 84
  VARIANT 63..84: note = Derived polymorphism lacks residues 63 to 84
MKVKILQWHAVASWTWDAQDETCGICRMAFDGCCPDCKFPGDDCPLIWGVCNHAYHLHCILKWVNSQTSTPLCPMCRREWQFKG

SEQ ID NO: 2523 - protein, 212 aa, Zea mays
  VARIANT 8: note = Ancestral polymorphism is P, Derived polymorphism is L
  VARIANT 40: note = Ancestral polymorphism is R, Derived polymorphism is H
MAAGLKRPSFGTRAWRLLRLAVLWARKGGAAHSLRLRLLRTLRRHGHGLAGLGGARGDRLRCGEREYSIDETPAFRFRTPSARVLRLIPCIAPAVPDTPGLYGDDRYFFSAAAAAWETGEGAGCCYGDVDDDEEEDDEEPSCCGDGEMLLERVVAEACRASSAGRSVAADSGEDAGVDVKADEFIARFYAQMKLQRQISWLQYNEMMERSIS

SEQ ID NO: 2524 - protein, 110 aa, Zea mays
  VARIANT 58: note = Ancestral polymorphism is C, Derived polymorphism is S
MSNLCCCVQVDQSTVAIREQFGKFDSVLEPGCHCMPWFAGKRVAGHLTLRLQQQDVPCETKTKDNVFVNVMASIQYHALADKASDAFYKLSSTRSHLHFNTERRPFSSSR

SEQ ID NO: 2525 - protein, 354 aa, Zea mays
  VARIANT 259: note = Ancestral polymorphism is S, Derived polymorphism is Y
MDDDIDSSCSTPFASAPSSPGRPQALGGGGGYFFSAPASPIHHLLLSTSCSASATPSSGVRGCGGDAEFEFGGPGGPMISADELFHNGQIRPLTLPPLPDLDPGSDDNEGRAPTRGRDLTPRSASVHRRARSMSPLRSASPRLKLINALVVPAPDLGPGPDATGTHGEAAPPVTASSRSSSSSSTSSSSSSGTSSARGSRRWVFIRDMLLHRSKSEPGSGAHAHDVPGAPAANKPERAWPFSSPSWVTRDRLAARLRPSRAPPATENACGLGGEDGRPRGQGRGRGRGRRRRSTTVAAAHERLYAAPNRAQAEEMRRRTFLPYRQGLLGCLGFSSRGYGALHGLTKTLNPVFSR

SEQ ID NO: 2526 - protein, 538 aa, Zea mays
  VARIANT 316..538: note = Derived polymorphism lacks residues 316 to 538
  VARIANT 327: note = Ancestral polymorphism is P, Derived polymorphism is L
  VARIANT 366..538: note = Derived polymorphism lacks residues 366 to 538
  VARIANT 389..538: note = Derived polymorphism lacks residues 389 to 538
MDEEEREEVGEYKLQGLVGRGSFAEVHRAAHRRTGAPAAVKAIDRRLVDKRVHDGILQEREILRSIDHPNILRLLDTIDTTNMMYLVLEYCDGGDLDAFLHKHGRLPEAVAKDLMRQLAEGLKVLRGRNIVHRDLKPQNLLLSTNGDDIVLKIGDFGFARSLVHENLAATICGSPYYMAPEIWQGKDYDAKSDLWSVGIILFQLVTGKLPFTGSNAFQLHQNVMATDDLNFPSEIEADLCPDCIDLCRRLLHRDPKKRISFEEIFNHKFLATTRKCYESCHAVELRDNCQTITSPVVLKTKSGSIESKNPKVFDSWEWIEREYVLVPENCTSMEMSSLNIKSTKDDMDTRTVSYGRSTGKGSVQNQIRDFTDTATGVQSHGCAPVVISQESATVDCRRGKPPDYITRLHSLNQYVLVLADLAREKLSKGLYLEALSIELVLLTIWKEALDACSLLMDTSDGEKFSKSCQEHFLAKSGHSPMNVVQGLDFTRTASIFSWLESGFMKAYDRAEKISHVLRKSDDNTEMPDAVDVTFQTAL

SEQ ID NO: 2527 - protein, 110 aa, Zea mays
  VARIANT 90..110: note = Derived polymorphism lacks residues 90 to 110
  VARIANT 81: note = Ancestral polymorphism is A, Derived polymorphism is T
  VARIANT 78: note = Ancestral polymorphism is T, Derived polymorphism is M
  VARIANT 44: note = Ancestral polymorphism is E, Derived polymorphism is K
  VARIANT 40: note = Ancestral polymorphism is R, Derived polymorphism is W
  VARIANT 35: note = Ancestral polymorphism is G, Derived polymorphism is D
  VARIANT 24: note = Ancestral polymorphism is F, Derived polymorphism is S
MDNDMKEVRQGQHRVFPWEMLKVFLLLGLGLFAAGVLMARHGHEVAADTLFRPWLGVSAAAAEGLEHSMMDEELLWHTLFAPGVRRYPFQRVPKVAFMFLTCSPLTLAPL

SEQ ID NO: 2528 - protein, 104 aa, Zea mays
  VARIANT 90: note = Ancestral polymorphism is R, Derived polymorphism is W
  VARIANT 87: note = Ancestral polymorphism is L, Derived polymorphism is V
  VARIANT 68: note = Ancestral polymorphism is P, Derived polymorphism is L
  VARIANT 65: note = Ancestral polymorphism is G, Derived polymorphism is D
  VARIANT 45: note = Ancestral polymorphism is A, Derived polymorphism is V
  VARIANT 44: note = Ancestral polymorphism is E, Derived polymorphism is K
  VARIANT 38: note = Ancestral polymorphism is D, Derived polymorphism is N
  VARIANT 34..104: note = Derived polymorphism lacks residues 34 to 104
  VARIANT 29: note = Ancestral polymorphism is E, Derived polymorphism is K
  VARIANT 28..104: note = Derived polymorphism lacks residues 28 to 104
  VARIANT 23: note = Ancestral polymorphism is A, Derived polymorphism is P
  VARIANT 19: note = Ancestral polymorphism is E, Derived polymorphism is K
  VARIANT 15: note = Ancestral polymorphism is T, Derived polymorphism is M
  VARIANT 6: note = Ancestral polymorphism is R, Derived polymorphism is W
MQNKERLVHLLKGITVGIEKCQATPLSQEVLIVWGDHNQLFLVEAFAVHRTLKWSARLEVIQKTGHVPQLEDSACFNKVMLDFLKSLICWLMVARNKVPRCIGD

SEQ ID NO: 2529 - protein, 299 aa, Zea mays
  VARIANT 12: note = Ancestral polymorphism is S, Derived polymorphism is I
  VARIANT 92..299: note = Derived polymorphism lacks residues 92 to 299
  VARIANT 106..299: note = Derived polymorphism lacks residues 106 to 299
  VARIANT 116..299: note = Derived polymorphism lacks residues 116 to 299
  VARIANT 121..299: note = Derived polymorphism lacks residues 121 to 299
MASLPCSQIKLSKVLVRRKFHESGQTNLPRPLHWKPLRPGRFENLVLQCTKNLSWETSLPYASAEDDASIIKGTGVVEPIDTEEAPQIPILQSDEDVVEVKNEPSWHLKAFKLAMWLVGPSILLVTGIVPTLWLPLSSVFHGPNIAGLLSLVGLDFIFNMGAMLFFLMADACSRQENNIFDLKRSALDDLRTETTSSKKTSTFNVDVSACRNGPGHKGPVWFGDGRSEGKAEGGGEDGRTGGGGERGEDAGLPVDGWRDGAWEGGGLREGGGAADRMQGEVRPRADVGRMRRRGRTMWV

SEQ ID NO: 2530 - protein, 311 aa, Zea mays
  VARIANT 244: note = Ancestral polymorphism is W, Derived polymorphism is C
MTTVAVMEQWADKQQQAASTNAAAAAAQMPFLALLQGAGVVVEAEQQEEQHHDGRKRQAFARAVSDLDLLESCVTQAVAPAAAASAPVAGRTERRRKRQRPRARAAPPPEKRKKPEEAESQRMTHIAVERNRRRLMNDHLASLRSLIPSSYTPRGDQATVVGGAIDYVKQLEQQLVALQAAAAARRGVAGTGAAAVATVASDGVFVSPQYASYSDSRGAGAGVDVEATAAVGGHVRVRVAGRRWPGRLVRVVAALEDLRLAVLHLAVTSVGHDAVVYCFNLKMEEGCEVATADEVATVVHQIFAYAAGACC

SEQ ID NO: 2531 - protein, 628 aa, Zea mays
  VARIANT 533..628: note = Derived polymorphism lacks residues 533 to 628
  VARIANT 62: note = Ancestral polymorphism is R, Derived polymorphism is W
MAVSSPSSAPEKKRKWLLSNRKVTDKYLREARKILAAAPECGGGDAVAALGLVDAALELSPRMEAALELRARALLALRRYREVAEMLRDYIPSCGKSCSGEDTSSSSSASLLSTGSGDLGTISRAKLLSPDRHRSDDAEPDARPVRSFRCFDISELKRRVLAGLSKNPNTDTQWRYLVLGQACFHLGLIEDAMVLLQTGRRLASAAFRRESVCWSDDSFSSSSSSSATAAAPCVPSGKTSSSGWAFIIPATESEAVSQLLAHVKLLLRRRAAAMAALDAGLPAEAVRHFSKILEARRGVLPHPFAAACLVGRAAAFQASGRPADAIADCNRALALDPAYIPALRARADLLQSVGALADCLRDLDHLKLLYDAALRDGKLPGPRWRPQGGVRYREISGAHRKLTARIQGLRGRVAAGEACNIDYYLLLGVRRGCTRSELERAHLLLSLKLKPDRAVVFGERLELVDEHRDLEAVRDQARMSALLLYRMLQKGYSFVMSAVLDEEAAERQRAKDAAAAAAAAAAALAAKQEAPKQEPPPPVPEKSENTESGRPRSPPPPGRAQTAKPKPKPKAKAATTTATMPKAAAAVTSTAPVYQGVFCRDMAVVGTLLSRGGGFDRALPVKCEAMSC

SEQ ID NO: 2532 - protein, 217 aa, Zea mays
  VARIANT 79: note = Ancestral polymorphism is E, Derived polymorphism is K
MNTAMATTSLSLQGRPSHAPTRKLSSPFLGAPASFLRPLAPTPAAGPSSRRTLAVRAMAPPKPGGKPKKVVGLIKLALEAGKATPAPPVGPALGAKGVNIMAFCKEYNAKTADKPGYIIPVEITVFDDKSFTFVLKTPPASVLLLKAAGVEKGSKEPQRQKVGKVTVDQVRAIAQEKLPDLNCKSIDSAMRIIAGTAANMGIDVDPPILVKKEKVLL

SEQ ID NO: 2533 - protein, 190 aa, Zea mays
  VARIANT 68: note = Ancestral polymorphism is S, Derived polymorphism is Y
MAGCDGAKSSASMEEEACAEKKYGGIAPKKPLISKDHERAYFDSADWVLGKQAANSSSSTRTAAAVESLKPKLKVSWTITTTPTHTAQADSETPLPLHLNESIERRTTSCRLVSPPALPVETHGHASQLLEEELGQSQGLRMPTSSSSDKCFSWSGIVGTTTSQKDPNPRCRLASWRAAPVIVCHKERIN

SEQ ID NO: 2534 - protein, 572 aa, Zea mays
  VARIANT 412..572: note = Derived polymorphism lacks residues 412 to 572
MAAERDIDDLPRNDANYTALTPLWFLERAALTHPARASVVHGPVRYTWADTYSRCRRLASALARRSVGHGSTVAVIAPNIPAIYEAHFGVPMAGAVVNCVNIRLNAATVAFLLEHSSAEVVMVDQEFFTLAEDSLRIIADKKKGTFEQPLLIVIGDATCDPTTLQDALRKGAIDYEAFLESGDPEFAWRPPQDEWKSIALGYTSGTTSNPKGVVLHHRGAYLMSLSGALIWGMNEGAVYLWTLPMFHCNGWCYTWTLAALCGTSICLRQKVICTTSRTRAQVKSGHQKRHSGFSEGHLLSYSQRGRDSLLWGTGRPEHHHQRPSSRHDSPPTSCRQRHDRWRCSATLCPGGNVEAWVPHHSHLRPVGDLWTIHGVRLEAGMGQAASRRARPAPRASGRPLRGPGGPGRGGPEDDDAGPGRRHHDGGDRDARERRHEGVPEEPGGERGGVRERVVPLGRPGRAARRRVRRGEGPRQGHHHLRRGEHQQPGGGEGGVPAPGGAGGVGRGPRRRAVGGVAVRVRDAQGRRGPLRRGGAGAGHHAVLPREAARLLGAQVRGVRAAAQDSDRQDQEA

SEQ ID NO: 2535 - protein, 369 aa, Zea mays
  VARIANT 291: note = Ancestral polymorphism is G, Derived polymorphism is D
  VARIANT 290: note = Ancestral polymorphism is N, Derived polymorphism is K
  VARIANT 153: note = Ancestral polymorphism is A, Derived polymorphism is V
  VARIANT 116: note = Ancestral polymorphism is K, Derived polymorphism is E
  VARIANT 101: note = Ancestral polymorphism is D, Derived polymorphism is E
  VARIANT 95: note = Ancestral polymorphism is A, Derived polymorphism is D
  VARIANT 84: note = Ancestral polymorphism is Y, Derived polymorphism is C
  VARIANT 80: note = Ancestral polymorphism is M, Derived polymorphism is L
  VARIANT 66: note = Ancestral polymorphism is V, Derived polymorphism is L
MAEHLISTADHDRLPDSYVRPETQRPRLREVVPDAEIPVVDLADPDREAVVARVAEACRTHGFFQLLNHGVPEQLTAAMMSVAYEFFRLPAEEKAKLYSDDPAKKMRLSTSFNVRKETVHNWRDYLRLHCHPLEQYVPDWPDNPPSFRRTVSAYCSAVRELGFRLYVAISEGLGLDGAYIKEALGEQEQHMAVNFYPRCPAPELTYGLPAHTDPNALTILLMDQQVAGLQVLKDGRWIAVNPRPGALVVNIGDQLQVTCSCLALPLFPPSHLLSAPGLHYCTAPAQALSNGRYRSVWHRAVVNADRPRMSVASFLCPCNDARIGPAARLLTDGTPAVYRDYTYAEYYAKFWSRNLDQEHCLELFRTPTS

SEQ ID NO: 2536 - protein, 214 aa, Zea mays
  VARIANT 88: note = Ancestral polymorphism is V, Derived polymorphism is L
  VARIANT 85: note = Ancestral polymorphism is A, Derived polymorphism is D
MGNLVSGAAAASGGGGKLVMADGSVRALSEPVSVAELMMDHPRHFVVDARVLKALARRERHHHQQQQQGGGAKVAPLPADHVLGAGGVYVLLPATRGKVSAEEARRALSAARSRSMRGLRRQLSSSKKSQQAEAAAAQESPQQEATAESSPEDEDDAEAAARPEGFEEHRLAFLSRELSCKGWKPSLRTIEERDLPKKTPPQLALLLVKLHCLL

SEQ ID NO: 2537 - protein, 110 aa, Zea mays
  VARIANT 9: note = Ancestral polymorphism is R, Derived polymorphism is C
  VARIANT 30: note = Ancestral polymorphism is G, Derived polymorphism is R
  VARIANT 53: note = Ancestral polymorphism is E, Derived polymorphism is K
  VARIANT 59: note = Ancestral polymorphism is A, Derived polymorphism is V
  VARIANT 61..110: note = Derived polymorphism lacks residues 61 to 110
  VARIANT 75: note = Ancestral polymorphism is G, Derived polymorphism is D
  VARIANT 81: note = Ancestral polymorphism is S, Derived polymorphism is F
  VARIANT 88: note = Ancestral polymorphism is R, Derived polymorphism is C
  VARIANT 99: note = Ancestral polymorphism is E, Derived polymorphism is V
MDLLDARHRHTPDSSSSPHAASDMGLPLAGAAYQPYVSELLSFSIERLHKEPELLRVDAERVRRQMQEVAVENYGAFIAASEALSFVRAQLESFDGHLEAMVMRSIPPCS

SEQ ID NO: 2538 - protein, 262 aa, Zea mays
  VARIANT 8: note = Ancestral polymorphism is S, Derived polymorphism is L
  VARIANT 11: note = Ancestral polymorphism is P, Derived polymorphism is S
  VARIANT 13: note = Ancestral polymorphism is T, Derived polymorphism is P
  VARIANT 20: note = Ancestral polymorphism is V, Derived polymorphism is I
  VARIANT 42: note = Ancestral polymorphism is F, Derived polymorphism is L
  VARIANT 225: note = Ancestral polymorphism is S, Derived polymorphism is F
  VARIANT 233: note = Ancestral polymorphism is A, Derived polymorphism is T
  VARIANT 245: note = Ancestral polymorphism is Y, Derived polymorphism is H
  VARIANT 248: note = Ancestral polymorphism is C, Derived polymorphism is F
MNVSIDISGLPITLSECGIVGIWVQEELVLQFTNLKAIKLLFFVFRHVRIIFLLLFSLYVDVAAFYAVFFYLFLAIILSFRFQWSPDRASVFGSSAEDGFLNVWDHEKVGKKKNSNVPAGLFFQHAGHSHMKGSWLWIFLTVDIFLMVTRSFAFAAWAHTSCSPKLLWSFQVCHSLGGGTGSGMGMLLISKIGEEYPDRMMLTFSVFPSPEVSDTVVEPYNTTMSVHRLVENADECMVLDNEALYDICFRTLKLTTPSCKLI

SEQ ID NO: 2539 - protein, 180 aa, Zea mays
  VARIANT 27: note = Ancestral polymorphism is L, Derived polymorphism is V
MNSGVDTQARALADEVRGSLETKNWMLDLGHPLLNRVAESFAKAAGIGAVQAVARESYFMATEGEGGSVSGATGARKRSFPELNGKRTNSSSIKSAEAMVKSVSKESLQWGLAAGVHSGLTYGLAGVRGTHDWRNSAVAGAITGAAVALTSEHASHEQVVQCAITGAALSTAANVLSGIF

SEQ ID NO: 2540 - protein, 455 aa, Zea mays
  VARIANT 341: note = Ancestral polymorphism is S, Derived polymorphism is I
  VARIANT 168: note = Ancestral polymorphism is R, Derived polymorphism is W
  VARIANT 149: note = Ancestral polymorphism is V, Derived polymorphism is D
MTEQPVAADRRARQHRPPQLLVLPVFFLFLVAPCALFLFRSSDLALIPRIRIEFDRREALSIAPTNVPTPAQPVPLPSPPPPSPAPPPPGPAADDDEERRRLPPPRQLTDPPYSLGPTVDYDARRAQWLRDNPRFPAFVAPGRPRVLVVTGSSPRRCSDPDGEHLLLRAFKNKADYCRVHGFDIFYSTAVLDAELSGFWSKLPLLRTLMLAHPETELLWWVDSDVIFTDMLFEPPWDKYAAHNLVLPGSEEKVYTVKSWIGINAGSFIIRNCQWSLDLLDALARIGPRGPVREMYGRVISETLSDRQPYEACDQSALVYLLITERGRWGDKTFLESSYCLSGFWAYIVDKFEEMRRDSTTPPEPGRERWPLTTHFMGCKPCGGKDSTYDAAWCRRSMERALNFGDDQILNLYGFQHKSLNTTAVRRVRNDTGGPLDTGDEELGRLLHPTFRAANL

SEQ ID NO: 2541 - protein, 727 aa, Zea mays
  VARIANT 160: note = Ancestral polymorphism is Y, Derived polymorphism is D
  VARIANT 103: note = Ancestral polymorphism is G, Derived polymorphism is R
MHMGDFNYPRLADLGAAISGANKLLCQEVLEELDVCKRLKLTLELVKRELEISKLQESIAKTIEEKITREQRRYLLNELLKAIKKELGLETDDKTTLSEKFRGRIEAKKDRCPPHVLQVMDEELTKLQLLEASSSEFSVTRNYLDWLTVLPWGDYSFSIDGSDENFDVHHAQHILDEDHYGLADVKERILEFIAVGKLRGSSQGKIICLSGPPGVGKTSIGRSIARALNRKFYRFSVGGLADVAEIKGHRRTYVGAMPGKIVQCLRSVGTANPLVLIDEIDKLGKGHSGDPASALLELFDPEQNANFLDHYLDAPVDLSKVLFVCTANVIEMIPSPLLDRMEIIAIAGYITDEKMHIARNYLEKKTREACGIKPEQVSALYNDLVHAQVEVTNDALLALIENYCREAGVRNLQQQIEKIYRNIALKLVRQGVSNESPQDIMVVEAEKNPVNFDVATKVEDKNSKNSIAEDASVDVSPIDSSLDNINVVPLTTESEVGHNEHSNEAPTKTFAEETAKLPNTFKTPEANNESTHRNMEVLVDKPEEKVVVNASNLGNFVGKPVFQAERIYNQTPVGVVMGLAWNAMGGSTLYIETAKVEESKGKGTLFVTGQLGDVMKESAQIAHTVCRAVLLEKEPNNPFFAKSKLHLHVPAGATPKDGPSAGCTMVKEKTIAARRSGVKTIIFPSANRRDFDELASNVKEGLEVHFVDKYSEIYDLVFTSDTKTQES

SEQ ID NO: 2542 - protein, 75 aa, Zea mays
  VARIANT 10: note = Ancestral polymorphism is G, Derived polymorphism is S
  VARIANT 21: note = Ancestral polymorphism is F, Derived polymorphism is S
  VARIANT 27: note = Ancestral polymorphism is P, Derived polymorphism is L
  VARIANT 34: note = Ancestral polymorphism is G, Derived polymorphism is R
  VARIANT 47: note = Ancestral polymorphism is R, Derived polymorphism is G
  VARIANT 55: note = Ancestral polymorphism is T, Derived polymorphism is I
MVNQKPLFPGDSEIDELFKIFRMLGTPNEQSWPGVSCLPDFKTAFPRWQSQDLATIVPNLEPAGLDLLSVSQMDC

SEQ ID NO: 2543 - protein, 177 aa, Zea mays
  VARIANT 7: note = Ancestral polymorphism is R, Derived polymorphism is H
  VARIANT 16: note = Ancestral polymorphism is D, Derived polymorphism is H
  VARIANT 100: note = Ancestral polymorphism is L, Derived polymorphism is F
  VARIANT 116: note = Ancestral polymorphism is S, Derived polymorphism is N
  VARIANT 147: note = Ancestral polymorphism is T, Derived polymorphism is I
  VARIANT 163: note = Ancestral polymorphism is R, Derived polymorphism is C
MVSVSHRNAQMFFDRDIECIYKFFNKRFNLRLVKNEEQAGSENDDEGNSIPSFFVRGKGCWFLGQGTSCQWIYQERASGYGEGRSDVPANLLLITPRKLLKGMIPVQMMRMMRLDSSDEPDCDLTQVIQRRLELFLKSMEQVVAARTDWKFLPRVAMEWLWHRSNLGSRRFPRKFYM

SEQ ID NO: 2544 - protein, 176 aa, Zea mays
  VARIANT 34: note = Ancestral polymorphism is A, Derived polymorphism is T
  VARIANT 41: note = Ancestral polymorphism is R, Derived polymorphism is W
  VARIANT 72: note = Ancestral polymorphism is R, Derived polymorphism is W
MVPLAGAQGARRAAVVITEEERRRNRMTSNRLSARKSRMKRQRHVDDLAAEAERLRRENEAMRAGVGDAVLRSRALEQENRVLAAHARQLCAALLLRNSQLSLLGDVAGVPLDVPGVPDHLVQLYGGVQVPVMPLSPSVMPLSPSPPPPLHLQLPLEIQLMLLQPDVMDAVGMLEL

SEQ ID NO: 2545 - protein, 252 aa, Zea mays
  VARIANT 41: note = Ancestral polymorphism is G, Derived polymorphism is R
  VARIANT 71: note = Ancestral polymorphism is L, Derived polymorphism is I
MSTHAPRDIQARLWCSSPIARERVLSNGGGRNPQSLVDVDGDHGSATATQEIGAPKRAKWIHERKLFLIQLLKDHDVPGFRTQNAWCKEAWNNIVRRLNEKFGTSYTIGQVKQKEQDLKKDYRSVKELVEQSGFGWNGERMMVEAPDSVWASFAARKNNESALHWRDKSFPYYDDLSKLYDGRYAEGRTRQGMDHYANKTKKASAPGGQATTVAETYQSPSPTLNGVDELGLQFSFDEEIEGNLGLSQYPSA

SEQ ID NO: 2546 - protein, 126 aa, Zea mays
  VARIANT 24: note = Ancestral polymorphism is S, Derived polymorphism is Y
  VARIANT 37: note = Ancestral polymorphism is V, Derived polymorphism is G
  VARIANT 38: note = Ancestral polymorphism is R, Derived polymorphism is G
  VARIANT 98: note = Ancestral polymorphism is S, Derived polymorphism is L
MAISVTAVAALPAFSAQRSLPQPSRQRVVAFIVVRPVRAHRRFVGVAASSPPTPPDLAKKVSESIKQAQETCADDPVSGECVAAWDEVEELSAAASHLRDRQKGADPLEEYCKDNPETDECRTYED

SEQ ID NO: 2547 - protein, 77 aa, Zea mays
  VARIANT 23: note = Ancestral polymorphism is S, Derived polymorphism is L
  VARIANT 36: note = Ancestral polymorphism is N, Derived polymorphism is K
  VARIANT 54: note = Ancestral polymorphism is T, Derived polymorphism is M
MGDLETLNLGKNHLSGQLTDMFSQLPKLSTLDLSFKRFSGSLPKSFQHLKDLKTLNVESNQFSGHIDVLAKLPLEDL

SEQ ID NO: 2548 - protein, 601 aa, Zea mays
  VARIANT 127: note = Ancestral polymorphism is R, Derived polymorphism is C
  VARIANT 218: note = Ancestral polymorphism is A, Derived polymorphism is V
MEAQNVEVAALVKKIADLHADITKLPSLSPSPDVNALFTSLVMACVPPSTVDVTKLSPDSQRMREELIRLCSDAEGHLEAHYADMLAAFDNPLDHLGRFPYFSNYINLSKLEYDLLVRYIPGLAPSRVAFVGSGPLPFSSLVLAARHLPNTTFDNYDRCAAANDRARKLVRADKDLNARMSFHTVDVANLTDDLGKYDVVFLAALVGMAAEDKAKVVVHLGRHMADGAALVVRSAHGARGFLYPIVDPEDIRRGGFDVLTVYHPDDEVINSVIIARKIDAHANTEVSALVQKITGLHAAINKLPSLSPSPDVDALFTELVMACVPPSPVDVTKLGTDAQRMREELIRLCSDAEGHLEAHYADMLAAFDNPLDHLGRFPYFNNYVNLSKLEYDLLVRYVPGIAPSRIAFVGSGPLPFSSLVLASRHLPNVMFDNYDRCAAANDRARKLVRADEGLRKRMFFHTADVANLTDELRKYDVVFLAALVGMAAEDKAKVATHLGRHMADGAALIVRSAHEARGFLYPIVDPEDIRRSGFDVLAVYHPDDEVINSVIVARKINAHVKGLQDGHAHARGVVPIVSPPCKCCKMEANTLHQKREEMATA

SEQ ID NO: 2549 - protein, 601 aa, Zea mays
  VARIANT 171: note = Ancestral polymorphism is R, Derived polymorphism is H
  VARIANT 172: note = Ancestral polymorphism is A, Derived polymorphism is T
  VARIANT 179: note = Ancestral polymorphism is R, Derived polymorphism is C
  VARIANT 211: note = Ancestral polymorphism is E, Derived polymorphism is V
  VARIANT 218: note = Ancestral polymorphism is A, Derived polymorphism is S
  VARIANT 223: note = Ancestral polymorphism is H, Derived polymorphism is Y
  VARIANT 339..601: note = Derived polymorphism lacks residues 339 to 601
MEAQNVEVAALVKKIADLHADITKLPSLSPSPDVNALFTSLVMACVPPSTVDVTKLSPDSQRMREELIRLCSDAEGHLEAHYADMLAAFDNPLDHLGRFPYFSNYINLSKLEYDLLVRYIPGLAPSRVAFVGSGPLPFSSLVLAARHLPNTTFDNYDRCAAANDRARKLVRADKDLNARMSFHTVDVANLTDDLGKYDVVFLAALVGMAAEDKAKVVAHLGRHMADGAALVVRSAHGARGFLYPIVDPEDIRRGGFDVLTVYHPDDEVINSVIIARKIDAHTNTEVSALVQKITGLHAAINKLPSLSPSPDVDALFTELVMACVPPSPVDVTKLGTDAQRMREELIRLCCDAEGHLEAHYADMLAAFDNPLDHLGRFPYFNNYVNLSKLEYDLLVRYVTGIAPSRIAFVGSDPLPFSSLVLASRHLPNVMFDNYDRCAAANDRARKLVRADEGLRKQMFFHTADVANLTDELRKYDVVFLAALVGMAAEDKAKVVAHLGRHMVDGAALVVRSAHGARGFLYPIVDPEDIRRGGFDVLAVYHPDDEVINSVIVARKINAHVKGLQDGHAHARGAVPIVSPPCKCCKMVANTLHQKREEMATA

SEQ ID NO: 2550 - protein, 337 aa, Zea mays
  VARIANT 21: note = Ancestral polymorphism is R, Derived polymorphism is W
  VARIANT 224: note = Ancestral polymorphism is V, Derived polymorphism is D
MCGGCRRRQCGPDGTPDGGRRGCGTVIAVLALAAAAAVAFLESAAGGISYAGDGWLHECAKWDAEGGRFLASTFFGGGVAEVRAGEGEAEERVVVADPVAAGRVALGLAVDAPRRRLLLVYADRPPRLGYAALGAYDLGSWRRLFLTRLDVPGESTFPDDVAADEEGNAYVTDAKGSKIWKVGPDGALLGVIKNATFVQRPGLRHNLVGLNGIVYHPNGYLLVVHTSGGDFFKVDPKTETVRVVKVRGSLRRGDGLELLSPTRLVVAGLPNRLVESSDDWETASVTGQYVGPVHRIGSSATVKDGDVYVNHIVGFGLGRKKTHVLARAVFSPLAVTS

SEQ ID NO: 2551 - protein, 1111 aa, Zea mays
  VARIANT 695..1111: note = Derived polymorphism lacks residues 695 to 1111
  VARIANT 636..1111: note = Derived polymorphism lacks residues 636 to 1111
MASSSKASDSSSQRSKRSDQGTGREAAPASVVPIHGNLTQLIRQIKSRRLLYIKEKLEANRKTLQRHSCALFDVAAAAEVASRGSDGGNALSQRAAEGQFRLAGSDLAHGIGERDVVYMQEENLASGTLVLSSSGAAAQRTVVRFVKLPLVERIPPYTTWIFLDKNQRMADDQSVVGRRRIYYDPIGNEALICSDSDEEIPEPEEEKHFFTEGEDQLIWRATQEHGLNREVVNVLCQFIDSTPSEIEERSEVLFEKNEKNSGSSDKIERQLSLDKTMDAVLDSFDNLFCRRCLVEIYLGHLFTQVFDCRLHGCSQNLVFPSEKQPYSFEPDENKKPCGRQCYLRWREGFQEIHDVGLSGCATYNMESGTVSHKVDVSIMSESEDSNREKGNIRSMTLVGTSGSKIISSVSAEESTTPPSADTSETENASSDMPPSSLRKYKISKRGPRYRERSPGKRQKVFTYDISFASNILNKLSIPEIRDTRLESREPGGDKLQILDESTKKTSSKDICGESPITTTENVGRESKKVSSTKNFLEHTLSCWSALERDLYLKGIEIFGKNSCLIARNLLSGMKTCMEVANYMYNNGAAMAKRPLLNKSISGDFAETEQDYMEQDMVARTRIYRRRGRNRKLKYTWKSAGHPTVRKRIGDGKQWYTQYNPCVCQQMCGKDCPCVENGTCCEKYCGCSKSCKNKFRGCHCAKSQCRSRQCPCFAASRECDPDVCRNCWVSCGDGSLGEPPARGDGYQCGNMKLLLKQQQRILLGRSDVAGWGAFIKNPVNKNDYLGEYTGELISHKEADKRGKIYDRANSSFLFDLNDQVMLVAGDHRVGIYAKEHIEANRQGFGDLSFEKFVKKAKSGDEESGRDVKGNISLKGNNDDYNESEDDLLDSQELEEFIKDDDLIPSPTQEKKKTNTNVSDEGGKNVGVKKGGAMEGDLAEGVRRRRRLESTEEMKIGDKAAARAMAKDAFINKGTSYNPFSVLNTDNAVLMDVAHKIGVELGSSFNDAVENLNLIKSLELSRKNLVVQSVKLNVDNSKVDCITSDVENNSHNESVDDALSDLDDVMVLRKGRKIHHRKKTVRKKNKGSKSPNNRNIPIKWRGQTEGHTQNCLE

SEQ ID NO: 2552 - protein, 313 aa, Zea mays
  VARIANT 26: note = Ancestral polymorphism is S, Derived polymorphism is C
  VARIANT 53: note = Ancestral polymorphism is D, Derived polymorphism is E
  VARIANT 141: note = Ancestral polymorphism is R, Derived polymorphism is W
METMAKYNRSNPAVKRILQEVKEMQSNPSPDFMALPLEEDIFEWQFAILGPRDSEFEGGIYHGRIQLPSDYPFKPPSFMLLTPSGRFEIQKKICLSISNYHPEHWQPSWSVRTALVALIAFMPTNPGGALGSLDYKKEDRRALGIKSREAPPKFGSPERQKLIDEIHEQMLSKAPPVPQTLPNVPNEESNELPASDPSGEHADKVDEGDNTSGSVSDSSSGLPVPESESGVTENTGETSAVEVANHHVPEASHRENIPRVSSSHQNPAVAIQKPNHDRLLTLAAFGLTLAIMALVIKKFLKINGLGGFIEGKF

SEQ ID NO: 2553 - protein, 313 aa, Zea mays
  VARIANT 31..313: note = Derived polymorphism lacks residues 31 to 313
MAIATTTSSSSLTIRLLHPNPNTNPAPRSLQLLSSRRCARAAVAGGAVPYGAAPRRGIWSIRWNLFLALRASRRLPEMGLVRCHGVSKAARACVRDDLVVPRSPYFPVDSAAGQERGPSPMVMERFQSVVSQLFQHRIIRCGGPVEDDMANIIVAQLLYLDAIDPTKDIIMYVNSPGGSVTAGMAIFDTMKHIRPDVSTVCIGLAASMGAFLLSAGTKGKRYSLPNSRIMIHQPLGGAQGQETDLEIQANEMLHHKANLNGYLAYHTGQPLDKINVDTDRDYFMSAKEAKEYGLIDGVIMNPLKALQPLPASS

SEQ ID NO: 2554 - protein, 1028 aa, Zea mays
  VARIANT 734: note = Ancestral polymorphism is R, Derived polymorphism is W
MGFLSAKLLPSCESVCVCCPALRPSSRRPVKRYKKLLAEIFPKTPDGAPNERKIVKLCEYAAKNPLRIPKACDIAKFLEQRSHKELRSAHVNFVRIITEAYSKLLFICKEQMAYFAISLVNVLTELLESKQENVHILGCQTLANFINSQVDNTYARNIESLVHKVCALSRRQGEDHRLLRAASLQCLSAMIWFMKEHSYIFADFDEVVSSFHSIDLLLILLFAFPLSCLFVQLIFMLRNNQLVRLDLLHIVHSVLENYRTEESNGGGDDRHALQHNWVDEIARSEGRPGVGGGNDVNINTTTIRLRPARNSSALTRDERDSPEVWSHICVQKLAELARESTTMRRILDPMLSYFDMKKQWAPRHGLALLVLSDMAYLEKSSGNEQLILTTIIRHLDHKNVLHDPQTKSDIIQTATSLARQLRSRGFAVELVVAGDLCKHLRKTLEAVESGNVEDQNLNEPLQIVLEDCLMEVVRGINDVRPLYDMMAITLENLPSMPTVARATLGSLLIISHIISLTSVSSNNLMVFPEALLQQILKSMLHTDIDTRVGAHHMFSAIIVRGPSHLRSESEYLYETKKQSRNTSVFASATALLEKLRREKESLSSDKPRNIMHDDVKEMNMHEEDKRKNPAYFSKLVSSFIERCATRSSVEETNIAMLTEDQTNQLLSSFWIQANQTDNTPFNYEAIGHSYSLTVLSSRLKNSSNGNIIQFFQLPLSLRSVALTPSEVLPAYCQRSIFTLAMSMLAFAGKVCHVAELSDLLRCFSSSKIDPYLRIGEDLQLYVRLQSDLGSYGSESDQEIAKSMLSDCRTKVGINDHRVLDVIASALSNFIEMGKDVIVKELTELFTPEEMPLFGSNSALDWANFNAQAFSDESLSFDEECSRTSSVDCGLHESPITNTASSISKITLPQSVPHVLGVGQLLESALHVAGQVAGASVSTSPLPYGTMTSQCEALGLGTRKKLSSWLVNGHESTPDNPMPSLPTAHHSIIPKVNPATFRTSSESCSAVKLPPASPFDNFLKAAYRTQPEL

SEQ ID NO: 2555 - protein, 337 aa, Zea mays
  VARIANT 213: note = Ancestral polymorphism is P, Derived polymorphism is R
MPRRALTLETYLRFFLDPWNTRITVDQLNQILFMHGFVKLHRTKKAKIMERLVGQVDLLPPRRSTLHRASLPSAAAITAAQARDDVEAIGWAECPIGRVAAFAAPSADAPEPVERVPQPADFVLTGRRPRSKRTRGSAYGPSDVAAASKKLKAGAPQKHANVIVKEEENDHELVSPPPPPPDVALPPPRKLQPTLARIPAPPAWGTPMVLPYPSHQLFWGVPLPSRPTAQPCPATPPPGWSVPTPPPSYPAPFCGAPVMLPPLPRHVAWRSPPPLLLKRPPPHLQGKPLPALLPVQHHHLLIHRSCSCSSAAAAVALTGPVGSSHLLRFFRLRNLSK

SEQ ID NO: 2556 - protein, 378 aa, Zea mays
  VARIANT 108: note = Ancestral polymorphism is G, Derived polymorphism is E
  VARIANT 98: note = Ancestral polymorphism is Q, Derived polymorphism is E
  VARIANT 1: note = Ancestral polymorphism is M, Derived polymorphism is I
MTRLLVILFAGATLVVATTAHEHHGEAPTCAGGSEHVLAEFRPGEVTVDGHNEDWESVEASEFALLPALDPDDDKAYSGGKIAVKAVHDGVNVFFLLQVDGAYAYTKGESNKCPSVALMFQVGEKATFYNMGGCKDMPGSCTSKSCRGHEVDIMHFSIGNAIPGRLYGGNHIDNAAGNGNDRFGHLVDVYAWNPHCRYLDGVGPKENNSNAQNDWHGAWWHSSLTFHSGFVDDDNPYGQQDEKDFIRLQSEYKSNRDRNRVELHPVFCKRYPDAQFTIGRPSNMSVALWYPDDGKAWSNSDHYSASCNWLVLDIQPSSEATYYRPAPNRSWDAATGFALLLSVVAICMSIFVGYRFSRNRSTAQFTPLEQIQFAEERH

SEQ ID NO: 2557 - protein, 1161 aa, Zea mays
  VARIANT 1133..1161: note = Derived polymorphism lacks residues 1133 to 1161
MASGSRATPTRSPSSARPEAPRHAHHHHHSQSSGGSTSRAGGGAAATESVSKAVAQYTLDARLHAVFEQSGASGRSFDYSQSLRAPPTPSSEQQIAAYLSRIQRGGHIQPFGCTLAVADDSSFRLLAFSENSPDLLDLSPHHSVPSLDSSAPPHVSLGADARLLFSPSSAVLLERAFAAREISLLNPIWIHSRVSSKPFYAILHRIDVGVVIDLEPARTEDPALSIAGAVQSQKLAVRAISRLQALPGGDVKLLCDTVVEHVRELTGYDRVMVYRFHEDEHGEVVAESRRDNLEPYLGLHYPATDIPQASRFLFRQNRVRMIADCHATPVRVIQDPGLSQPLCLVGSTLRAPHGCHAQYMANMGSIASLVMAVIISSGGDDEQTGRGGISSAMKLWGLVVCHHTSPRCIPFPLRYACEFLMQAFGLQLNMELQLAHQLSEKHILRTQTLLCDMLLRDSPTGIVTQSPSIMDLVKCDGAALYYHGKYYPLGVTPTESQIKDIIEWLTVFHGDSTGLSTDSLADAGYLGAAALGEAVCGMAVAYITPSDYLFWFRSHTAKEIKWGGAKHHPEDKDDGQRMHPRSSFKAFLEVVKSRSLPWENAEMDAIHSLQLILRDSFRDAAEGTNNSKAIVNGQVQLRELELRGINELSSVAREMVRLIETATVPIFAVDTDGCINGWNAKIAELTGLSVEEAMGKSLVNDLIFKESEATVEKLLSRALRGEEDKNVEIKLKTFGSEQSKGPIFVVVNACSSRDYTQNIVGVCFVGQDVTGQKVVMDKFVNIQGDYKAIVHNPNPLIPPIFASDENTSCSEWNTAMEKLTGWSRGEVVGKFLIGEVFGNCCRLKGPDALTKFMVIIHNAIGGQDYEKFPFSFFDKNGKYVQALLTANTRSKMDGKSIGAFCFLQIASTEIQQAFEIQRQQEKKCYARMKELAYICQEIKNPLSGIRFTNSLLQMTDLNDDQRQFLETSSACEKQMSKIVKDASLQSIEDGSLVLEQSEFSLGDVMNAVVSQAMLLLRERDLQLIRDIPDEIKDASAYGDQCRIQQVLADFLLSMVRSAPSENGWVEIQVRPNVKQNSDGTNTELFIFRFACPGEGLPADVVQDMFSNSQWSTQEGVGLSTCRKILKLMGGEVQYIRESERSFFLIVLEQPQPRPAAGREIV

SEQ ID NO: 2558 - protein, 231 aa, Zea mays
  VARIANT 8: note = Ancestral polymorphism is V, Derived polymorphism is A
  VARIANT 29: note = Ancestral polymorphism is R, Derived polymorphism is Q
  VARIANT 37: note = Ancestral polymorphism is C, Derived polymorphism is Y
  VARIANT 71: note = Ancestral polymorphism is M, Derived polymorphism is T
  VARIANT 75: note = Ancestral polymorphism is P, Derived polymorphism is S
  VARIANT 116: note = Ancestral polymorphism is A, Derived polymorphism is T
  VARIANT 175..231: note = Derived polymorphism lacks residues 175 to 231
MGRAPSGAWNMALLGLAVAVVLAVAAEARSLEKQNLCGGCGLGGGGGYGSGGGLGHGAEAGGLVVVKEVVMVVVPAGVLVEAEGLVVVKEVVMVVVPAEVLVEAAALGVVLVEVSAVVRAEAVVLVAEEELGLVVVTVEEQVQVAAMAGGMAEVPEAVTVEELVEVLAVDTVEVQEQEVALEAAMVEALVEATVVVLALVVAVALALAAVEVMVVVPEAEAEVEVEVASAA

SEQ ID NO: 2559 - protein, 726 aa, Zea mays
  VARIANT 65: note = Ancestral polymorphism is T, Derived polymorphism is I
  VARIANT 47: note = Ancestral polymorphism is P, Derived polymorphism is A
MPSITRGGRGGLFSTHRGALLWLRRCQSPLLSTLAGGGGRSDAPHLPVLIVGAGPVGLVLSFLLTKFGIKCAVIEKNVEFTRHPRAHFINNRTMEIFRKLDGLARDIERSQPPVDLWRKFVYCTSLSGSVLGSVDHMKQEDFDKVISPVSVAHFSQYKLVDLLLKKLEGIGFQTCFPSEIGNSTQDLVLESKILMGHKCTSLDQTDEGILVGASVNNGGMIIERKLHCGLLIGTDGARSTVRELAGISMEGERDLQKLVSVHFLSRDLGRYLSSQRPGMLFFIFNPGAIGVLVAHDLENGEFVLQVPFYPPQQMFEDFSAKVCEQIIFKLVGWEPADVHVLDIKPWAMHAEVAEKYICCNNRVILSGDAAHRFPPAGGFGMNTGVQDVHNLAWKLGLLLNGVASPSILQTYESERRPVRIFSHAFCSSNVAIFNTELSVENFKAAMSIPTTLGLDPTVANSVHQVINRSLGSIIPRNVQKAVLEGLFSLGRAQVSDYILNEKNPIGSLRLARLRSILDEGKSLQLQFPAEDLGFHYAEGALVVEASCEKTHEGEKLQHSKRASREYIPSAKVGSRLPHMLVREVPASSEGAFSTLDLVSGDKLEFVLIIAPVKESYEIARATLKIADELTLSARVCVMWPRGSTDAEVEESRSELTPWTNYIDVEEVPRVSGGSWWEMCRISRKSVLLVRPDEHIAWLTELDRVRDAESEIRRVFSHVLCLNSHRV

SEQ ID NO: 2560 - protein, 804 aa, Zea mays
  VARIANT 272..804: note = Derived polymorphism lacks residues 272 to 804
  VARIANT 278..804: note = Derived polymorphism lacks residues 278 to 804
  VARIANT 298: note = Ancestral polymorphism is P, Derived polymorphism is L
  VARIANT 316..804: note = Derived polymorphism lacks residues 316 to 804
MGPPFFLLFLVLTAAAVVSSAPRREAFRRDPGHPHWHHGAFHDVEDSVRADVRRMLHTRAEVPFQVPLEVNVVLIGFNGDGGYRYSLDGHKLEEFLKMGFPLHRPSCFETGEPIDIEHHIMYNVISAGQPELISLEKSLKEAMQPAGIARDSEYGRELPLFEVEATAVESIFQRLYSFIFDMEPGYPANDMDRPVPVAIFIVNFDKVRMDPRNKEVNLDSLMYGTIGGLTEQELKKQEAEYIYRYRYNGGGATQVWLSSGRFVVIDLSAGPCTYGKIETEEGSVSYRSMPRLSQIIFPRGLAAPSASSTQDIFIGQLGGAIATTIEHVIAPDIRFETVDMAVRLLVPIIVLQNHNRYNILQEGHNYSIDVQAIEREVKKMVHPGQEVIIISGSHALHQHEKLAVAVSKATRSHSLHETKSDGRFHVRTKTYLDGAILKEEMERSADVLSAGLLEVANPSLSSRFFLKQHWTDGEDDVKDSIKHRPLWESYMPKNNKGRRGTGKKKHGSLYRTYGTRVIPVFVLSLAGVDAELLMEEESLVWTSKDVVIVLEHNNEKIPLSYVSETTRQFALPSIAQRHILAGLASAVGGLSAPYERASRIHERHVVNWLWAAGCHPFGPFSNSSQISQILQDVALRTTIYAQVDAALRKIRDTSEFVQSFASEHLKTPLGELVKGNKNKSTTELWVEKFYKKVTNLPEPFPHDLVEKLEEYLDKLEGQLVDLSSLLYDHRLVDAYQNSTDILQSTIFTQQYVERVLANERDKMKCCSIEYSHPKQSSQAFVYGGILLAGFLVYSLVIFFSSPVR

SEQ ID NO: 2561 - protein, 428 aa, Zea mays
  VARIANT 329: note = Ancestral polymorphism is E, Derived polymorphism is D
  VARIANT 121: note = Ancestral polymorphism is G, Derived polymorphism is A
  VARIANT 53: note = Ancestral polymorphism is E, Derived polymorphism is G
  VARIANT 45: note = Ancestral polymorphism is R, Derived polymorphism is G
MERESDAGFFHHDDAQVEAMQRRVDAAAPLADDPYTIFRLPSAVRERRRDLYEPKVVSVGPYYHGRAGLGVAQQHKWRLLRDFLSRGEKAAAAGGLGAYVRAAREVEADARRCYAEGFGLGADEFAELLVLDGCFLLEFFLKKGEGQLAAPGGAKWAWHHMYHDVLLLENQIPFFVVEKLHGVAFAGADRDRDALLDIFCKAFAGDLPSSRVIRPRSDKTIHHLLHLHYECNIRSPAAADSDKARSSSFGDANGASLAIWKQPAIPSPRSGEGAGAGAGSKGRLTSMIPPAGKMEEAGVAFKRKAAPRDLFDVSFRYGVLHVPAFVLDEGAKVLLANLVAFEQGGGRAARQLDGGNLVTGFVALVGSLVNSRRDLEVLRRCGIMHCMLPDDDAVAYFNHVVQYTTMDYDRNLLASLFRDVREHCHWNR

SEQ ID NO: 2562 - protein, 266 aa, Zea mays
  VARIANT 23: note = Ancestral polymorphism is P, Derived polymorphism is T
  VARIANT 106: note = Ancestral polymorphism is S, Derived polymorphism is T
MAAEDQTPCTKLRPGKAKTRKKTKRDKWGQPISAAAADEEPSVEPEQEHPAGVVEAAVQVEKEEEEEATAAAEGYEPGKVVASGLPYTTTEADIRKLFEFYGPIQSMQLSRFPDSGNFRGLAFLCFEFCFLLDAEVSEEDAIKSLELDGFKIGSRYMRVERCRVTATSNKKRKAEFETDPKKSEGCLSAYVGNLSWNVDENDLRGFFGPSKIASVRFAVDKRTGGSRGFCHVEFQDDESLEKAIAMNQSKLQGRPVKVAYSVSNRG

SEQ ID NO: 2563 - protein, 514 aa, Zea mays
  VARIANT 103..514: note = Derived polymorphism lacks residues 103 to 514
MGNSAAGASSKPPTPASTPNSRLASAPSSRHAATPPHASAAASAPAPASRTVYSDRFIPSRTGSNLALFDLAPSPSSAASSSHSHDAGPAASSGSAQPAASPYCTLLRAALFGPDTPDRVASSAAACSSSSSSFSPGPSPVGTPATGNIFRFKTEVRRNAKRALFSGDQEEDALFPGIFTTRGAGPRKVPRSPYKVLDAPALQDDFYLNLVDWSSHNVLAVGLGNCVYLWNACSSKVTKLCDLGVDDNVCSVGWAQRGTHLAVGTKQGKVQIWDATRCKRIRTMESHRMRVGALAWSSSLLSSGSRDKSILHHDIRAQEDYVSKLTGHKSEVCGLKWSYDNRQLASGGNDNGLFVWNPHSVQPVLKYTEHTAAVKAIAWSPHLHGLLASGGGTADRCIRFWNTTTNTHLSCVDTGSQVCNLAWSKNVNELVSTHGYSQNQIIVWRYPTMSKLATLTGHTYRVLYLAISPDGQTIVTGAGDETLRFWNVFPSPKSQSSDSLSCIGGTSFVRSYIR

SEQ ID NO: 2564 - protein, 208 aa, Zea mays
  VARIANT 16: note = Ancestral polymorphism is E, Derived polymorphism is A
MASTSSSTPAPVEVDERGRKRKRAAGADPAAPAQPSKWRTRREHEIYSSKLLEAIRLVRAGPPSAAAAGTAAAPPRSRAVREAADRALAVAARGRTHWSRAILASRRRRLQAAHRARLRAPASPPARHGAPSASAAKGAATPPLERKAKVLGRLVPGCRKLSFPTLLAETTDYIAALQMQVRAMTALAEALSAVSATSSSGAGSSSPP

SEQ ID NO: 2565 - protein, 81 aa, Zea mays
  VARIANT 17: note = Ancestral polymorphism is P, Derived polymorphism is R
  VARIANT 59: note = Ancestral polymorphism is T, Derived polymorphism is I
  VARIANT 66: note = Ancestral polymorphism is A, Derived polymorphism is T
MRGDRSKATRPLAPPPPAIGERDMVEDPRLLKQVRELRRLVPACREPCGLGELFQDTATYIEDLQAQVQVMRMLLDKLSDE

SEQ ID NO: 2566 - protein, 540 aa, Zea mays
  VARIANT 200: note = Ancestral polymorphism is G, Derived polymorphism is R
  VARIANT 139: note = Ancestral polymorphism is S, Derived polymorphism is C
  VARIANT 120: note = Ancestral polymorphism is R, Derived polymorphism is W
  VARIANT 61: note = Ancestral polymorphism is P, Derived polymorphism is S
MVLDHAIRGSAARRAETQTLAPVLLMGPPPPPPIPPTTGMYLPGPPPPGTLLPHPMHMALPREVIIYMDECRSRSLLKFISDAGIVPSLEDERRRERVVRELGKIVMDWAKRVAYEQGNWHWIASATVLTFGSYALGFSTLKAYGPESDIDVLCIGPCIASLQHHFFVVLRQMLEGRPEVSELHSIEGAKVPLMRFKFNGILVDFPYVQLPVINAAEAMHAFDPHVLENVDGPSWRCLSGVRANRQIIQLVPNMKKFQYLLRCLKLWARKRGLHCHLLGFFAGIHLAILAAYVCRRHPNASINTLLSLFFDIFVHWPWPLPVSLLDPPVPCRGPDGCSLMPIMLPCIPPEFCSSSTTESTFSKIKEELWRGYALSKDTRSTDFNWSWLFAPFPYGARYKCFLRIVLSAPMGEELRDWVGWVKSRFRNLLLKLESLGVYCDPDPSEQVDHTITDPNVVFFWGLIYRRNIQICISSLKEDFMKSVCNNIYGKEKCAHSDITMSIVGPPQLPKSVFDLSVYSEKLPQHMMGHQLMKQNYNAVS

SEQ ID NO: 2567 - protein, 216 aa, Zea mays
  VARIANT 38: note = Ancestral polymorphism is L, Derived polymorphism is V
MEKTKLPLPLPLPLVHGERLWARPWRWLKTAFFIVAMLASLLLVCAPPLLVVLLDLLLPPALLSSFLRAQPPSSASFAAALAAQARPFRFASSLADLPALSAARSLLILCAYAAAGGGGAAYRWVAVACSAASVCYVLAKAVAVFGAAPVWRGNGQLVAVEALFLMSLALAVAHLAMAYRASCRERRRLQLVYRIDVEAVRLKGGQTPKALKQCMI

SEQ ID NO: 2568 - protein, 100 aa, Zea mays
  VARIANT 36: note = Ancestral polymorphism is Q, Derived polymorphism is H
  VARIANT 22: note = Ancestral polymorphism is A, Derived polymorphism is V
  VARIANT 4: note = Ancestral polymorphism is S, Derived polymorphism is R
MGGRLVSMLRWPPDLGLPSLAALLPAPPAHLRVQVQEWWQWQWQRSRPEQLGAAARRWPELVRDVPVLVDAALWGVVTAVESVALVSMMCCFFLCCGCTL

SEQ ID NO: 2569 - protein, 721 aa, Zea mays
  VARIANT 400..721: note = Derived polymorphism lacks residues 400 to 721
MGTERKRKVSLFDVVDETSVSAKLRAASNGAAATATGGNPSVNRWNGRPYTARYFDILEKRRTLPVWQQKEEFLRSLRDNQTLILVGETGSGKTTQIPQFVLETEGLGNRSMVACTQPRRVAAMSVSRRVAEEMDVTIGEEVGYSIRFEDCSSHKTVLKYLTDGMLLREAMADPLLEKYKVIVLDEAHERTLATDVLFGLLKEVLKNRPDLKLVVMSATLEAEKFQGYFNGAPLMKVPGRLHPVEIFYTQEPERDYLEAAIRTVMQIHMCEPAGDILVFLTGEEEIEDACRKINKETNNMGDQVGPVKVVPLYSTLPPAMQQKIFEPAPAPLKEGGPPGRKIVVSTNIAETSLTIDGIVYVIDPGFSKQKVYNPRIRVESLLVSPISKASAHQRAGRAGRTQPGKCFRLYTEKSFNEDLQPQTYPEILRSNLANTVLTLKKLGIDDLVHFDFMDPPAPETLMRALEVLNYLGALDDEGNLTQLGEMMSEFPLDPQMSKMLVISPKYNCSNEILSVSAMLSAPNCFLRPRDAQKAADEAKARFGHIDGDHLTLLNVYHAYKQNNEDPQWCYENFVNSRALKSADNVRQQLVRIMTRFNLKMCSTDFNSREYYVNIRKAMLAGYFMQVAHLERTGHYLTVKDNQVVHLHPSNCMDHKPEWVIYNEYVLTTRNFIRTVTDIRGDWLIDIAPHYYDLSNFPSCEAKRVLERLYNKRERERAANRG

SEQ ID NO: 2570 - protein, 221 aa, Zea mays
  VARIANT 87: note = Ancestral polymorphism is P, Derived polymorphism is L
MEASLAAAAVGLFPPPRIRIRITKSSPLPRHRCLQSGPSKIWTSGSRACLVAASASTPPAPGGGLYSAATYELTPENVDRVLDDVRPYLISDGGNVTVVAVEDGVISLKLEGACGSCPSSTTTMNMGIERVLKEKFGDAFKEIRQVFDGDQPAAETTAEAVNRHLDILRPAIANYGGSVDVLAVDGEDCLVRYDGPESIGSGIKAAIKEKFPDITSVVFTL

SEQ ID NO: 2571 - protein, 52 aa, Zea mays
  VARIANT 4: note = Ancestral polymorphism is G, Derived polymorphism is E
  VARIANT 9: note = Ancestral polymorphism is V, Derived polymorphism is A
  VARIANT 15: note = Ancestral polymorphism is R, Derived polymorphism is C
  VARIANT 18: note = Ancestral polymorphism is I, Derived polymorphism is K
  VARIANT 26: note = Ancestral polymorphism is A, Derived polymorphism is V
  VARIANT 28: note = Ancestral polymorphism is P, Derived polymorphism is S
  VARIANT 41: note = Ancestral polymorphism is S, Derived polymorphism is N
MPPGASVHVVSILLRISISSDLLDLARPFLDLSAIDETHRSMFLLGHDAQAM

SEQ ID NO: 2572 - protein, 144 aa, Zea mays
  VARIANT 41: note = Ancestral polymorphism is L, Derived polymorphism is I
  VARIANT 40: note = Ancestral polymorphism is S, Derived polymorphism is R
  VARIANT 28: note = Ancestral polymorphism is P, Derived polymorphism is H
  VARIANT 25..144: note = Derived polymorphism lacks residues 25 to 144
  VARIANT 1: note = Ancestral polymorphism is V, Derived polymorphism is M
MVCCKEHQRIYTEWFALADSNLNTLDLPVMEGVNELLAISLKSSDFVSFKYSEPDFEETEQKTINEPHVNVRSEPLTTRRCALQPWMDGSSSSNSTVDLPDGVPPAPSRSKNDRLSKEEMIATMDEVVQGRKMQVEKATKESED

SEQ ID NO: 2573 - protein, 121 aa, Zea mays
  VARIANT 1: note = Ancestral polymorphism is M, Derived polymorphism is I
  VARIANT 5: note = Ancestral polymorphism is S, Derived polymorphism is F
  VARIANT 16..121: note = Derived polymorphism lacks residues 16 to 121
  VARIANT 18: note = Ancestral polymorphism is F, Derived polymorphism is L
  VARIANT 20: note = Ancestral polymorphism is Q, Derived polymorphism is H
  VARIANT 21: note = Ancestral polymorphism is M, Derived polymorphism is I
  VARIANT 27: note = Ancestral polymorphism is G, Derived polymorphism is D
  VARIANT 31: note = Ancestral polymorphism is G, Derived polymorphism is S
  VARIANT 34: note = Ancestral polymorphism is L, Derived polymorphism is V
  VARIANT 36: note = Ancestral polymorphism is T, Derived polymorphism is I
  VARIANT 37: note = Ancestral polymorphism is L, Derived polymorphism is I
  VARIANT 43: note = Ancestral polymorphism is Q, Derived polymorphism is H
  VARIANT 45: note = Ancestral polymorphism is A, Derived polymorphism is V
  VARIANT 53: note = Ancestral polymorphism is P, Derived polymorphism is R
  VARIANT 56: note = Ancestral polymorphism is M, Derived polymorphism is I
  VARIANT 68: note = Ancestral polymorphism is D, Derived polymorphism is H
  VARIANT 70: note = Ancestral polymorphism is Y, Derived polymorphism is F
  VARIANT 82: note = Ancestral polymorphism is R, Derived polymorphism is K
  VARIANT 84: note = Ancestral polymorphism is R, Derived polymorphism is H
  VARIANT 90: note = Ancestral polymorphism is G, Derived polymorphism is R
  VARIANT 92: note = Ancestral polymorphism is Q, Derived polymorphism is H
  VARIANT 93: note = Ancestral polymorphism is S, Derived polymorphism is F
  VARIANT 96: note = Ancestral polymorphism is P, Derived polymorphism is H
  VARIANT 99..121: note = Derived polymorphism lacks residues 99 to 121
  VARIANT 104: note = Ancestral polymorphism is V, Derived polymorphism is I
  VARIANT 105: note = Ancestral polymorphism is S, Derived polymorphism is P
  VARIANT 107: note = Ancestral polymorphism is E, Derived polymorphism is K
  VARIANT 111: note = Ancestral polymorphism is P, Derived polymorphism is H
MNCSSGHFFAMVKRFQSFSQMSFSRMGQGCGDLVLTLLVRKLQNALTSLDNFPVIMSHHFKLRSSIADIYKALNNYSMYPIRPRVAIIMGSQSNLPMMKVAERVSKEFNIHCEDVVFEENL

SEQ ID NO: 2574 - protein, 336 aa, Zea mays
  VARIANT 33: note = Ancestral polymorphism is Q, Derived polymorphism is K
MDMAHERSDASSEEEVMAGELRRGPWTVEEDLQLVNYVDAHGEGRWNSLARSAGLKRTGKSCRLRWLNYLRPDLRRGNITPQEQLMILELHSRWGNRWSKIAQHLPGRTDNEIKNYWRTRVQKHAKQLKCDVNSQQFKDVMRYLWMPRLVERIQAAAANNNASGAGVPPAGAAADDTPLSSSWQHGGGADDDGGLYASPELPTDACWPPADCYYYPAAADHQLLNNPAAAAVFPDLSSTTAGSSSPSSDSGAGTAQPWPAPLGGAEWLTTGACCDASSAAAALGGQQQQSCLVGETSWASSELPELGVADFEIGSFDVESIWSMDDSLWFTQAQGV

SEQ ID NO: 2575 - protein, 342 aa, Zea mays
  VARIANT 61: note = Ancestral polymorphism is L, Derived polymorphism is H
  VARIANT 93: note = Ancestral polymorphism is T, Derived polymorphism is M
MSPELTGKMAAKAAAAAAAVKPATRAYVTFLAGDGDYWKGVVGLAKGLRKVGSAYPLVVALLPDVPESHRRILVSQGCILREIEPVYPPENQTQFAMAYYVINYSKLRIWEFVEYERMVYLDADIQVFENIDELFELEKGYFYAVMDCFCEKTWSHTPQYRIGYCQQCPDKVAWPTTELGPPPPLYFNAGMFAHEPSMATAKALLDTLRVTPPTPFAEQDFLNMFFRDQYRPIPNVYNLVLAMLWRHPENVQLEKVKVVHYCAAGSKPWRFTGKEANMDREDIKTLVNKWWDIYNDEALDFKGLPLSPADADDEVEAVAKKPLRAALAEAGTVKYVTAPSAA

SEQ ID NO: 2576 - protein, 391 aa, Zea mays
  VARIANT 255: note = Ancestral polymorphism is R, Derived polymorphism is C
MADASSRTDTSTVLDMDDKNQRLENGQSGAMALASNSSDRSDRSDKPMDQKVFLSHMSSVLRRLAQNREAARKSRLRKKVLLAWLCTSGSYFYNFGAVCHSLMHACLFICYMPLLIFIVFKGICATTREQQAKTCKPGARTPESSTTGNLHIQFWRSNSCYEWKCKFISAGAMTFDLEYSRWQEEENKQINELRTAVNAHASESDLRLIVDGIMAHYDEIFRLKGIAAKADVFHILSGMWKTPAERCFLWLGGFRSSELLKLLVNQLEPLTEQQLMGLSNLQQSSQQAEDALSQGMEALQQSLAETLAGSLGPSGSSGNVANYMGQMAMAMGKLGTLENFLRQADNLRQQTLHQMQRILTIRQAARALLAIHDYFSRLRALSSLWLARPRE

SEQ ID NO: 2577 - protein, 168 aa, Zea mays
  VARIANT 86: note = Ancestral polymorphism is A, Derived polymorphism is T
MDSKLGVQHGHRHHHSHNGVSKPPVARRRQSGGGGGKGVKVVYISSPMKLTASAEEFRAIVQELTGRDSNVADHDLDGGGAYHVGAPSSSSSSSSSYSSLGRVSPAVAEAAAAAAAGARARSSPATNAGGASPVVEYAAAMAQPPPFQFQGMYDHQIAGSLLYGLDNW

SEQ ID NO: 2578 - protein, 561 aa, Zea mays
  VARIANT 377..561: note = Derived polymorphism lacks residues 377 to 561
MAMAEKVKEKMLMLRSSDNQEFEVKESVAMQSMTLKKMVEDGCADKGIPLPNVTSHILVKVIEYCNKHAEPTGPGDAAGTTNRSAEDELNIFDADFVNVEHSTLLDLILAANYLDIKGLLNLARQTITDLINGKMPEEVCKTNIKNDLTIPSTSALATTMPSSERKQMEARFIAYMQETAEERMTGFAVRGEKYRKHGERPPQPPLEIVKYPALLERAWGWDSILPYCPVNSWPLYKTYLQEYYERNSREVLAHQVEANAASGPNLNGADENDLATLFNLCISREVQLLNLLKRRDQKHNVDEISLNEKLTNCARQITFVEYAGFPFPSVALKFINSIVPIANHGFKCIMAESDLLCMLLMCGTGMISQVNICSRIRKVAFRFMTYKGPGCFAAAATMMATTKEAKLMSGLLRNRCRENNGPFSRSVFIRKWTIAAMFRICEECSPVEESTGGYTATKLILDGSDDKNPCDKELVNKDNLLQRNKINQKYQGLFKGKTTKCRHPVQKQEPGDGGCGNHSSNECNMILLCSNARITQSGQSHLNCGAKTLVRRNTEGPSKLA

SEQ ID NO: 2579 - protein, 301 aa, Zea mays
  VARIANT 158: note = Ancestral polymorphism is V, Derived polymorphism is I
MGNASGREEDAAAVDGDGADVEDGGGDSSVRSSERAFPPYGSVGANHVRRACSVGVVGGGGGAGSPPGSPGHSLSPRMFVPQTPVPPLQRAADVTPVFNQILMNDQEEEYDGPPQKEIPSLIVWTLGGKNVYVEGSWDNWKSRKAMQKSGKDHSLLLVLPSGVYRYRFVVDGERRCLPDLPCETDAMGNAVNLLDVNDFVPESVESVVEFEPPLSPDSSYSFQAPEDKDFAKEPPALPAQLHLGVLNSQNSEESCARPQHIVLNHLFIEKGWGAHPLVALGLTHRFESKYVTLVLYKPIER

SEQ ID NO: 2580 - protein, 197 aa, Zea mays
  VARIANT 126: note = Ancestral polymorphism is K, Derived polymorphism is T
  VARIANT 128: note = Ancestral polymorphism is T, Derived polymorphism is I
MDAATLLTLAGQKRQSGKPAFEANICAIVEYVLPPYKTSGWALVRATRCGRSPQAQDLRETIDLKLLPAVHRTGCITTKELGTVMRSLGQNPTEAELQDMINEVDADGNGTIDFPEFLNLMARKMKDTDSEEELKEAFRVFDKDQNGFISAAELRHVMTNLGEKLTDEEVDEMIREADVDGDGQINYEEFVKVMMAK

SEQ ID NO: 2581 - protein, 449 aa, Zea mays
  VARIANT 125..449: note = Derived polymorphism lacks residues 125 to 449
MYRAKRAALSPKVKRRVGKYELGRTIGEGTFAKVRFAKNTENGEPVAIKILDKEKVKRHRLVEQIKREICIMKLVRHPNVVRLFEVMGSKARIFIVLEYVTGGELFEIIATNGRLKEDEARKYFQQLINAVDYCHSRGVYHRDLKLENLLLDAAGNLKVSDFGLSALTEQVKADGLLHTTCGTPNYVAPEVIEDGGYDGATADIWSCGVILFVLLAGYLPFEDDNIIALYKKISEAQFSCPSWFSAGAKNMITRILDPNPTTRITISQILEHPWFKKGYKPPVFDEKYQTSLDDVDAAFGDSEDRHVKEETEDQPTSMNAFELISLNQALNLENLFEAKEEYKRETRFTSQCPPKEIITKIEEAAKPLGFDVQKKKYKMRMENPKAGRKGNLNVATEVFQIAPSLHVVELKKAKGDTLEFQKFYRSLSTQLKDVVWKCDGEVDGNSAAA

SEQ ID NO: 2582 - protein, 148 aa, Zea mays
  VARIANT 13: note = Ancestral polymorphism is P, Derived polymorphism is L
MPVCSIWYSMPHPLLAAVSAAVYSSFISPPRRVPASLGRRRPAGVAVRCAPNGGGVPAAGDTKAKLKVGSPIIIVEAPVMLKTAASVPSLRHNSGQVKPGDVGRIMARKPKDVWVVRLAVGSYLLDGKFFSPLDSDNGDDGEPQAQDE

SEQ ID NO: 2583 - protein, 697 aa, Zea mays
  VARIANT 583..697: note = Derived polymorphism lacks residues 583 to 697
  VARIANT 481: note = Ancestral polymorphism is R, Derived polymorphism is C
  VARIANT 466..697: note = Derived polymorphism lacks residues 466 to 697
  VARIANT 404..697: note = Derived polymorphism lacks residues 404 to 697
MGIRACSVCWLFYVLVLVCSLCQILYVGSVAAQTAQLTVDASPQNAQIIPGNMFGIFFEEINHAGAGGLWAELVSNRGFEAGGSNTPSNIDPWLIIGDESNIIVATDRSSCFASNPIALRMEVLCGASETNACPSGGVGIYNPGYWGMNIERTNVYRVTIYIRSSESVELMVSLTSSDGLQNLASHTIMGDKEDFVEWTKVEFDLQSNYINTNSRLQLTTTKSGIIWFDQVSLMPSDTYMGHGFRKDLASMLANLKPRFLKFPGGNYVMGNYLINAFRWSETVGPWEERPGHFNDAWAYWTDDGLGFFEFLQLAEDLGACPVWVVNDGASIYEGVPSATIAAFVKDVVNGIEFARGDPETAWGSVRAAMGHPEPFQLYYVSIGNQECSKYYYKDNYVKFYSAIKASYPDIKIISSCDRSAISSDNPADLYDVHVYTSSGDMFSKSRMFDNTARTGPKVLALLLLPQLSSFYNWLVMSYIICILQAIVSEYAVTGNDAGRGTLIAALAEAAFLIGLERNSDVVEMASCAPLFVNDNDQRWNPDAIVFNSWQHYGCPNYWMLHFFKDSSSATLHPSTIQLPNYDQLVTSAITWNNPHDGNTYMKIKVVNFGSKAVSLNISVTGLETDIQTFGSIKTVLTSGWLRDENSFQQPDKVVPAASPITNAGKQMGVILNSYSLTSFDLLLDSESQVRASIQAYD

SEQ ID NO: 2584 - protein, 198 aa, Zea mays
  VARIANT 77: note = Ancestral polymorphism is E, Derived polymorphism is D
MEIAEALQAYTGLTPAAAATILALMVATYLLVSSLFVAPAPAPAPLSKPPQQQREGEKAQEEEEEEPMPFVYPDPVEVGELTLEQLSAYDGKDPAKQILIAIRGQVYDVSRGRLFYGPQGPYSLFAGRDATRALALMSFDPNDLTGDLDGLSADELEVLQDWEEKFKERYPRVGHLACQDATDSGQTTAGLHHEEGDA

SEQ ID NO: 2585 - protein, 348 aa, Zea mays
  VARIANT 220: note = Ancestral polymorphism is W, Derived polymorphism is S
MQSKHRVFAEDLLLAAAAEGEDHFDRVPDSLVLLIFNKLADARSLGRCSAVSRRFSALVPLVDDACLRIDRVIPADAADAGAPRPRAALSHLLKSVLLAVLKPFAHCDAKSASPQKHAQQQQQHHSPAQVLRNFSSIRSLRMELPVSDVGTDDGVVLRWKAVFGSTLQSCVILGGTRVDRAAAAAAGPPHAPSSAPPRATTTAAASRSPCTPTAASSCAWHYLLREIVKEHPTLERVALTDAGGQGTLSMGRDQLREFRDRPLAAAPAAAANRTQVPACNMKLRYAPLLELSDGTRIHGATLVVIKPVGDAGGKDLDELGAGAFDGPLREAVAALGKRRAYLLEMNGF

SEQ ID NO: 2586 - protein, 426 aa, Zea mays
  VARIANT 272: note = Ancestral polymorphism is H, Derived polymorphism is Y
MELWSKLRNLDAYPKVNEDFYSRTLSGGLITILSSLAILLLFFSEIRLYLYSATESKLTVDTSRGERLHINFDVTFPALPCSLVAVDTMDVSGEQHYDIRHDIIKKRIDHLGNVIESRKDGVGAPKIERPLQKHGGRLDHNEVYCGSCYGAEESDDQCCNSCEEVRDAYRKKGWAVNNVELIDQCKREGYVQRLKDEQGEGCTIHGFVNVNKVAGNFHFAPGKSLDQSFNFLQDLLNLQPETYNASRAKLNSLYPYRSTYSIVQNRKLIIVHSPLHWKQISHKINKLSFGEEFPGVVNPLDGVEWIQDNSNGLTGMYHLLIISFAQVVPTIYTDIRGRKIHSNQFSVTEHFREAIGYPRPPPGVYFFYEFSPIKVDFTEENTSLLHFLTNICAIVGGIFTVAGIIDSFVYHGHRAIKKKMELGKLG

SEQ ID NO: 2587 - protein, 129 aa, Zea mays
  VARIANT 86: note = Ancestral polymorphism is V, Derived polymorphism is I
MSSEKEAALAAVLDDSPTIFDKIIKKEIPSTVVYEDEKVLAFRDINPQAPTHILIIPKVKDGLTGLAKAEERHIEILGYLLYVAKVVAKQEGLEDGYRVVINDGPSGCQSVYHIHVHLLGGRQMNWPPG

SEQ ID NO: 2588 - protein, 320 aa, Zea mays
  VARIANT 101..320: note = Derived polymorphism lacks residues 101 to 320
MAMGLPGHRCCRLPALGSVTPLCPALARRPLPRTSDLRYSSLEAQAGDTIGEEVLRMFLEERQLHGDFVTKISDMVWRRNGGNVDAVEATTDQGNAVDVAQPEDVREDVVDDGMLRLAATRGWVPGDSSPPLSKRLSAKDWQNERDKRKELNLLKYEALKDELLLLTTGIGAACSLYCLLVFSLETAVSYALGVGFSCLYLQLLCQHADNLSKQDIPQVFLKKKVKKIGITSEDLKNTIEKTLGGGRVALSSPRLVIPAVIFGLSALSDHFKNSFFSFEVLPGMMGFLAYKAAALVQVYRDNEDLRLILPEEEDADSEST

SEQ ID NO: 2589 - protein, 203 aa, Zea mays
  VARIANT 196: note = Ancestral polymorphism is L, Derived polymorphism is H
  VARIANT 188: note = Ancestral polymorphism is G, Derived polymorphism is W
  VARIANT 169: note = Ancestral polymorphism is A, Derived polymorphism is T
  VARIANT 163: note = Ancestral polymorphism is K, Derived polymorphism is E
  VARIANT 156: note = Ancestral polymorphism is T, Derived polymorphism is M
  VARIANT 121..203: note = Derived polymorphism lacks residues 121 to 203
  VARIANT 32: note = Ancestral polymorphism is L, Derived polymorphism is S
  VARIANT 31..203: note = Derived polymorphism lacks residues 31 to 203
MMARTTPLPLRVKSSLRHDFKFLKVENLGNQLVQQKGKPKIEVYEKDRKKGAGALTTHARAVGLGYKSVAHFLIAKHNNKQVPTDIVREPEQHAFAQIVSFLVDLWEDGGSDDGYVLVKQEDVVDEMTSFMAACLVSIKKTKDLPPDQLQKALRKTFSAEKKKSKIRKALDGTKVIYNVASWGATAVGVYNNRALHTVATTTF

SEQ ID NO: 2590 - protein, 320 aa, Zea mays
  VARIANT 79..320: note = Derived polymorphism lacks residues 79 to 320
  VARIANT 128: note = Ancestral polymorphism is I, Derived polymorphism is T
  VARIANT 134: note = Ancestral polymorphism is R, Derived polymorphism is C
MSTTNLRRRLHHGDVDGRKNEHVDISSADSLNEPLLGKSNDDNFGSEVYDPRKQDLWDDDMKKEQLHWSFLFSNLITQWAQWLASIIVSSGSIFGRLSPFSSENQINPVYLSPLQEQRLDTLRHRLQISFDGSRIEHQDALRQLWRLAYPAREIPPLKSELWKEMGWQGNDPSTDFRGGGLISLENLIFFARNYPNSFQMLLNKVQGQRSDWEYPFAVAGINVSFMLVQMLDLKSNIYAGVPSSKYGIRFLELLGRDENAFDHLYCVAFRLLDAQWLVKRASYMEFNEVLKSTRTQLERELVLDDVLEVKDLPSYTMLDE

SEQ ID NO: 2591 - protein, 701 aa, Zea mays
  VARIANT 456..701: note = Derived polymorphism lacks residues 456 to 701
MAAASRKEEERNERVVRGLLKLPPNRRCVNCDGLGPQYVCTSFWTFICVSCSGIHREFTHRVKSVSMSTFSTQEVEALQKGGNQRAKESFLKDFDTQKMRLPDSSNSGSLRDFIKAVYVERRYAGGRFSERPPRDKQNQKAHEEEHRRPNSYHSFSQSPPYDYQYEEGRNGKRSAFLSRKPGSDKGHQGKISGFCYSSHSLHQRMSRDGFTGENSVSRTSNCSGSSISDTVRTAPQSPNFPDSGCFSPPVVQDQSNVHSSCGLTSSQRAVSAGDLDSISLKSGKSNLSDLIFENDNVHRTEKSSNSAAPSFIAFSDAISAPNQASFDSKASQEHHVTTIDQSVDLFSNTLTETPSADKVIPTAHSMDNAGWATFDTPPEQKQPALTGLSYVSATSIDKQALNHDLFSSESNDELTWFRSSKDDASVTNHNQSTATSLDTCSSEVRNIFVFYVNINELEAGKARAKRNHAKQGLSLMLHIFCLNSLLSLPLQPWSIFDASSGSTQYTVKGDLSLMTSRLQEPKGTMNENSSQLWHSFDDANGIVCAQPRIDDHSNTASISLSTSNPFVCSIVLKESYDDDSHKVLMGELTPNTLIAASSEPSLGGPSTEQMPLNPFDLPFDTQSGTPDLFMDVSSLQEALPSPDLPTFLDGLPERWFSSSSCAYVPSASASHGGLPCLVERGPNCSLLNIPVGTLSAGNPFV

SEQ ID NO: 2592 - protein, 165 aa, Zea mays
  VARIANT 119: note = Ancestral polymorphism is R, Derived polymorphism is S
MTSVSARPVGVGYCFGGARCQPRSRVRVSAAASAVAAPAPAMAATMYELLAVEETAGPDEIKAAYRRAARRWHPDACPGGADRFMAAREAYEVLSDPERRRGYDIQLRCGAHFGDAGYRAARRAGFADWEAQLTGLQWRAAGRRGRAGGETWGSRMRQAAAQPSL

SEQ ID NO: 2593 - protein, 212 aa, Zea mays
  VARIANT 50: note = Ancestral polymorphism is Y, Derived polymorphism is F
MDLGVCEGSSTNITSDYHSVQMSTRTTKVWEYFQQELVEVDGVMKAICKYCGTKLTRKRNSCTNSLRNHVADTCPKILVEDRKRFIATMRKKPGEGSFVFDPRKTHECMVKWCISAEVAFNKFDDPFFAPWMESLQPSFSAFNEIAERSGFPSKAGLILDVPNCCNSTHNMIMEAIEYKVVLKRYAEEQLEPSPDDEEWTNSEAIGEFLGGI

SEQ ID NO: 2594 - protein, 178 aa, Zea mays
  VARIANT 35: note = Ancestral polymorphism is P, Derived polymorphism is S
  VARIANT 39: note = Ancestral polymorphism is P, Derived polymorphism is L
  VARIANT 156: note = Ancestral polymorphism is G, Derived polymorphism is A
MALLTAPPAALVVLAVAAALLALLPRGSAQISAPPAGAPAPSSSLDCAGALLNLTPCLTYVERRSALTRPEKGCCGALAAVVGGDDAACLCALLAGNGVRVDTVRALALPTICRVDAPPPRLCAALGMPVAEPPGGAAADAPMDSGTYLHYTARSGLPVFDKLAFYNDVGCLPLPGGN

SEQ ID NO: 2595 - protein, 125 aa, Zea mays
  VARIANT 51: note = Ancestral polymorphism is P, Derived polymorphism is S
  VARIANT 46: note = Ancestral polymorphism is N, Derived polymorphism is H
  VARIANT 35: note = Ancestral polymorphism is N, Derived polymorphism is K
  VARIANT 15: note = Ancestral polymorphism is D, Derived polymorphism is E
  VARIANT 9: note = Ancestral polymorphism is V, Derived polymorphism is M
MCLPSVRYVDLRFNDLCGPVPPALFDKPLDAIFLNDNRFDLELPDNLGNSPAFVLVLANLRLRGCIPRSMGRMAGTLVELVALNSGLRSCLPQELGWLRELTLLDLSSNQLQGMLPESMAGLHSL

SEQ ID NO: 2596 - protein, 72 aa, Zea mays
  VARIANT 12: note = Ancestral polymorphism is A, Derived polymorphism is E
MCLDEVAGGGAEREMPCKHRFHDQCILPWLEMHSSCPVCRHQVPTEEPAAGQLTVAEAQVLSPVATRAATTG

SEQ ID NO: 2597 - protein, 133 aa, Zea mays
  VARIANT 119: note = Ancestral polymorphism is M, Derived polymorphism is I
  VARIANT 118: note = Ancestral polymorphism is S, Derived polymorphism is L
  VARIANT 114: note = Ancestral polymorphism is R, Derived polymorphism is S
  VARIANT 90: note = Ancestral polymorphism is E, Derived polymorphism is K
  VARIANT 88: note = Ancestral polymorphism is V, Derived polymorphism is F
  VARIANT 87: note = Ancestral polymorphism is V, Derived polymorphism is M
  VARIANT 78: note = Ancestral polymorphism is R, Derived polymorphism is S
  VARIANT 75: note = Ancestral polymorphism is A, Derived polymorphism is E
  VARIANT 74: note = Ancestral polymorphism is V, Derived polymorphism is M
  VARIANT 68: note = Ancestral polymorphism is G, Derived polymorphism is S
  VARIANT 53: note = Ancestral polymorphism is A, Derived polymorphism is T
  VARIANT 52: note = Ancestral polymorphism is T, Derived polymorphism is I
  VARIANT 47: note = Ancestral polymorphism is S, Derived polymorphism is P
  VARIANT 44: note = Ancestral polymorphism is S, Derived polymorphism is I
  VARIANT 34: note = Ancestral polymorphism is T, Derived polymorphism is I
  VARIANT 31: note = Ancestral polymorphism is I, Derived polymorphism is M
  VARIANT 30: note = Ancestral polymorphism is L, Derived polymorphism is S
  VARIANT 6..133: note = Derived polymorphism lacks residues 6 to 133
  VARIANT 5: note = Ancestral polymorphism is S, Derived polymorphism is N
MLSCSWGISRASSANNVKDSHTNYGAVFKLMSNIAPIFMSPLESLASSLVQTANISNASLILVLTRGGTTTRLVAKYRPTILVITTMVPKLKTDDNFNWTCNNECPSRHNMIVSGLILILLAATAKASDTEST

SEQ ID NO: 2598 - protein, 323 aa, Zea mays
  VARIANT 177: note = Ancestral polymorphism is P, Derived polymorphism is S
MEGGSNSPDGQSSGGSPEERGSGGSGGRGTGEPARSRWTPKPEQILILESIFNSGMVNPPKDETVRIRKLLERFGAVGDANVFYWFQNRRSRSRRRQRQMQAAAAAAAAAAASSASNNSSPAASATVGLPSGALQYPLAMGGTAACQYEQQASSSSSSGSTGGSSLGLFALGAAGVPGTGGGGYFQASCGASSPLATGLMGDVDSSGGSDDLFAISRQMGFAAASTVASASVAPSSNAHHQQYYSCESPAATITVFINGVPMEVPRGPIDLRAMFGQDVMLVHSTGVILPVNDYGILTQTLQLGESYFLVIISHITCLLRSKS

SEQ ID NO: 2599 - protein, 477 aa, Zea mays
  VARIANT 111..477: note = Derived polymorphism lacks residues 111 to 477
MVPARARHIDRSASDQQQGPAPAGAATLLVRHLPEAITQEMLSRLFSHYGATSVRPCSGGKLRNCAFVDFRDEAAANHAHSLLNRLRFLGKVLTVERANCPNANESHLKHQDQLGHGASQVPSISSQTQKDHTSIAEPIAPKLSVDYPFPPHLEYAYPPPDGNILTNIVNALIAVPRFYNQVLHLMNKMNLPAPFRMALPTPPLPSQVPVIPHPQPPPGSTTTGELHSADLSSDESELESSDEDIDKRKIKRAKHEAIVGPAVDKNVAHEAVGVKSVALVSNELQVIKKKNPVLQIKITPKPIQKEPPVPSMTENEPDSTHEQLQEKHFVTPQEMSREKLPPEEILSLPMFKNYTPGNPASVLYIKNLAKDVTHDDFYYVFGKDVRELCFRKHGQCKVGFKCKVNAVLLFAATVLIVLFFFHFLILLQEGRMRGQAFVTFPTVELAQRALNLAHGYVFKGKPMIIQFGRNPAANKAS

SEQ ID NO: 2600 - protein, 351 aa, Zea mays
  VARIANT 256..351: note = Derived polymorphism lacks residues 256 to 351
MSEVSVINQAEVEDAGAGQLMDLPPGFRFHPTDEEIISHYLTHKALDHRFVSGVIGEVDLNRIEPWDLPGRAKMGEKEWYFFCHKDRKYPTGTRTNRATETGYWKATGKDKEIFRGRGVLVGMKKTLVFYRGRAPRGEKTGWVMHEFRLEGRLPQPLPRSAKDEWAVCKVFNKELQAARSEPLLAAAGAAELERVGSLGFLNELLDSAELPALVGADVDEVIDFKGPAPASVPDASYLPVKMEEHALLQMQQCQYQPPPPMFYPSQYFSLPAMNSGHLPPAIRRYCKAEQQVVSAQTASVISPSRETGLSTDPNAAGGYAEISSAATPSSSHQFLPELDDPALNLADLWKY

SEQ ID NO: 2601 - protein, 522 aa, Zea mays
  VARIANT 18: note = Ancestral polymorphism is S, Derived polymorphism is L
  VARIANT 198..522: note = Derived polymorphism lacks residues 198 to 522
  VARIANT 208..522: note = Derived polymorphism lacks residues 208 to 522
  VARIANT 393..522: note = Derived polymorphism lacks residues 393 to 522
  VARIANT 416..522: note = Derived polymorphism lacks residues 416 to 522
  VARIANT 438..522: note = Derived polymorphism lacks residues 438 to 522
MLGLTGDPALARLEMGRSVSYDDGPVPVRPAPASPPISRSRSDGGAVPASATKPPLGGRSPGSSEATPEGEEEEEADPRCLIRNLDDGSEFVVKEGSELRERSDSDSSNGATRHRRRRRHSSWLRGIRNIVGSVVASSRDRRSSDDKDTCSEKGGRRSSSATDDSQDSAGAVRHGPVRVKVRQYGKSYKEFSGLFMNQEIQAHDGSIWSIRFSPDGRYLASAGEDCVIHVWEVSEFDRKREENGACNPFVAMVCNGSPEPTLAVASSVDGSNRCPWKENQTPRIAAPASMEGESSRSVSVLSMEETLLSARLHLVHVHNLVIEQSLVSRSTEFEAAIQNGDKITDNADAQFLIDNGDDFFNNPQPAEASLAEESVSTNGQQIEQEVSGDVVPSDPSIDKSIQHALVVGDYKGAVNQCLASNRMVDALVIAHAGGSALWENTRNHYLKNNISPYLKVVSAMVGNDLMSFVSTWPLSSWKETHAHLWTYPLASQHGRRLGVAPDHVVSGNTAGTVGAASPADNR

SEQ ID NO: 2602 - protein, 474 aa, Zea mays
  VARIANT 50: note = Ancestral polymorphism is G, Derived polymorphism is S
  VARIANT 237: note = Ancestral polymorphism is E, Derived polymorphism is G
  VARIANT 297: note = Ancestral polymorphism is G, Derived polymorphism is S
MAPPPTSRCLALALILIGALCAAAAAARFAPADNHLLACGAAAPAVLPDGRRFVPDSGCASTRLRSSSPSLSSAAPPGSPPPPSSLLASARVFSCRASYDLDVRRRGHHILRLHFYPFVPALAAARFHVGAGGLLLLHNFTASSPVVKEFILPVDSDVLVLTFVPDSGSTAFVNAIELVSAPEELVGDIGTLVTSGGAAQIHELSSQVFETLYRINVAGRKVTPFNDTLWRTWVNDEKFLIDTDSSNYMVWSSSGRIAYPKGSKQMTREVAPDNVYNSARSVRPGVNVTWGFPVPASSRYLVRMHFCDIASKALYELYFNIYVNGDLAVKDFDLSSATGFLAYPYYIDFIVDVKDEGILKLAIGGLKKSRSDEVSGILNALEIMRMNKTSGGMDGDFPIDLHMEYVVSKGIGEFARSLLCGFIFVGLFVALVTLMVRLRTELRNNGTAWSWRQMNSDEGKLARTYQLVPSKTDY

SEQ ID NO: 2603 - protein, 215 aa, Zea mays
  VARIANT 144: note = Ancestral polymorphism is S, Derived polymorphism is W
  VARIANT 148: note = Ancestral polymorphism is L, Derived polymorphism is P
MEVGPTQQRLGDSFSRGWLAKRGARAPSLEHLVADADLGHSFGSSRSSFIDMDPAALFSMRWTATAAPPPESDFEFGLIIPGGVGGGSDPPSPALVSASRRVIRDGRLVPGDPLFCSARSAPASPSPSPCCGGRAAAAGRRSSWWKMPLQYLRFLLPLYRKVRALRRLPAPRRRPRVAPASPARASASSLDWCHGNADTAVRDAILYCKKCSVRP

SEQ ID NO: 2604 - protein, 363 aa, Zea mays
  VARIANT 209: note = Ancestral polymorphism is T, Derived polymorphism is K
  VARIANT 208: note = Ancestral polymorphism is V, Derived polymorphism is A
  VARIANT 155: note = Ancestral polymorphism is W, Derived polymorphism is L
  VARIANT 120: note = Ancestral polymorphism is G, Derived polymorphism is S
MFGFGHHGQNPPAHGGVHQPTFKIFCKSDEGYCLTVRDGNVVLAPANPRDEHQHWYKDMRFSTQVKDEEGNPAFALVNKATGLAIKHSLGQSHPVKLVPFNPEYQDESVLWTESGDVGKGFRCIRMVNNIRLNFDAFHGDKGHGGVHDGTTVVLWEWAKGDNQSWKILPWGDEAYAAGGSSAANAPRFGGGGEPTVRIYCKADEGFSATVRNGAVCLAPTNPRDEYQHWIKDMRHSNSVKDEEGYPAFALVNRVTGEAIKHSQGEGHPVKLVPYNPGYQDESVLWTESRDVGHGFRCVRMVNNIYLNFDAFHGDKDHGGVRDGTNIVLWKWCEGDNQRWKIVPWCKSRLSTHPGHFSRILFLE

SEQ ID NO: 2605 - protein, 373 aa, Zea mays
  VARIANT 89: note = Ancestral polymorphism is Y, Derived polymorphism is D
MVMANPDMLPPGFRFHPTDEELILHYLRNRAANAPCPVAIIADVDIYKFDPWDLPSRAAYGDKEWYFFSPRDRKYPNGIRPNRAAGSGYWKATGTDKPIHSSTTAGESVGVKKALVFYEGRPPKGTKTNWIMHEYRLAADAQAAHAYRPMKFRNASMRLDDWVLCRIYKKASCQVPAMAAVPQLSDHDQDEHCGFDDNPYAAMLLQGASYSYPAPPHAAAGAQRMPRIPSLTELFNDPSLAHFFEEGGGMQDMARLSNPQQQQQHAPLLGRAVTSQQLLLNNGHSMPGGGQAQMDPHPPAAAASTSSAAAGNNKRKRSSTTTDAGALSSSQASEAKKPNGSCFGATFQIGNGLQGSSLGHHHMPLHSNMGTMN

SEQ ID NO: 2606 - protein, 175 aa, Zea mays
  VARIANT 26: note = Ancestral polymorphism is E, Derived polymorphism is K
  VARIANT 31: note = Ancestral polymorphism is E, Derived polymorphism is G
  VARIANT 33: note = Ancestral polymorphism is R, Derived polymorphism is H
  VARIANT 40: note = Ancestral polymorphism is A, Derived polymorphism is V
  VARIANT 48: note = Ancestral polymorphism is R, Derived polymorphism is Q
  VARIANT 94: note = Ancestral polymorphism is T, Derived polymorphism is A
  VARIANT 110: note = Ancestral polymorphism is Y, Derived polymorphism is D
MSGAACSPAMVDEEELTVVEVTVVVEYESMESHASTLWQALFHWAMWRALLGHGKQPSRIFLLPRGRRLLLRRLLVLLGADCAEILSWSAASTAESCCIAGILYLLMEDYSIQIYNLFDDAEISETELERKRAKALEEYNQDMTRINKIARGARSMAEVIQVMSLKVDGRHSSDG

SEQ ID NO: 2607 - protein, 463 aa, Zea mays
  VARIANT 26: note = Ancestral polymorphism is T, Derived polymorphism is M
  VARIANT 27: note = Ancestral polymorphism is S, Derived polymorphism is L
  VARIANT 248..463: note = Derived polymorphism lacks residues 248 to 463
MAPGRSLRPAGTAAVLWAASLLLLATSCARAGGAYAGPGCRKHVARVTEYGAVGDGRTLNTAAFARAVADLARRAPDGGAALVVPPGKWLTGPFNLTSCFTLYLDEGAEILASQDMKHWPLIAPLPSYGRGRDEPGPRYSNFIGGSNLTDVIITGKNGTINGQGQVWWDKFHAKELKFTRGHLLELLYSDNIIISNVTFVDAPYWNLHPTYCTNVTISGVTILAPVNSPNTDGIDPDSSSRVKIEDCYIVSGDDCVAVKSGWDEYGIRFNMPSQHIVIRRLTCVSPTSAMIALGSEMSGGIRDVRAEDSVAINTESAVRVKSGAGRGGFVRDIFVRGLSLHTMKWVFWMTGNYGQHPDNTSDPNAMPEVTGINYSDVFAENVTMAGRMEGIPKDPYTGICISNVTARLAPDAKELQWNCTNVKGVTSHVSPKPCPELAAEGKPCAFPEEELVIGPPELPKCSY

SEQ ID NO: 2608 - protein, 166 aa, Zea mays
  VARIANT 21: note = Ancestral polymorphism is G, Derived polymorphism is D
  VARIANT 29: note = Ancestral polymorphism is G, Derived polymorphism is R
  VARIANT 46: note = Ancestral polymorphism is P, Derived polymorphism is L
  VARIANT 75: note = Ancestral polymorphism is P, Derived polymorphism is H
  VARIANT 83: note = Ancestral polymorphism is P, Derived polymorphism is H
  VARIANT 106..166: note = Derived polymorphism lacks residues 106 to 166
  VARIANT 117: note = Ancestral polymorphism is R, Derived polymorphism is C
MGRAINKIVMAVELIKRRIVDLHQNTTTGSTDITDMWEPLEEGLLPLETTRHVSMITITLSKKEMDTSSIGYQSPLPADEVKPLVKYDNDEDAHSPGGRGRGRGGRGRGRGRGRGGRGNGFNEYADAGWEDDHAPAYMGNGYARGRGRSFRGRGRRGGYNNQPEYQ

SEQ ID NO: 2609 - protein, 283 aa, Zea mays
  VARIANT 250: note = Ancestral polymorphism is M, Derived polymorphism is T
  VARIANT 246: note = Ancestral polymorphism is A, Derived polymorphism is V
  VARIANT 236: note = Ancestral polymorphism is K, Derived polymorphism is Q
  VARIANT 230: note = Ancestral polymorphism is S, Derived polymorphism is T
  VARIANT 147: note = Ancestral polymorphism is K, Derived polymorphism is N
  VARIANT 139..283: note = Derived polymorphism lacks residues 139 to 283
MAAAAVTLPSSGTPFAVATTASSSSARRCLLLPSAAPRRALRVVASAATEAPPKPTQPPTSPSGIVLVDPSEAQKVHRLKAVYDQKVVPLITEEFGYTNVHQVPKLEKIVVNCGLGAEAGNSKGLDAAMKDLAMITGQWPVKTKARKSVASFKIREGNTIGIAVTLRGRIMYNFLDRLINLGLPRTMDFLGVNPNSFDGHGNYSLGLRDQGVFPEIPYEVGGKKNGMDVSIVTSAKTDNEAFRLLVLLGMPFSENIKTDVVIRKKRLKRHHFLSKGKGKGGRR

SEQ ID NO: 2610 - protein, 173 aa, Zea mays
  VARIANT 162: note = Ancestral polymorphism is S, Derived polymorphism is C
  VARIANT 77: note = Ancestral polymorphism is G, Derived polymorphism is D
MVSIGVVIIDQQAPAVVLPLAALPQVVPGAGPPLVWQHLGAHGLRGRRRAAPLCHGDCGGLGGAVPATLAWVNLHHDNDQTTYGVSVVDDFNVGLSVTPHEGRDNCPVLACHKNLTETCPGELQLRSSTGSILACKSGCEAFRIDELCCRNMYNSPRTCRASKYSEFFKHECP

SEQ ID NO: 2611 - protein, 499 aa, Zea mays
  VARIANT 234: note = Ancestral polymorphism is N, Derived polymorphism is D
  VARIANT 25: note = Ancestral polymorphism is R, Derived polymorphism is Q
MAKHKASPPAAVRRRIGGAGASAIRWALRVATSIVAWTLLLHLFTFLGIPRPPLPIARPSCLGGRSNSTAADSVVAAGDAGHLALPALPPRRLYKSNGYLLVSCNGGLNQMRAAICDMVTVARYLNLTMVIPELDKQSFWADPSDFGDIFDVNHFIDSLRNEVKIVKELPQKFKEKVPLSMQPISWSSEKYYLRQILPLVRKHKVVRFSKTDSRLANNGLPLKLQKLRCHVNYNALRFAPSIEALGNKMISTLRRTGSFVVLHLRYEMDMLAFSGCTHGCSDEETEELTTMRYAYPWWKEKEIDSEKKRLEGLCPLTPEETTLVLRALGFPKDTRIYIASGEIYGGEKRLAILKTEFPNIVRKEILLSDDELRPFQKHSTQMAALDYLVSVASDIFIPSNDGNMAKVVEGHRRFTGFHRTIQLDRKKLVELIDLFEDQELSWEEFSVAVKELHGGRMSQPTVRRIVPGQPKEEDYFYANPHECLGPAKKRRDRLKHMEI

SEQ ID NO: 2612 - protein, 481 aa, Zea mays
  VARIANT 196: note = Ancestral polymorphism is D, Derived polymorphism is Y
  VARIANT 27: note = Ancestral polymorphism is R, Derived polymorphism is W
  VARIANT 20: note = Ancestral polymorphism is D, Derived polymorphism is N
MRRYSGAGARQQQQTEAVADRVHRYRRVLMVLLSPVLLISFVLLLMPRAPASASGGVLLAVGGRRWGPRAVEDGLNKYAVIFDAGSSGSRVHVYCFDENLDLVPIGKEIELFKQKKPGLSAAKGPQEAAESLISLLEEAEKVVPAELREQTPVRVGATAGLRALGTQRSEEILQAVRELLHDSSFKSQPNWVTVLDGSQEGAFQWVTINYLLGKLGKPYSNTVGVVDLGGGSVQMAYAISEKDAAKAPLVADGEDSYVKELLLKGTTYYLYVHSYLHYGLLAARGEILKAGEGSDYSDWKYNYGGNTFEASGSPSGASYSKCRALAVRALKVDEPACTHMKCTFGGVWNGGGGDGQKNLFVASFFFDRAAEASLILRLTFLAGFVDPKAAVAKVKPSDFEETARRVCKLNLKDAHATYPDVSEENIPYLCIDLVYQYTLLVDGFGVDPYQDITLVKKVPYGDSYVEAAWPLGSAIEIASSS

SEQ ID NO: 2613 - protein, 460 aa, Zea mays
  VARIANT 220..460: note = Derived polymorphism lacks residues 220 to 460
MGAITNPPSPNIEAKSTASKRPTRIARVSSLPPPATQERARLLPGGGEAATIQRSRGAMAAPEAPACYVGIARQSAAFRLMKQMGWEEGEGLGKDKQGIKGHVRVKNKQDTLGVGVDSPHNKWVYDTTQFDNILKKLKVQSANPVQEEVAAVESDSPDITPKKDKSAKHEVTKVTRPQGRYKKRERGKSVNSYSATDLQGILHRYAKMKIIPKWIRNLNRHAWMNLIPSSVWMQGRFTGSHHYDPHVFVRLKGVSQADDVNWWGHKFGFLSGGFLGAKSRKNKSSQKDLANVRQTFAEEDQENLYNLVQDKATSGKQGLGIKGLPMKVAGQRWKGNKTSFVDSDDDNSAQSDEYSEIEENGDEEEHISASESIDTDKNADKELLVDARPKTKVKKLCKRILRQAPSQSMKLKDLKVAVEEHSNVVFSSFSGRREALLFLKKKLQGSRKFNVDGKKVQLVS

SEQ ID NO: 2614 - protein, 669 aa, Zea mays
  VARIANT 243: note = Ancestral polymorphism is C, Derived polymorphism is S
  VARIANT 498..669: note = Derived polymorphism lacks residues 498 to 669
MDAYEATKVVFSRIQALDPDHAAKIMGLLLIQDHGEKEMIRLAFGPESLLHAVMAKARKDLGLLLPASPTSVAAAGHAPFLQLPRQNSGRAGAPSPLSVSSPSSWSHAPVFSRSNSTSNGTAEEAAGAGEELPSPVNGGAAPFFPRQAGDALLDDLQLQEQLAFLNEGGGNPAHQLLGFDGGECRSPGPGDADGMFAFGLGWHNGGPAHRRSSSVNELCLGGGGGGGDGFGWKPCLYYARGFCKNGGSCRFVHGGLSDDAAALAGAKMEAAADQQQQCQDFLIRSKGQRLGPAAFPYSPTGSLPGSPSAASKCLSFLLQQQQQQHDRAAAAASLMLGGGDEAHKFMARPRLDRADFASMMNPGSRQIYLTFPADSTFREEDVSNYFSIYGPVHDVRIPYQQKRMFGFVTFVYPETVKLILAKGNPHFICDARVLVKPYKEKGKVPDKKQQQGDFSGCTTPTGGLDARDPFDLHQLGARMLQHSNSANELLLRRKLEEQQQAAELQHAIELQSRRLMGLQLLDLKARAAATASALPTPIANAFASSHPLSTMAVESPLESGEQLKLSSGFALDGKLNGGDKEESACEASPDAADSDQSGEHNLPDSPFASPTKSAALVHDSFAATEPENTASCVGSKIDGGSNHLRPPALEIPSPSSYFFPMRSPYLFSG

SEQ ID NO: 2615 - protein, 354 aa, Zea mays
  VARIANT 139: note = Ancestral polymorphism is A, Derived polymorphism is V
  VARIANT 225: note = Ancestral polymorphism is A, Derived polymorphism is T
  VARIANT 279: note = Ancestral polymorphism is V, Derived polymorphism is A
  VARIANT 281: note = Ancestral polymorphism is I, Derived polymorphism is M
  VARIANT 304: note = Ancestral polymorphism is S, Derived polymorphism is L
MAAPATPRQSLILPRASSHSHSQPSAGGLTSYRVTASHRRRGDFVFVVNPLGANGRTGKQWKQLLPLLRTRLADQCNICECITSGPSHAIDVTREAIKDGVDAVIAVGGDGTLHEVVNGFFWEGSPVCALDRGPDHSTALGLIPLGTGSDFARTFGWTNDPHDAIDRIVRGVKSKLDVGVMEGPNREPHFFVNVADIHLSAKAGYFASMYKSFGNLCYVFGALRAFWGHNNQDMRIKVNGGEWRTVHNVTALCIGNAKYFGGGMKITPTADPFSGNLEVVILQDFKWYDFILKLHRLYGGTHLSVNGVSSMRVQSIEVAEVAASGGVFVQSDGEHFGFLPTKFSVLPRAVDFFC

SEQ ID NO: 2616 - protein, 519 aa, Zea mays
  VARIANT 82..519: note = Derived polymorphism lacks residues 82 to 519
  VARIANT 44: note = Ancestral polymorphism is R, Derived polymorphism is C
MAKPRKTRTSAPDPPVAAVRLPWHTPAPAVPTAVLISLAALLIRVLVSVGPYSGQGAAPKFGDYEAQRHWMELTLHLTPADWYRNTSDNDLAYWGLDYPPLSAYQSLLHGRIINTSLPEAVALRSSRGYESMESKLLMRWTVLSSDLLVFFPSALWFVWAYMKLGVGISGEERREGWMWLLALVLISPCLVLIDHGHFQYNCISLGLTLGAIAGVLSKNELVGASLFTLAINHKQMSLYFAPAFFSHLLGKCLKQKYPIVEVTKLAFVVLGTFALVWWPFLHSYEAVQQVLSRLAPFERGIYEDYVANFWCSTSVIIKWKKLFAIKPLKLMSLSATILAFLPSFVQQVKSPSNLGFLYSLMNNSFSFYLFSYQVHEKSILLPLLPASLLALEEPRMYGWFVYFALFSMYPLICRDQLLLQYIAVLSLFFLIYYSPGGSYGKRSNISCKAKLVLSLPFLCSLLLHITYLQIEPPKRYPFLFDALIMFVCFSQFVILAVYTNYKQWMLDSNSRSIGVKKDL

SEQ ID NO: 2617 - protein, 398 aa, Zea mays
  VARIANT 35: note = Ancestral polymorphism is E, Derived polymorphism is D
  VARIANT 116: note = Ancestral polymorphism is R, Derived polymorphism is C
  VARIANT 268: note = Ancestral polymorphism is A, Derived polymorphism is P
  VARIANT 307: note = Ancestral polymorphism is P, Derived polymorphism is S
  VARIANT 379..398: note = Derived polymorphism lacks residues 379 to 398
MVAEYRQPLVKIEGASLSIAQVAVVATGAGEARVELDESARSRVKASIDWVMNSMMNGTDSYGVTTGFGATSHRRTKEGGALQRKLIKFLNAGAFCTSTDDHVLPTEATRAAMLVCINTLLQGYSGIRFEILEVIVKLLNANVTPCLPLRGTVTASGDLVPLSYIVGLVTGCENSVALAPDGNKVNAAEAFKIAGIQGGFFELQPKEGLAMRSPSSNPDSDGYFPNHITYLLAEVLSTVFCEVMNGKPEYTGHLTHKLKHHPRQIEAAAIMEHILEDSSFMKLAKKLGELGPLMKPKQDRYALRTSSQWLGPQIEGTLIGVSMDNTRLAIAAFSKLMFVQFSELVNDYYNNGLPSNLSGGRNPSLDYSFKGTEIAMASYYSELQFLGNPVTNHVLKYV

SEQ ID NO: 2618 - protein, 187 aa, Zea mays
  VARIANT 105: note = Ancestral polymorphism is R, Derived polymorphism is S
  VARIANT 59..187: note = Derived polymorphism lacks residues 59 to 187
MGSPLGGWPSYNPHNFSQLVPADPSAQPSNVTPATYVATHRTDPPPNQGRVICEQLDNSKHLNGYFSHRLLVSDNHGGQEHPAEALVPEIRGEAEAKESCGGQPRSGEQQQEAAQGTCGRRRGPVERKKLKTHSWWPSSPASHLSVSCSLHLSLTAELVAGGGCPPLPCASSSPLTSRMYVWYDQES

SEQ ID NO: 2619 - protein, 355 aa, Zea mays
  VARIANT 171: note = Ancestral polymorphism is L, Derived polymorphism is H
  VARIANT 125..355: note = Derived polymorphism lacks residues 125 to 355
  VARIANT 90..355: note = Derived polymorphism lacks residues 90 to 355
  VARIANT 50: note = Ancestral polymorphism is P, Derived polymorphism is L
MHRDLKPENFLFANKKELAVLKAIDFGMSVFFILGERFSKIFGSPYYMAPEVLKRNYGPEVDVWSAGVILYILLCGVPPFWAETEQGVAQAIIRSVIDFKRDPWARVSDNAKDLVRGMLNPDQKRRLIAHQVLGHPWLQNIKKAPNVNLGETVKARLQQFSVMNKFKKHALRVIAEHLWVEEAADIKDMFEKMDLNKDQMLSFEELKLGLHKFGQQMPDADVQTLMEAADADGNGSLNYGEFVTLFVHLRKIGNDEHLHKAFAYFDRNQSDYIEIDELRESLADDLGQNREEIINAIIRDVDTDKDGKLSYDEFATMMKAGTDGRKASRQYSRERFTSLSLKLQKDGSLQMTITR

SEQ ID NO: 2620 - protein, 636 aa, Zea mays
  VARIANT 427: note = Ancestral polymorphism is S, Derived polymorphism is G
  VARIANT 414..636: note = Derived polymorphism lacks residues 414 to 636
  VARIANT 408: note = Ancestral polymorphism is P, Derived polymorphism is S
  VARIANT 381: note = Ancestral polymorphism is K, Derived polymorphism is N
MKATAPPAKRRRGPRLAVLALVFCSLLVPIAFLFNRFPAVYVTDERPQQEIDLPSFDRVVFENGGSVNEVRRDSACDVSKKTSRSTSVSHRGIDSDPSIVSTKPKAIVLRPPKIEQVLPPPKVEPNPEVKPVLVPVPVHQNKKINLDKIRPPRVQSADEVEKAKACQLEFGSYCLWSIEHKEVMIDTIVKRLKDQLFVARSYYPSIAKLKGKETLTRELKQNIQEHERVLSESIVDADLPSFIKTKLERMDQSIARAKSCTVDCNNVDRKLRQILHMTEDEAHFHMKQSAYLYNLGVHTMPKSHHCLNMRLTVEYFKSMPLDPNDSSAHKFNLPDNRHYVILSKNVLAASVVINSTVSSSEDTENVVFHVLTDSQNFYAMKHWFARNSYRESAVNVINYEQIIFENFPEFGTQQLYLPEEFRVLISSLERPTEKSRMEYLSVFSHSHFFLAEIFKDLKKVIVLDDDVVVQRDISFLWNLDMGEKVNGAISFCGLKLGQLRNLLGRTMYDQQSCAWMSGVNVIDLDKWREHNVTENYLQLLRKFGNNDDEASLRASALPISLLSFQHLLYPLDERLILSGLGYDYGIKEELVQNSASLHYNGNMKPWLELGIPDYRKYWKRFLTRDERFMDECNVSP

SEQ ID NO: 2621 - protein, 565 aa, Zea mays
  VARIANT 359: note = Ancestral polymorphism is T, Derived polymorphism is I
MATRPAAEEKPWELAAHPRLPKGRTVAVVVLDGWGEAAPDPFNCIHVADTPTLDALKKAAPERWRLIKAHGTAVGLPTDDDMGNSEVGHNALGAGQIYAQGAKLVDLALGSGKIYEGEGFKYIQQSFQDGTLHLIGLLSDGGVHSRFDQLQLLLQGASERGAKRIRVHVLTDGRDVADGSSVRFVEMLEEDLARLREKGVDARIASGGGRMYVTMDRYENDWQVVKRGWDAHVLGEAPHRFRSALEALRKLREEDPKKASDQYLPPFVVVDGSGEPVGPVRDGDAVVTFNFRADRMVMLAKALEYEGFDRFDRVRFPRTRYAGMLQYDGELKLPRHYLVAPPEIQRTSGEYLARNGVRTYACSETVKFGHVTFFWNGNRSGYFDQNLEKYEEIPSDAGIPFNVQPKMKALEIAQKARDAILSQKFDQVRVNIANGDMVGHTGDMEATIVGCKAADEAVKIILDAVEQVGGVFVVTADHGNAEDMAKRDKSGEPLRDKDGKVQTLTSHTLNPVPIAIGGPGLAPGVRFRTDLASAGLANVAATVMNLHGFQAPDHYEPTLIQVVDE

SEQ ID NO: 2622 - protein, 211 aa, Zea mays
  VARIANT 35: note = Ancestral polymorphism is T, Derived polymorphism is I
  VARIANT 163: note = Ancestral polymorphism is D, Derived polymorphism is G
  VARIANT 200: note = Ancestral polymorphism is P, Derived polymorphism is L
MVTPATFSLRPSAPPAPPRAGLPRARACFAPAIRTSPSVAFSYQPRRFSGIRRAVAVDSEQGSPESPEQEKKPKTYYFLVANAKFMLDEEEHFQEQLAEKLRNYAERDKEQDFWLVVEPKFLDRFPNITKRLKRPAVALVSTDGNWITFMKLRLDRVLQDQFDAESVEEALASNPVELKFEKPEKWTAPYPKYGFGWWEPFLPPKFSNGTA

SEQ ID NO: 2623 - protein, 188 aa, Zea mays
  VARIANT 49: note = Ancestral polymorphism is T, Derived polymorphism is S
MENAAPAIAKPSLSKKPSPSFRLRNGSLNALRLRRVFDLFDRNGDGEITLDEMASALDALGLGADRSGLEAAVGGYIPAGAAGLRFDDFESLHRALGDALFGPMPVAVTEDDDDEGDMKEAFRVFDEDGDGFISAAELQAVLKKLGLPEARNLATVQEMICNVDRNCDGRVDFGEFKNMMQGITVWGA

SEQ ID NO: 2624 - protein, 225 aa, Zea mays
  VARIANT 40: note = Ancestral polymorphism is E, Derived polymorphism is D
MLQASSERPAGLLWVPGTSPWPTMDAGPSARAQEIARRREEMLGMLRDLPESEYELSLTDLVEKAGAEAEAEAEAAPATAPTKAEDGKDPGAARSAAAAGRHERRASARQRGSGGSSFRSSSDGVLLNFYMPRSLTRSFTAPRPARTPSFASGCRSPSVASDCNKRERDPDAETVKCWSLLWDRRWRKSSRRDPRAPPSEGESAIRAASAAILKAAKHSPPPPNT

SEQ ID NO: 2625 - protein, 643 aa, Zea mays
  VARIANT 553: note = Ancestral polymorphism is V, Derived polymorphism is A
MAHSPAPSGGGGGGPLPLLVSLNCLDDLSLEQEGLAGVAAVEHVPLSAVACGRIEAASAVLLPSLAFLPRAAQRRLRPWQLLLCLGSADRAADAAAAADLGLRLVHVDANRAEEVADTVMALILGLLRRTHLLSCHASSVPAAGWLGSVQPMCRGMRRCRGLVLGIIGRSAAARCLATRSLAFRMSVLYFDPRYVASGKTKRPSIVFPSAARRMDTLNDLLAASDLISLHCGLTNETMHILNADCLQHIKPGAFIVNTGSCQLIDDCALKQLLIDGTIAGCALDGAEGPQWMEAWVREMPNVLILPRSADYSEEVWMEIREKAITMLQSFFFDGVLPSSAISDEDEEISEAKNEDDYLGPQAKDSQSQIFDTEIDESHITLESEKKRAISHHKEPQASGKSVNIGSRSEGRRSRSGKKGKKRPAHRRPQQKPDDLSAVESDSNYSSRRDDDTAMSSRDQVVSSSSRFASPEDPKYKHKSLSESPMEITSEKKVPVLLSRKYPDKLKDGFIVALRARDNSGYHVARQRVVGGGGWILDVVSNATNRDPAAQFLVTFKNKDTMGLRSFVAGGKLLQINRKMEFVFASHSFDVWESWMLDGSLLEGSKLINCRNPSAVLDICIEILAAPSEEDGVTRWLDSPRWGL

SEQ ID NO: 2626 - protein, 94 aa, Zea mays
  VARIANT 6: note = Ancestral polymorphism is A, Derived polymorphism is G
  VARIANT 45: note = Ancestral polymorphism is R, Derived polymorphism is K
MKVGGANMIWNVRRRGMGLWTLLEGFLLLANALAILNEDRFLAPRGWSMSEVSGNGQTKSLKGQIVGLIYATQFLRMPLIALNVLIIVVKLVSG

SEQ ID NO: 2627 - protein, 576 aa, Zea mays
  VARIANT 279..576: note = Derived polymorphism lacks residues 279 to 576
  VARIANT 193..576: note = Ancestral polymorphism lacks residues 193 to 576
MEVAMAVKVLLSLCCVGACGLAVYLYHILWLVPQKVLAKFEDQKIGGPRPSFPYGNLADMREAAAAAKAARASARSSGSGGGGGGGIVHDYRPAVLPYYEKWRKEYGPIFTYSMGNVVFLHVSRPDVVRDINLCVSLDLGKSSYLKATHEPLFGGGILKSNGEAWLHQRKIIAPEFFLDKVKVRGHEPNSNHQHKIVYHWILLVVHIGLIQILCSAVGMVDLMVDSAQPLLMSWEERVDRNGGITDIKIDDDIRAYSADVISRTCFGSSYIKGKEIFMKIRELQQAVSKPNVLAEMTGLRPVNCKIKAINACRFFPSMRNKQAWELHKQVRKLILEIVKESGEDRNLLSAILHSASTSRVGIAEAENFIVDNCKSIYFAGHESTAVTAAWCLMLLGLHPEWQNRVREEVHEVCRGQPVDSRSLQKMKNLTMVIQETLRLYPAGAFVSRQALQELKLGGVHIPKGVNIYIPVSTMHLDPELWGPDVKEFNPERFSDVRPQLHSYLPFGAGARTCLGQGFAMAELKILISLIVSKFVLKLSPHYQHSPTLKLIVEPELGVDLTLTKVQSVCTKRGTAI

SEQ ID NO: 2628 - protein, 330 aa, Zea mays
  VARIANT 193: note = Ancestral polymorphism is R, Derived polymorphism is C
  VARIANT 142: note = Ancestral polymorphism is A, Derived polymorphism is V
  VARIANT 132: note = Ancestral polymorphism is R, Derived polymorphism is W
  VARIANT 107: note = Ancestral polymorphism is S, Derived polymorphism is N
  VARIANT 44: note = Ancestral polymorphism is P, Derived polymorphism is L
  VARIANT 10: note = Ancestral polymorphism is P, Derived polymorphism is T
MATTVTPASPFRDYLHRRRVRLHAKPHPHSQRRLSRTARLRYAPDGGGAEVSGPPASAAVEEQTPQERPEDFMLLAANRSEFNEIIMVIDSPVARYLVLDHNKNIHSILPKTTVWTNSYWDEFVSLPAIVPRGPVALLGLGAGTSAHLMLKFWPWLQLIGWEIDPMIIELSRDYFGMSDLEKATESGGSLLVRIGDALSPSATVEGGFAGIVVDLFCDGKVIPQLQEAKTWLQIAKRLMPDGRIMVNCGGSDTEESLSSPWVQNPTVKALCSAFPGQVSWKRLSEKESVNYVALTGPLPDLDGWSASVPSELSTNRAGPKPMLERRRPGA

SEQ ID NO: 2629 - protein, 276 aa, Zea mays
  VARIANT 19: note = Ancestral polymorphism is D, Derived polymorphism is E
MKIIPVPCLDDNYAYLIVDESTKKAAAVDPVEPEKVLKAAGEVGAYVDCVLTTHHHWDHAGGNEKMRLQVPGIKVFGGSLDNVKGCTDQVENGMKLSLGKDIEILCLHTPCHTKGHISYYVTSKEGEDPAVFTGDTLFIAGCGKFFEGSAEQMYQSLIVTLGSLPKSTRVYCGHERHTVLFMALPHLLLVELQYTVKNLKFMLTLEPENEKTKQKLEWAEKQREANQPTVPSTIGDEFEINTFMRVDLPEIQAKFSVNSPVEAMREVRKTKDNWRG

SEQ ID NO: 2630 - protein, 256 aa, Zea mays
  VARIANT 150: note = Ancestral polymorphism is P, Derived polymorphism is L
  VARIANT 79..256: note = Derived polymorphism lacks residues 79 to 256
MLTVRIAPWRRLALLALLPHLFLSAAAVVARQCLWPGQASDDAGCLSWRVMVEANNARGWRTVPPQCVGYVSGYMTRGQYQRDVAGVAEQARAYADGVAADADGLDAWVFDIDDTCLSNLLYYEAKQFGAYDPLAFRAWASREACPGIHPVLGLFTTLLDKGFKVFLLSGRDEETLGSCTAANLEAQGFSGYERLIMRTPEYRGQSSSIFKSAVRKQLVDEGYRIRGNVGDQWSDLQGDCAGDRVFKIPNPMYFVP

SEQ ID NO: 2631 - protein, 720 aa, Zea mays
  VARIANT 145..720: note = Derived polymorphism lacks residues 145 to 720
MVSLSQQQHSAHRVRLRRGSGARIRLRSPFSPRVEFTCHRQSFVLYFLALTITETEVVEIKQLDTNQDLVVSKQSCKVENPGILLISSFSVVATGHCLTRAALLYGRLYYAPMDIASEKQALFAFASAVYHGNKLNWSQNIPVCSWHGVTCSLDRSCILALRVPGAGLIGTIPADTLGRLVSLQVLSMRSNRLSGSLPYDVVSLPYLQAIFVQHNELSGDLPPFLSPNLNTLDLSYNSFTGQIPSGLQNLTKLSVLNLAENSLSGPIPDLKLPSLRQLNLSNNELNGSIPPFFQIFSNSSFLGNSGLCGPPLTECSFLSSPTPSQVPSPPKLPNHEKKAGNGLVIVAVAGSFVIFLLAAVMFTMCISKRKEKKDEAGYNGKVTDGGRVEKRKEDLSSGVQMAHKNKLVFLEGCSYNFDLEDLLRASAEVLGKGSYGTAYKAILEDGSTVVVKRLKDVVAGKKEFEQQMELIGRVGKHANIAPIRAYYYSKDEKLVVYEYIGRGSFSALLHGIKGVCEKTPLDWNTRMKIILGTARGLEHIHSEGGSRLAHGNIKSTNVLLDGDHNPYVSDYGLSSLTSLPITTSRAVAGYRAQETFESRKFTHKSDVYGFGVLLMETLTGKAPLQSQGQDDAVDLPRWVHSVVREEWTAEVFDVQLMKYPNIEDELVQMLRIAMACTAWSPDRRPTMAQVVRMVEELRHSASGSRALSVGSPKESSPLSA

SEQ ID NO: 2632 - protein, 178 aa, Zea mays
  VARIANT 32: note = Ancestral polymorphism is I, Derived polymorphism is T
  VARIANT 34: note = Ancestral polymorphism is E, Derived polymorphism is K
MAPHGTSVCRREHLADLELSEGGIQHELLPRIEKPQILTIPGIGVAQVRSYGARVMVECRLRVGRRWRMGLRTNLGMCDTGGDSGRGGEGHKAMVGMGSSGRRQTQEWWRAEQGKKAIGKRARASGTTPSLPTSFFSLSMLDLASGHVVVIFARNGREGGRRGMGAQSSRGDEGWPAR

SEQ ID NO: 2633 - protein, 247 aa, Zea mays
  VARIANT 192: note = Ancestral polymorphism is L, Derived polymorphism is R
  VARIANT 153: note = Ancestral polymorphism is Y, Derived polymorphism is H
  VARIANT 22: note = Ancestral polymorphism is R, Derived polymorphism is M
MKATTWRGAPGTLPAASAKEKRRKQKTPAPRGLMCGCGSTRSVSVDISAAVTTAARTRRRVSTAGEPASAAKTTTTTGCGRGADEASAEGTPSVDSLLRQLRELERGVRALGLGVREREEGGGAASGTATTAETAARPRRHARSASVVERLDYGSVAVVTESADPLRDFRRSMAQMIVENGITGGAELRELLRRFLALNAACHHHLILRAFGDVWEEIFAAAAAGRDGGRASKRPRGRAGAGADTLS

SEQ ID NO: 2634 - protein, 233 aa, Zea mays
  VARIANT 163: note = Ancestral polymorphism is P, Derived polymorphism is R
MSKKIVVKLDLHDNKDKQKALKAISVLVGIDAVSVDMAAHKMTVIGTVDPVQVVSKLRSKSWAAHIDSVGPAKEPEKKEEKKDGGGEKKDGGGGEGKKEEGDGKKDGGGGGDGKKDGEGKKEDGDGKKQDGEGKKEDGDGKKDDKKDGGGGGAEEKKPAAAVPPILPFPPLHQLPPQYMHMITNDYMSQYHHRPPPPPPVAYHPYAAPPPPPPQYYYVRNMSMEENPNSCAIC

SEQ ID NO: 2635 - protein, 445 aa, Zea mays
  VARIANT 246..445: note = Derived polymorphism lacks residues 246 to 445
  VARIANT 201..445: note = Derived polymorphism lacks residues 201 to 445
MAEPAAAGRKTRVGPYEVGKTIGEGSFAKVKHAHDSRTGAVRAIKVLDRSHVLRHKMVEQIKREISTLKLIKHPNVVQLHEVMASRTKIYMVLEFVDGGELFDKIVNSGRLGEDEARIYFHQLINAVDYCHSRGVYHRDLKPENLLLDSHGTLKVSDFGLSAFAPQTKEDGLLHTACGTPNYVAPEVLADKGYDGMAADVWSCGIILFVLMAGYLPFDDANLMRLYKLICHATFSCPPWFSSGARKFIKRILDPNPDTRIKIAEILEDEWFKKGYKPPHFEQGEDVNLDDVDAAFNDSEDRLVAEKREKPESMNAFALISRSQGFNLGNLFEKEMMGMVKRETSFTSQCTAQEIMSKIEDACGPLGFNVRKQNYKMKLKGDKSGRKGHLSVATEVFEVAPSLHMVELRKTGGDTLEFHNFYKNFSSELKDIVWKAESDASMKQTK

SEQ ID NO: 2636 - protein, 1690 aa, Zea mays
  VARIANT 8..1690: note = Derived polymorphism lacks residues 8 to 1690
MADGQHIQAASEEVDSIHFSFYSDDEIKRISIKKITKSERLDAKNLPVPGGLLDPAMGPINDIDICKSCGQHSVRCPGHFGHIELAKPLFNPLLFMSLKNLLHVTCFHCHKFRLNKEQVDRYVNELELLVKGDIVCAKNLEDSVEEAYLSKEDENMNKTTSGDNSSSVKDKKTWTSIQLKEVLSIFSKIMKKRQKKCAKCDMKSPTISSPIFGWLVKDTKASAVRTNAIADFKLKGDGDIHNSGETGVSGLEEESSSPGMVSKDSINEVRGLSDDTIKELVASSGKKHLLPTEVESILKDLWKNEARFCMLLCDFQKNMSSEPEKRRGYEMFFLSSLLVAPNRFRPSTSSSLGIMEHPQSVLLSKVQESNLALQHNNASSNHMDVLQRWMDLQRSVNVLYDSSKGLARSEKNAHGIRQLLEKKEGILRQKMMGKRVNYACRSVISPDPYLAVNEIGIPPVFATRLTYPEKVTPWNTKRLQEAIRNGADIHPGATHYRDNNSMYKLQAVPAKRRSIAKMLPASRGSICQPGRDPNCEFESKVVYRHLQDGDIVLVNRQPTLHKPSMMAHFVRVLPGEKTLRMHYANCSTYNADFDGDEMNVHVPQDEISRAEAMNIVDANKQYIGPRSGDAVRGLIQDHIVGAVLLTKPDTLLSREEYSQLVFGSCVPSSNCGSHHPAKVSAIEDYDTLELVHPAIWKPRPLWTGKQVITTILNHLTKGCPPFTVEQKGKIPKEYLKEDPSAQKEKEDPSARKEAHSAKKGKREDPSAQKEKDSSVNKEKQEKIQKQKQKDRSELVLYIHNNELIKGIIDKAQFGKYGIVHTVHELYGAYTAGILLSTFSRLFTLFLQLHGFTCGVDDLLLLPEKDKLRSKILSGSEVRSNEVHWKFTGADEDHKGDLVKLHMEVEKAVRSNGESDTATLDNDMKNALNGITTDVNKILFPDGLQKPFPGNCLSLMTTTGAKGGPVNMNQISSLLGQQELEGKRVPRMVSGKTLPCFPPWDISSRAGGFISDRFLTGLRPQEYYFHCMAGREGLVDTAVKTSRSGYLQRCLIKCLESLKVSYDHTVRDADGSIVQFCYGEDGVDVLKTSFLNEFKELADNRKAVLAKLGGCSKDPTLSKCNGYITELPPKLIDKAEEFLKHSKECCRYNIEAKELKELLKVKFLSSLVDPGEAVGVVAAQSIGEPSTQMTLNTFHLAGRGDMNVTLGIPRLKEILMTASDNIRTPVMKCPLLEHISEDDAKMVVAKLRRVRVADVVEKIEVCTVPFYNSNGRVSTLYKLQMKLYPQDQLESGLTIDECQATLRTVFVEAMEHAIEKHLDLLYKINEIRAVKIEDTEGSLLNGDEESQSRHADGGDTGTSDDDDQNDNDVDLGTDAEKMKRQEKDEMEYDDDTETEEGMGSESEESDEDPAESGDDSQEADKEHTISKSETTSVDDLPYSVKKGKKSKDDRGTAKLEEKNQNEGRLDDQKQGQIKKRRKKLKHTIHVESSDLDFEIHYAFHDEPHILLAQIAKKIARTILVKACNNIDHCKIVKPMHNHTRLETAGVNFEVVWNLSEYISVNDITSNDIHAMLKTYGVEAARGTIIKEVSGVFEPYGINVDMRHLSLIADFMTLDGGYRPMNRLGIGQFSTSPFGKMTFETATKFIVDAATHGEADFLECPSASVCLGKPPKVGTGIFGLLQNLELEQPKNI

SEQ ID NO: 2637 - protein, 150 aa, Zea mays
  VARIANT 22: note = Ancestral polymorphism is P, Derived polymorphism is T
  VARIANT 12: note = Ancestral polymorphism is G, Derived polymorphism is D
MAATAYSVALLGGARLPAAFLPRRSSVCHHQLRLQDAPRLISLHRARAASEDTSASGGDELIEDLKAKWDAVEDKPTVLLYGGGAVVALWLTSVVVGAINAVPLLPKILELVGLGYTGWFVYRYLLFKQSRKELVDDIETLKKKIAGTAE

SEQ ID NO: 2638 - protein, 559 aa, Zea mays
  VARIANT 154: note = Ancestral polymorphism is S, Derived polymorphism is L
  VARIANT 155: note = Ancestral polymorphism is A, Derived polymorphism is E
  VARIANT 170: note = Ancestral polymorphism is R, Derived polymorphism is C
  VARIANT 173: note = Ancestral polymorphism is P, Derived polymorphism is L
  VARIANT 184: note = Ancestral polymorphism is A, Derived polymorphism is S
  VARIANT 186..559: note = Derived polymorphism lacks residues 186 to 559
MASLCVHHTSLPLSPPHQVTVPEPSRALPPSSRLPALPSSSNHVSALPRPAAAASSAFACHCKAPVRDHDAELLRALRSNGNGTLHGDTAPPQVLDSRSDGPGGGDGSKRSRFCARDCAKRIMELPVEERVKVLDLLPRDDAALTVSDYNDILSALARAGDHATAVALFRAMPVAPDAHSFATAVQCLCRQGAPDEAKLALDEMVARGFRPSVATFSAVVGCLCKRGRVTKAMEVLDAMCGLGCEPTIRTYNSLVGGLCYVGRLEEALELLKKLKDSPLTPDIYTFTIVLDGFCKVGRTEEATAIFHDAIGMGLSPTTFTYNALLNGHCKEGNPLKAFALLMEMCGNNDAACLPDKTSFGIVLTALLRAGETSAAWQTYKRMERAGFEVDGRALDTLARGLCRRCATDASALGDAEEVFAKVVASGHEPVSYTYCLMAQALARGGEVDAAVALLEDMVRKGYALRKRAYTDVVRALCDRGRARDALQVLVLVMIVRDFVPGRNAFEALLGELSRQGRWADAMAVYAAAVKRGVVVSWKHLGREAHSPEEPIRLGVPVPQ

SEQ ID NO: 2639 - protein, 553 aa, Zea mays
  VARIANT 448..553: note = Derived polymorphism lacks residues 448 to 553
  VARIANT 386: note = Ancestral polymorphism is G, Derived polymorphism is R
  VARIANT 117: note = Ancestral polymorphism is T, Derived polymorphism is I
MDRLTVMAPPLLVLLLLLLSRCSAAASRRGGGWWEEGEGEWRPSEEEEKGKGKGRGLFLLHRVEKVVESEGGQVRVVRGQPWPPASFACREGLMHIGFITMEPKTLFVPQYLDSSITLFVQRGEAKVGYIHKDELVERKLKMGDVLHIDAGSTFYMVNPGKGQRLQIICSVDASDSLGFGPPYQAFFLGGAGDPASVIAGFGPKTLTRAFNATYDELARILLPRTGGPIVYYTADAEPESGAAEEERGQVDGHDGVLDRGARREGAGAWVPGGRGDGGDECGGSDDAREATWWWTKLVNRVVGGAAGGGGAAEANRKGKKKKGGAPEPYNLYDSEPGFRNAYGWTVSVDKHQYEPLKHPDIGVYLVNLTAVRALPESYRPARFLVGLLSPFRVMAEEGLLLGSMLAPHVNPRATEYGVVLGGEGTVQVVFPNGSLAMSEVVRPGDVFWIPRYFPFCQVAARAGPFEFFGFTTSARRNRPQFLVGASSVLRTMLGPEIAAAFGAREKEFSKLVRAQREALIMPSSPGKEEEEHGKKGREKEESLPMVVEQAAAE

SEQ ID NO: 2640 - protein, 239 aa, Zea mays
  VARIANT 12: note = Ancestral polymorphism is R, Derived polymorphism is L
MSRAATRFFLTRCLLPLPLLSPRWRQRRRGSICATRAFAMAASGFGGGEAFRLSAAPGAGLLKLHKGDITLWSVDCATDAIVNAANERMLGGGGVDGAIHQAAGPELVQACRKVPEVKPGVRCPTGEARITPAFELPASRVIHTVGPIYDLDKHPEVSLKKAYENSLKLAKDNGIQYIAFPAISCGVYRYPPKEASKIAVSTAQKFSEDIKEVHFVLFSDDLYNIWRETAQQLLSQFEK

SEQ ID NO: 2641 - protein, 83 aa, Zea mays
  VARIANT 21: note = Ancestral polymorphism is A, Derived polymorphism is V
MAASRRAAAAMLCLAVAVAAVLAAEKSGAEAERPGCFCDCMKNRCMTLGASAADKFDCAAACTEGCAQIGQPGQPRADDFCGF

SEQ ID NO: 2642 - protein, 379 aa, Zea mays
  VARIANT 38: note = Ancestral polymorphism is D, Derived polymorphism is H
MNSMESCVPPGFRFHPTDEELVGYYLRKKVAAQKIDLHVIRDIDLYRIEPWDLQGHCGIGYEEQNEWYFFSYKDRKYPTGTRTNRATMAGFWKATGRDKAVHDKSRIIGMRKTLVFYKGRAPNGHKTDWIMHEYRLETDENAPPQASSISFTVIYLKLPIFIEEGWVVCRAFKKRTAYPARMAWGDPSYAYREISAMGAAAAAFVDPNAASYAQIRRQQSNKSARFKQEAELDGGAAAALLQYSSSHLVELPQLESPSAPANKSQAASASDEVVDAADSGRRPGKKARADEVATDWRALDKFVASQLSPAAECGLEAAAASSTAAASNVGSQLDHVEDDDMAALLFLNSDGRDEAERWTGLLGPAAGDDGDFGLCVFDK

SEQ ID NO: 2643 - protein, 438 aa, Zea mays
  VARIANT 10: note = Ancestral polymorphism is Q, Derived polymorphism is R
MAEKENILMQRYEMGKLLGKGSFAKVYHARNVKTSESVAIKVIDKDKIKKCGLMDQIIQEISVMKLVKHPNIVQLYEVMATKTKIYFVIEYVKGGELFKKVQRGRLKEDVARTYFQQLISAVDFCHTRQVYHRDLKPENLLLDGSHNLKISDFGLSALPNCKRKDGLLHTICGTPAYVAPEVISQKGYDGAKADIWACGVILYVLLAGYLPFQDKNMMDMYKKICKAELKWPSWFSSDVRKLLRRILHPNPNRRISIEEIRTHPWFRIGLDARLFDSTTRDYVPSDMDLALNSLNSNMVECNSAAEKLTILNAFDIISLSNGFDLSGIFENSNKESKFMSTNTAMTIITKLMEVAKSLDLKVITKTGGLLNMEAAKSGIKGVMSINAEIFQITPNYHLVEIKKINGDILEYHNFMNQSMRPALEDIVWAWHGEQPDEK

SEQ ID NO: 2644 - protein, 516 aa, Zea mays
  VARIANT 37: note = Ancestral polymorphism is T, Derived polymorphism is R
MAAATAAAATASASCLLRRSISSAFLAKRAVPSIPRTTLCYSSSASARLKPTPSLSPPVTSANDGGGGMRWESARKKRVVLRIGYVGTDYRGLQKQQELGVDSTIESVLESAIFKSGGILESNYGKLQKIGWERSSRTDKGVHSLATMISLKMEIPDRAWEDDPDGIALASFINSNLPDNVRVFSILPAQRSFDVRRECLYREYFYLLPAEIIGIKDDYSSEEMQEHLSEFNKILKGFEGNHPFHNYTARAKYRKVLAGRHRRAKGASSALKSMSSDTGMAESSSEESTSPDHDEDLNISSIFDSGIPEDTRVNGILKLSEDRLQIQARWLHEPDESDRLNASHFRDIITCSCGDLQTSSGIQFVELTICGVSFMLHQIRKMVGTAVTVKRGLLPRDIIELSLAKFSRIVLPIAPSEVLVLKDNSFCTKSKGGRIVRPGIQSMNKSEATRKGVEEFYRAALLPEVAKFLDPSLPPWKEWLENLDRFSGIPGSQLDEVREAYRAWRDDYDRAKMARN

SEQ ID NO: 2645 - protein, 164 aa, Zea mays
  VARIANT 101: note = Ancestral polymorphism is V, Derived polymorphism is M
  VARIANT 100: note = Ancestral polymorphism is S, Derived polymorphism is A
  VARIANT 91: note = Ancestral polymorphism is D, Derived polymorphism is E
MMSRERKKAAALQEKLKILRSITHSHALSNTSIIMDASAYIKELKQKVVRLNQEIACAQDALRHKASSYPTVTVEALGVQGSSFLVNVFSDKSCPGLLVAVLEAFDELGLSVLQATASCADSFRLEAVGGENVADNVDEHVVKQAVLQAVRSCSEGGSEHDDEE

SEQ ID NO: 2646 - protein, 25 aa, Zea mays
  VARIANT 4: note = Ancestral polymorphism is D, Derived polymorphism is G
  VARIANT 7: note = Ancestral polymorphism is S, Derived polymorphism is F
  VARIANT 17..25: note = Derived polymorphism lacks residues 17 to 25
  VARIANT 18: note = Ancestral polymorphism is C, Derived polymorphism is Y
MGEDVLSVFEHAIKVLYYKDDLVDS

SEQ ID NO: 2647 - protein, 82 aa, Zea mays
  VARIANT 11: note = Ancestral polymorphism is A, Derived polymorphism is T
  VARIANT 12: note = Ancestral polymorphism is D, Derived polymorphism is G
  VARIANT 16: note = Ancestral polymorphism is R, Derived polymorphism is C
  VARIANT 59: note = Ancestral polymorphism is Y, Derived polymorphism is D
  VARIANT 67..82: note = Derived polymorphism lacks residues 67 to 82
MIGAVTSGNLADILGRKMTMRFAAVVCIFGWLTVYFAKDAMMLYAGRVLLGYCTGVLSYVVNIYSSQYMYLNLHSYVSKPFV

SEQ ID NO: 2648 - protein, 498 aa, Zea mays
  VARIANT 110..498: note = Derived polymorphism lacks residues 110 to 498
MAMALRRLAGVSGSPSASSAAATVLLRSALTRPISTGFREERDTFGPIQVPNDKLWGAQTQRSLQNFDIGGERERMPVPIIRAFGVLKKCAAKVNMDYGLDPTIGKAIIQAAEEVAEGKLDDHFPLVIWQTGSGTQSNMNANEVIANRASEILGHKRGEKFVHPNDHVNRSQSSNDTFPTVMHIATAVEIHSRFIPSLQQLHDSLHSKTIEFKDIIKIGRTHTQDATPLTLGQEFSGYTTQVKYGIDRINCTLPRMYQLAQGGTAVGTGLNTKKGFDAKIAAAVAEETNLPFVTAENKFEALAAHDAFVESSGAVNTISASLMKIANDIRLLGSGPRCGLGELILPENEPGSSIMPGKVNPTQCEALTMVCAQVMGNHVGVTIGGANGHFELNVFKPMIAAGLLRSLRLLGDASVSFEKNCVRGIQANHKRISQLLHESLMLVTSLNPKIGYDNAAAVAKKAHKEGTTLKEAALDLGVLTEQEFHELVVPEKMIGPSD

SEQ ID NO: 2649 - protein, 122 aa, Zea mays
  VARIANT 39: note = Ancestral polymorphism is V, Derived polymorphism is A
  VARIANT 72: note = Ancestral polymorphism is S, Derived polymorphism is A
  VARIANT 78: note = Ancestral polymorphism is L, Derived polymorphism is M
MAAASSVHGFTVKISRSLRVAFPCNQFGGQEPGTSEEIAQLVCARFKAKYPILHKVDVNGEDAAPIYKFLKSSKTGPMGEDIKWNFAKFLVDRQGHVAERYAPTTYPLSIQKDIKKLLGGSY

SEQ ID NO: 2650 - protein, 166 aa, Zea mays
  VARIANT 63: note = Ancestral polymorphism is I, Derived polymorphism is N
  VARIANT 116: note = Ancestral polymorphism is S, Derived polymorphism is A
  VARIANT 118: note = Ancestral polymorphism is K, Derived polymorphism is R
MAAASSVHGFTVKDASGEDVHLSTFKGKVLLIVNVASQCGLTNSNYTELAQLHEMYKDQDFEILAFPCNQFGGQEPGTSEEIVQLVCARFKAKYPILHKVDVNGEDAAPIYKFLKSSKTGPMGEDIKWNFAKFLVDRQGHVAERYAPTTYPLSIQKDIKKLLGGSY

SEQ ID NO: 2651 - protein, 824 aa, Zea mays
  VARIANT 426: note = Ancestral polymorphism is G, Derived polymorphism is E
  VARIANT 373: note = Ancestral polymorphism is Q, Derived polymorphism is L
  VARIANT 234: note = Ancestral polymorphism is Y, Derived polymorphism is D
  VARIANT 231: note = Ancestral polymorphism is F, Derived polymorphism is S
MSAPKLDRNPSIRDRVEDTLHAHRNELVALLSKYVNKGKGILQPHHILDALDEVQGSGGRALAEGPFLDVLRSAQEAIVLPPFVAIAVRPRPGVWEYVRVNVHELSVEQLTVSEYLRFKEELVDGQHNDPYVLELDFEPFNVSVPRPNRSSSIGNGVQFLNRHLSSIMFRNRDCLEPLLDFLRGHRHKGHVMMLNDRIQSLGRLQSVLTKAEEHLSKLPADTPYSQFAYNFNTYICFFFLLVTFRFQEWGLEKGWGDTAGHVLEMIHLLLDIIQAPDPSTLEKFLGRIPMIFNVVVVSPHGYFGQANVLGLPDTGGQIVYILDQVRALENEMVLRLKKQGLDVSPKILIVTRLIPDAKGTSCNQRLERISGTQHTYILRVPFRNENGILKKWISRFDVWPYLETFAEDAAGEIAAELQGTPDFIIGNYSDGNLVASLLSYKMGITQCNIAHALEKTKYPDSDIFWKNFDEKYHFSCQFTADIIAMNNADFIITSTYQEIAGSKNTVGQYESHTAFTLPGLYRVVHGIDVFDPKFNIVSPGADMSIYFPHTEKAKRLTSLHGSIENLIYDPEQNDEHIGHLDDRSKPILFSMARLDRVKNITGLVEAFAKCAKLRELVNLVVVAGYNDVNKSKDREEIAEIEKMHELIKTHNLFGQFRWISAQTNRARNGELYRYIADTHGAFVQPAFYEAFGLTVVEAMTCGLPTFATLHGGPAEIIEHGVSGFHIDPYHPEQAANLMADFFDRCKQDPDHWVKISGAGLQRIYEKYTWKIYSERLMTLAGVYGFWKYVSKLERRETRRYLEMFYILKFRELAKTVPLAIDQPQ

SEQ ID NO: 2652 - protein, 94 aa, Zea mays
  VARIANT 43: note = Ancestral polymorphism is A, Derived polymorphism is V
MAPTRRLVSINLRQQSIKPSSKGYNAWQENLKEAGGTLSLRRVHLAIPIAGLQKFEADMDYTMLEKGHSAEIVTAAGSNLGKVFDSALRDQATV

SEQ ID NO: 2653 - protein, 888 aa, Zea mays
  VARIANT 198..888: note = Derived polymorphism lacks residues 198 to 888
  VARIANT 298..888: note = Derived polymorphism lacks residues 298 to 888
MRLRRAMQTSPPTVSVECVSSCRAASWKGGGRPYECSVLLCAWNAPRALTGALASTAQCSSCGHAEAGGGWRRRGRSRRSNNSLPRITLDEDINRGKFGYDPSRAYSTSFVRSWSTIVDRTWRSYCYSSSDSFISPETLWEDLKPAVSYLQPEELKFVHDALKLAYEAHSGQKRRSGEPFIIHPVEVARILGEHELDWESIAAGLLHDTVEDTNVVTFERIENEFGPTVRRIVEGETKVSKLGKLQCKSEGSTKQDIKAEDLRQMFLAMTEEVRVIIVKLADMLHLTSTLSTKHDYLQYAIAVETLQVFAPLAKLLGMYRIKSELEYLSFMYVNPTGFAELRKRVEDLYKSHEQELEEANRILRQKIAEDEFLDLVSVETEVRSVYKELYSIYKTTLKSKSSINEVNQVAQLRIIIKPKSCNGVGPLCTAQQICYHVLGLVHGIWTPIPQAVEDYIATPKPNGYQSLHTTVIPFLNESMFHLEVQIRTEDMDLIAERGIAAHYSGRRVASGPVGLGISSGRNAKGKVICLNNTDFALRIGWLNAIREWQEEFVGNMSSREFVDTITRDLLGSRVFVFTPKGEIKNLPKGATVVDYAYLIHTEIGNKMIAAKVNGNLVSPIHVLANAEVVEIITYDKLSSKYAFQRHQQWLQHAKTRSARHKIMRFLREQAALSAAEITADAVNSFVADLEDESDSELSLPSTKKEDSKFNWEKILSSDKLFFVNKSSDGFLPVNNVYPKVNGKQNKTVKDLGIKINGHSTIRGDSFSELMHPSNSTCKEVFPGLDDWKSGKISGWHNTEGNSVQWLCIACVDRKGMMAEVTSALTACGITVCSCVAEVSKRRGMGAMLFHFEGSYENVVSACLSVDMIFGVLGWSVGCSWCPLGALEC

SEQ ID NO: 2654 - protein, 1350 aa, Zea mays
  VARIANT 1229..1350: note = Derived polymorphism lacks residues 1229 to 1350
  VARIANT 1171..1350: note = Derived polymorphism lacks residues 1171 to 1350
  VARIANT 1150..1350: note = Derived polymorphism lacks residues 1150 to 1350
  VARIANT 1044..1350: note = Derived polymorphism lacks residues 1044 to 1350
MSATMASASQPSSQQPPPPPLTAEIVLRLASRDPSTAVPLLPELPPDDLADIVASLTATSPAGHLSLLPAILALLPSPSSASSAFAALLSAPSWPSSTLLAVATLLRDLPPAYRTRIPAFLGKIISLLPSADAQDLPALSYQLLLLASKPLYPRVVLAGLLRFFGGRRGARVRAPPSIARQVESTALMNVSFAVKQDPALAREVLAAIKADAAGALSGFAVAVMLFVARVPRFNEGAVSVLRDAVVVSRRDYRMSRRCKWLPDCMEGEYARATQCVEKGILKSVDESIVGREHVVPSIVQVAFRLLEVSEGDQGEEAGLGEGVMSTEEIGINMLKSLFEVHEMARTEIIEQCKFRILSAKPQQSVPVLRLIGCLILSHPFPMLEFIAHLKELLDYFSFMNDKISTALISCILPLTKFSRDLKDYVILVVRKAMFKREDMVRIAATNAIIELIIAENKKNEANPFEDSTSQPSSSQQPETHLEFGRCLFQELSGLLRRCLSHQASVKEVLYEGLIRTAISDPAVSDNILDFLWPHFQNYYSEDAECPLKIGSCFKVEHAKLCIVEPLDCLLSCISRILQIKQHSKCERPRDAYWKCFGFAASQDNEVGRASSSDLFVKALSSIQKYLRISLTEQRGQSQEAGSLSSPSEMAHCHNFAMLGIIEVFIDFSASKLEKASGKSKEMIEKEIVELVDAHSGFEKKISSGRERIARRRANAGDATDKHTNEPRENSNASLQKHHGNRGKFADSSLYELSVMCVKQCHADNYNNVSQHSSQTKLNQSSNLTSFVLKAFLELLKSLASKHSRDFTIKLHGDFKKLSQPIMQLVWCFLLDPIQENGGSKKNMTQGKKNTECKKDQLYLALTCLKKFLEPSVSGEHSSDIIDFLISLAPPNIEDTMGTGDLDNNDTTMVEDRSTRNVHVILNILKTLYARLLTQSVLRESEAVIELILGISRKLQLERRHLVGKWATDLCRKKTMQSPRMAREMLKLAIHLTPAPDDMILVYEVSTELMNLMTSGDDGDSSDTFHIINCKTKSSLAALSLQMVESSLTELDWGFGKLKAMLTLGYDCANIDEDQPADEIMLRLALEKALYSRSTLVVQVLSSFAHMSPMDTQAEHFLKLTVKFYKLLTRMSKSQIVPKGYRQSIPSLKFQKLAEVTCKMLTAPLYDFVFQQNQQIPIKGNLAKIRRETKCIPDLIFQIEDYEKYLIQLSKLTKVNLLRHAKRSVARDFQIKDKSGGQQEDDHIPDNAAASDNEADKDAMGPNAPVESCADDAQKSYADENASCESGHDEDAGGPNTPAEADADEIIRSSIPYGSPVQESESDREEEELLARTKRAKTKQVVQDSDEDADE

SEQ ID NO: 2655 - protein, 571 aa, Zea mays
  VARIANT 80..571: note = Derived polymorphism lacks residues 80 to 571
MSEVVGATTASMGRTGPTPEAVVAAVGCMAAALGRPEEEEGAVGVGGGAATEPEHTDWVGGGWEEGRERLWEGPSMPTGWGRMGPPGRAMTPKWSACSSNSYRELPSHENGECKSTLTESVPSPTSCFGLHTANTMCSLSSQKKDGNVYKRRKMDKDSNSPITFEDAKEMATQSCTISDDHSSLLLPIISSEALLLNSTAGMAGPILDCEEPADVPLEPNSGTDDRCFISNMSPTSMTPDKKNAAECSSSNIGPTESITEHISPRDLCIAILMKDGLINESRTRMAHKEEFTDNDANPLLACNNCGCLEHSLKMLICDSCEAGFHLSCCIPCIKELPTDEWYCAPCLCKKPKSLYGKLSEGRINPSRNTNTRPHGMSHIEYMLKDAEPYVTGVRLGRDFQAEVPEWSGPSSSSDVYFDEPCAIDSAELTTFNLCKMSNQSHSSIGNWIQCRETLNPGDSDKQVVCGKWRRYANFLFYEFLDIYLSCCCVSFFFAPAELHCKYFGIAEYPAGHPYMLYSQIIGIVFVVFFGIQSMLIVLFHRCVKIECLELKTSEVLKQLKFVNMVCSNPTK

SEQ ID NO: 2656 - protein, 181 aa, Zea mays
  VARIANT 139: note = Ancestral polymorphism is I, Derived polymorphism is F
  VARIANT 78: note = Ancestral polymorphism is G, Derived polymorphism is D
  VARIANT 23: note = Ancestral polymorphism is P, Derived polymorphism is A
MAPKSLLVVAALLAVVVSACQLPRGATALEASPSTNTNTSLIVSGTVPCATGNSIDPATVPAFPNALVQLVCGGKVVGSATADSAGAFVFSQSSASRDLVAAAMHNLCRVVVVTPLGACDRSLAAAAGTLSAPLKLVGITTGSGSGSDLGGLGGLIGGIVGLIGAIVGGILNLSTMPFSFV

SEQ ID NO: 2657 - protein, 106 aa, Zea mays
  VARIANT 20..106: note = Derived polymorphism lacks residues 20 to 106
  VARIANT 33: note = Ancestral polymorphism is V, Derived polymorphism is A
MAYICLHHLQSDVTMSGHTQPEGPHQLDSKHAANSCRKNVPGTSFVSDLRDHIHEFINASADEHRTCFTKTLKRMFDMSKTVTDRSSEAEEAGPESVLPLQTTVSR

SEQ ID NO: 2658 - protein, 196 aa, Zea mays
  VARIANT 49: note = Ancestral polymorphism is V, Derived polymorphism is M
  VARIANT 37: note = Ancestral polymorphism is S, Derived polymorphism is N
  VARIANT 2: note = Ancestral polymorphism is A, Derived polymorphism is V
MAPTKSHVLLAALLTVVAAVGQTPRAAEGFNIPGLGSMLNPIPVVAGVVPCSIGSSINPALVPGFPITCRSLILYVSLVSVPPDANVQLMCGGTVVANATTSITGSFILTPVNATLGLFSSMLGGQCNVVVTTPLVACNASLAGATGTLTAPLQLLGSGTGIAGGGSSTIIATIAGQPFTIINEMIIFTTGLSSLA

SEQ ID NO: 2659 - protein, 132 aa, Zea mays
  VARIANT 74: note = Ancestral polymorphism is Y, Derived polymorphism is C
MGLLDKLWDDTVAGPRPDTGLGRLRKQPVRPAAVKISDPAGDAAAFVPPSPASGSEETPVKVTRSIMIKRPAGYPSSPRSAASTPPASPLGTTPPISPFAGAGGRFRRKSSSDAYERATPPGTTSHPPPFDV

SEQ ID NO: 2660 - protein, 394 aa, Zea mays
  VARIANT 184..394: note = Derived polymorphism lacks residues 184 to 394
MERKGGCCLAPRYAATAAAQQAGAAWQMGRIMLKFRPIAPKPAAMAPAPAPAPVTGPAVSAGKGKRKAACGGGGRRGRKPKKAAKVAMVTAAPAATAAAQDVGDCRKHCDKEKSSSSPSSSSSGTSSVDSSPPPRPQQRQLATLPLMPETAADKAVACPAIPETRLHYRRIRPCRSCPKLLVDWAVNLGFHLVQLLPINDTSVHGMRWDSYPYSSLSVFALHPLYLRVQALSDAIPVLRYTFVMLSNLFIEEIQQAKKHLDKKDVDYEAALSTKLSIARKIFNLEKEKVLNSSSFQQFLSENELDKLISEGTLHHDVIRFHYYVQYHLYIQLSEAATYARKKNVILKGDLPIDVDRNSVDTWVYPTLFRMNTTTGAPLDYFDKNGQNWGFPTYN

SEQ ID NO: 2661 - protein, 881 aa, Zea mays
  VARIANT 235..881: note = Derived polymorphism lacks residues 235 to 881
MAPDPCADLAVTPKTSAKDEASCSVAPPTPPKVTPDEVRAVARKFADQPIQETEPDVWAVLTAISKKARLRPQGMNILLSADEHYLGRAVEERFRVFAQQISGKHCKIYKDTVSGERNRHEPVPVFFKDTSSNGTFINWKKFKKNASPHCYLVIDVANLLFKLYVAFAGKSFVFVYREVNAISCVENGVPILKRKSEEGSSGSKRLKGLGIGSPDGPVSLDDVRRLEKSNADLREQLEAHVVTIETLRAEIKTTQVQHGKELEELRETTSSSYLDQTKSLQSTLEEKQKQIDSLSTSNTELQNSIKDLDERLGASKQSRADADEIISSQKAIIRELEEQLSEERNLRREERDKAAHDLKFAVHKVQAEAQEEIKKQAESYLRQQREQKEVINKLQESEKETRLFVETLRSKLEDARDNLVTSEKKVRELEAQFQDEQLVSANNRKKSENLETELRKLKKELENEKAAREEAWAKVSALELEIAATIRDLSIEKQRYQGARERIILRETQLRAFYSTTEEISSLFAKQQEQLKAMQRTLEDEENYESTLMSVDLNKEHLAIDNAGMKPVNCSKNTLGASIASPENTQVSEHSSSDEDANMTEQQDDDVTANGGNTQDLECTSPERSVERRPGFHGNPVPTAPEREVTDTEQVPETESEAGNVGCDDQRCDNIGGETMPLEDEVLLPENEEPTALLKDAGQPQSNMVPIPILDDGGGHCSEEKHEGACSESKRDDTHVGAIRTGDLLASEVAGSWAVETAPSVNGENESPRSLGDATERDEDGGSVAADALLTLVNSEGQAAGSQNNVEQASSKITDDRRVLSAMIGIVDPEFRKQMSRSGAGNEEPMSDAETDEGVEEGDSDSGSDGSDSDSEEAMVEDSVG

SEQ ID NO: 2662 - protein, 317 aa, Zea mays
  VARIANT 39: note = Ancestral polymorphism is P, Derived polymorphism is Q
  VARIANT 41: note = Ancestral polymorphism is P, Derived polymorphism is L
MGRMASLLLAVALALLLPTSFCAAEPIKTTPTLWSFHLPLPDGVIGAESLAFDRRGQGPYAGVSDGRVLKWGGSALGWTTFAHSANYRKIPLCTASVVPSEQTESMCGRPLGLQFFAMTGDLYIADAYMGLMKVGPNGGEAQATGDVYFTDSSAIYPRRFNTEIMMNADATGRLLKYDARTKRVTVLKADLPYPNGVAVSNDRTHVVVAHTVPCQAFRYWLKGPKAGQYELLADLPGYPDNVRRDARGGYWVALNQEKARLDATAPPAKHLVGVRLAVDGAAVEELTAAKGVTLSDVAEKDGQLWLGSIELDYVGLV

SEQ ID NO: 2663 - protein, 57 aa, Zea mays
  VARIANT 37: note = Ancestral polymorphism is G, Derived polymorphism is D
  VARIANT 29: note = Ancestral polymorphism is F, Derived polymorphism is S
  VARIANT 23: note = Ancestral polymorphism is H, Derived polymorphism is R
MGALTMWLLHPSSHLHPPLSCPHTTPASFRRPGFLLGMKPLGYEYKEKRGLFSSNLG

SEQ ID NO: 2664 - protein, 69 aa, Zea mays
  VARIANT 8: note = Ancestral polymorphism is V, Derived polymorphism is I
  VARIANT 9: note = Ancestral polymorphism is S, Derived polymorphism is N
  VARIANT 11: note = Ancestral polymorphism is L, Derived polymorphism is S
  VARIANT 20..69: note = Derived polymorphism lacks residues 20 to 69
MRCNQCTVSNLPYFFMTLFQELISIPVSVSKMESRGEERHRPSSVEDAFLFLGFCCVSCLPSIDSNSPI

SEQ ID NO: 2665 - protein, 413 aa, Zea mays
  VARIANT 369: note = Ancestral polymorphism is G, Derived polymorphism is E
  VARIANT 129: note = Ancestral polymorphism is K, Derived polymorphism is R
MTTSASPLFPNPRKRHLDASPLPRHFHGPQSQTRLSQRHRRRFFLPLPPKARSFASDMGNHMSSAFGWPSDDGRGLLCCWIGKARGLTVAMDVEAGTGLHLVDRRRVTDSRKTTLKEEAVKPPQWKKRRPFYKEALEAAATHYDPRLEAIGIEIRLQKEKLAYIPKSDKAAKEDMSELFKPLTAEEENDVHDCLYSRGSSSKVLVLHEPSNIEVSKEKFQCLRRGCWLNDEVINLYLELLKEREKREPNRFLKCHFFNTFFYKKLACGKNGYDYKSVKRWTSQRKLGYELIECDKIFVPVHKDVHWCLAIINVKENFFQYLDSLGGMDHNVPKVLARYISEEVKDKSNRVINTSLWHEELVDIPLQRNGWDCGMFMLKYIDFHSRGLPLSFSQEHMEYFRKRTAKEILRLRAD

SEQ ID NO: 2666 - protein, 247 aa, Zea mays
  VARIANT 136..247: note = Derived polymorphism lacks residues 136 to 247
  VARIANT 226: note = Ancestral polymorphism is P, Derived polymorphism is L
MCMGSLKLWRAMVRVHSASSQGLGALGAAGARPVAPPPPDHQPAAARPRRSEQAEVFTIWMKSLVLNGSGCTVYDSAGSIVYRVDNYGARRAADVCLMDVAGNVVLQILKKKKLGFGRRWEGYRCADQEQQQQERQRPWLKVVRAWAWRGPSRCTCDCELGGLGLGGDSTSTTAVRYRMDDGRIAPARGARIVDGATGLAVAEVKRKTTAEGVALGADVLTLAVEPGVDRSVIMGLVLVHGLINRAM

SEQ ID NO: 2667 - protein, 1126 aa, Zea mays
  VARIANT 263..1126: note = Derived polymorphism lacks residues 263 to 1126
  VARIANT 161..1126: note = Derived polymorphism lacks residues 161 to 1126
MVETRRSAAAKRPAAGEEDKGAPASPASAPAENAGAGPRAGDDVASSQPPKRAKVGCTEADTEKPLVAPAEVGTVAGPLPNTAGLQALTGAMDKLEALLRPKEGQSNPAGHKRGTNDKDITAKIKRAMDLSEDLSAKIKKTKDNVAGILNKPQAAATSRRQEPWCRLISQYTMHPTLSIYGALFTIGHGAHHDFRLGESSTASPVCRLKQAKRGALLEVFESKVVRVNGKSLDKAAKVTLNGGDEIIFRSPVRHAYIFEQLHQEKSSTPALSSTCSSIQQGQCSHFKDIQGHLSSKGHKVPTIYFGRGRSSLLPSGSSADPLLLNLCKTMEGQSQHSSEDNISSGRFQLIKEDLINATVDASDIFESFDSCPYYLSDHTKCALMSSAYVHLHCKDYLKFTKDISSLSQRVLLSGPTGTDIYQEYLVKALAKNFGARLLTVDSSMLFGGQTSKEPETYKKGDRVRYIGSVQSTGVILDGQSPPDFGSQGEIFLPFEENRSSKVGVRFDKKILGGNDLGGNCEVDHGLFCPVDSLCLDIPGWEVTSKHPLDVIFEFISEEIRHGPFILFLKDTEKICGNNDYYHGLKSKLKHFPAGAFIIGSQIQPANRKEKAKGSSPFLSKFPYSQTILDLALQYTKKLEPQPSEALANVDIDAINGNNKETSKAAKHLIKLFPNKVILEAPQDEMELSRWNQMLNRDIEVLKGNANISKMRSFLTRVGLECTDLEAILVKDRVLTNECIDKIIGFALSHQLKNCTNPDPPLSNVQFVLSSESLKHGIDMLESIQSGSKSSTKRKSLKDIATENEFEKRLLADVIPPHEIGVTFEDIGALESVKDTLKELVMLPLQRPELFNRGQLMKPCKGILLFGPPGTGKTMLAKAVATEAGANFINISMSSISSKWLGEGEKFVKAVFSLASKIAPSVIFVDEVDGMLGRRENPGEHEAMRKMKNEFMVNWDGLRTKEKERVLVLAATNRPFDLDEAVIRRLPRRLMVNLPDASNRRKILSVILAKEDLADDVDLEAIANLTEGYSGSDLKNLCVTAAHRPIREILEKEKKERASAETENRPLPLSHTSNDVRALRISDFIHAHEQVCASVSSDSSNMNELVQWNDLYGEGGSRKKTTLSYFM

SEQ ID NO: 2668 - protein, 235 aa, Zea mays
  VARIANT 66: note = Ancestral polymorphism is E, Derived polymorphism is K
MDGELELPEFNPRERVKQQISVPFLWEVKPGAPKRDWVISQPVPVAFACPSPAPTKLVVSVPFQWEEKPGKPLQEASPFHVLPPDHGAFSASSRSLNPFVVESEEEYSLGFELEAFGFPDSSDASGAAAWADGSSSGRRDGWFSFSESEDYSHSSGDTSAHDKEFQFPRAPSEKSWEVANDEDNPWSPPRSAATTLEELMVLSRRLRCGQALPVDVGKKRLPSVELMKKLFIVCS

SEQ ID NO: 2669 - protein, 339 aa, Zea mays
  VARIANT 254: note = Ancestral polymorphism is S, Derived polymorphism is L
  VARIANT 212: note = Ancestral polymorphism is G, Derived polymorphism is E
  VARIANT 196: note = Ancestral polymorphism is Y, Derived polymorphism is D
  VARIANT 187: note = Ancestral polymorphism is G, Derived polymorphism is V
  VARIANT 177: note = Ancestral polymorphism is G, Derived polymorphism is R
  VARIANT 175..339: note = Derived polymorphism lacks residues 175 to 339
  VARIANT 168: note = Ancestral polymorphism is P, Derived polymorphism is H
  VARIANT 164: note = Ancestral polymorphism is N, Derived polymorphism is I
  VARIANT 156..339: note = Derived polymorphism lacks residues 156 to 339
  VARIANT 148: note = Ancestral polymorphism is A, Derived polymorphism is V
MTSASTFLSLRLPTPSHATSSLSFPPSLLRQARGGVASSTLVARAAGPTGAAGAPSPLFNPRGDPFLSTLAAASPEDLAAAAGGERRGEDHLPFLEIFQNTKLMASPAQVERSSSSYSQHRPRRPPPDLPSLLLHGRIVYIGMPLVPAVTELIVAQLMYLEWMNSKEPVYIYINSTGTARDDGEPVGMESEGFAIYDAMMRMKTEIHTLCIGAAAGHACLVLAAGKKGKRYMFPHAKAMIQQPRIPSYGMMQASDVVIRAKEVVHNRNTLVKLLARHTGNPPEKIDKVMRGPFYMDSLKAKEFGVIDKILWRGQEKYMADMLSPDEWDKVAGVRHPDLM

SEQ ID NO: 2670 - protein, 596 aa, Zea mays
  VARIANT 306..596: note = Derived polymorphism lacks residues 306 to 596
  VARIANT 196: note = Ancestral polymorphism is I, Derived polymorphism is N
MAPAAAAAEAAGPSPRRRLAAAVLALALALACVLAQAAARPDKETREKFYGTLVANGTHNASGDGSIAEMFGRVLDKEFSDSDTPDAPDKSSFNNSVSDHQINDFFAQAVLETVAVITHDKKKNDSQHTNSPKPFQIGDMFGGQDETSDDLETVIDKEDNVFVMSNRKTKYPTLQLDLRLIKDLVIIIVSATGGGIMFSFMGQPVIVGYLLAGSLVGPGGLNFINEMVQVETFAQFGVVFLLFALGLEFSLTKLKVVGPVAVLGGLLQIVLFMFLCGLTAALCGAKSSEGVFVGAFLSMSSTAVVSKFLVEKGSTNTLHGQVTIGTLILQDCAVGLLFALLPVLGGASGIFGGVMSMAKLLLVLSVFVAVTYMMTWSIVPRFLKLMIQLSSQTNELYQLASVAFCLLLAWCSDYCGLSLELGSFLAGVMISTTDFAHHTMEQVVEAIRNLFAALFLASIGMLIHVKFLWNHVDILLAAVILVIIVKSIVVAIVVKAFGYSMRTAFVVGLSLAQIGEFAFVLLSRASHLHLVGGKMYLLLLGTTALSLVTTPLIFKLIPVVMHLGILMRWFPSENSMQSELPLQEKAVMLEAHNRSL

SEQ ID NO: 2671 - protein, 145 aa, Zea mays
  VARIANT 89: note = Ancestral polymorphism is V, Derived polymorphism is M
  VARIANT 77: note = Ancestral polymorphism is P, Derived polymorphism is T
  VARIANT 61: note = Ancestral polymorphism is E, Derived polymorphism is K
  VARIANT 41: note = Ancestral polymorphism is W, Derived polymorphism is R
  VARIANT 35: note = Ancestral polymorphism is A, Derived polymorphism is T
MASARHALLLAAAMSALAVSSGATASELMVSTIHARVAAEWAWPGAGAGASSDDSCWGSPEECPVYYGVDAEGGAATRGRMRLQLYYDVDTAASLLPTAQYISYSALMPDSVPCSVPGASYYNCQPGAEANPYTRGCSAINQCRE

SEQ ID NO: 2672 - protein, 81 aa, Zea mays
  VARIANT 31: note = Ancestral polymorphism is S, Derived polymorphism is F
  VARIANT 56: note = Ancestral polymorphism is G, Derived polymorphism is R
  VARIANT 59: note = Ancestral polymorphism is R, Derived polymorphism is H
  VARIANT 77: note = Ancestral polymorphism is A, Derived polymorphism is V
MQNEEGKTVDLYVPRKCSATNRIITAKDHASVQINIGHLDANGLYDGHFTTFALSGFVRAQGDADSSLDRLWQKKKAEIKQ

SEQ ID NO: 2673 - protein, 290 aa, Zea mays
  VARIANT 43..290: note = Derived polymorphism lacks residues 43 to 290
  VARIANT 132..290: note = Derived polymorphism lacks residues 132 to 290
  VARIANT 142: note = Ancestral polymorphism is M, Derived polymorphism is T
  VARIANT 157: note = Ancestral polymorphism is D, Derived polymorphism is V
  VARIANT 158: note = Ancestral polymorphism is S, Derived polymorphism is L
  VARIANT 232: note = Ancestral polymorphism is A, Derived polymorphism is V
  VARIANT 235: note = Ancestral polymorphism is A, Derived polymorphism is V
MALAASHHGLLPFAPAATPTPSRGHLRFRAARPLPRPARRICCQSINSANVLGASSTTSDEAIPVPVVQIDQDSDRDATIVQLSFGDHSGILLDTLRDRIVAMITRDRNSFGGLCTRRPDEVLHIISSCETQRSMQLLGDAMLQWMSHNQMKYLLPVSKGLKMLQAFIMSSLLDIIEDLYSPRTAAMDFVSELIRKRGKNNLQKFIHFIVDIFRRYDEAPADLKPYRQKDGALLAIGTLCDKLKQTDPYKTELESMLVRHVFPEFNSRVGHLRAKVEYISSSLVNNDIEY

SEQ ID NO: 2674 - protein, 227 aa, Zea mays
  VARIANT 179..227: note = Derived polymorphism lacks residues 179 to 227
  VARIANT 169: note = Ancestral polymorphism is R, Derived polymorphism is L
  VARIANT 162: note = Ancestral polymorphism is G, Derived polymorphism is R
  VARIANT 159: note = Ancestral polymorphism is V, Derived polymorphism is M
  VARIANT 158: note = Ancestral polymorphism is A, Derived polymorphism is T
  VARIANT 155: note = Ancestral polymorphism is I, Derived polymorphism is V
  VARIANT 148: note = Ancestral polymorphism is Y, Derived polymorphism is C
  VARIANT 136: note = Ancestral polymorphism is R, Derived polymorphism is S
  VARIANT 62: note = Ancestral polymorphism is H, Derived polymorphism is Q
  VARIANT 27: note = Ancestral polymorphism is H, Derived polymorphism is Y
MRQPSSSRFTTICVFCGSSEGKRTSYHDAAIALAQELVSRGIDLVYGGGGIGLMGLVSQAVHRGGRRVVGVIPRTLMTTPETIGETAGEVVAVADMHQRKAEMARQADAFIALPGGYGTLEELLEMITWAQLGIHRKPVGLVNVDGYYDPLLAFIDQAVEHGFISPSARHIIVQAPTAQDLMAKLEEYVPYYDRVASGLNWETRAVVVTDAAGAGGSGPAGISVPGI

SEQ ID NO: 2675 - protein, 197 aa, Zea mays
  VARIANT 87: note = Ancestral polymorphism is G, Derived polymorphism is S
MMKLKYNKTGRENDCLPRVGHWNMMNKGPTRRDATALDPEQVQLVELALGALRENSIADVLYLQWLVLPETTKLLGSIAIGLKTKDGVVLAIEKRVTSPLLEMCGFDEEAKSYKDPSAIELVLMPWRYSTGYVLFVINHANKFVSVFNFTPTPEWCKDIPLKRFWEVILLISKKYKVAYGVKRIGWSHDIYMWRHSI

SEQ ID NO: 2676 - protein, 125 aa, Zea mays
  VARIANT 110: note = Ancestral polymorphism is P, Derived polymorphism is L
  VARIANT 98: note = Ancestral polymorphism is E, Derived polymorphism is K
  VARIANT 91: note = Ancestral polymorphism is R, Derived polymorphism is K
  VARIANT 82: note = Ancestral polymorphism is G, Derived polymorphism is R
  VARIANT 54: note = Ancestral polymorphism is D, Derived polymorphism is N
  VARIANT 37: note = Ancestral polymorphism is R, Derived polymorphism is W
MVLAQARRHPWPQFPRCCQLWLPRRRQLWLAGLRARWRWHITSKTYNLVLLDVDSHDRFLKSVCCKHDEVLLIIKVYFKRTGAEWRLERIRNTFKGIEGSHMWPFQMRILCLGLTVLILILGCRL

SEQ ID NO: 2677 - protein, 192 aa, Zea mays
  VARIANT 23..192: note = Derived polymorphism lacks residues 23 to 192
  VARIANT 49: note = Ancestral polymorphism is Y, Derived polymorphism is H
  VARIANT 53: note = Ancestral polymorphism is R, Derived polymorphism is M
  VARIANT 91: note = Ancestral polymorphism is L, Derived polymorphism is R
MPWNRFMPFLSKCCTSTVQTSSSYSSFSSSFSPIQPWLFVGLGNPGEKYQSTRHNVGFDMIDAFAQSQGIPLTTHYFKALFGEGLNECVVRAIDSGMVDGVPVLLAKPQTYMNLSGESAFDDMDLPCGVLRLQPKGGSGRHNGLKSVIYHFRKNREFCRLRIGIGRPAGQMDPKAFVLQKFNRTGRERLLMN

SEQ ID NO: 2678 - protein, 559 aa, Zea mays
  VARIANT 287..559: note = Derived polymorphism lacks residues 287 to 559
  VARIANT 252: note = Ancestral polymorphism is R, Derived polymorphism is G
  VARIANT 78: note = Ancestral polymorphism is T, Derived polymorphism is M
MASHNASVSVPEMASGFHPTVWGDFFIDYSPQPSQACMPYTTKSEEWTAERMSQLKEKIAGLFGACTTTAEQLNLVDTLQHLSIDHHFSTQILSVLTSAHAAEELNSGGACLHDVALRFRLLRQQGFWVSPEVFDRFRDENGSFDVGVADDDARGLLSLYNAAYLLTHGEAELEEAALFARQRLESMSMRGSLEYPLAQQVSRALHLPLPRTVRRVETLHYVSEYGGDPTHEHEHDPSVLEFARLDFELLQRLHVKELKALSRWWKDLYNEAGVTYSRDRVVECYLWSYTAYYEEEHARARMILAKMIALIILTDDTYDVRATLEECRRFDEAIQRWDESAVSLLPDYLKKFYLKLMNIFEEFEDELEPHEKCRVAFSRKAFQTLSSNYLQEAEWFHGRYKPRFEDQVKVSTVCSGAPFAAVGLLVGMGGDVATQEALEWAMGCTDAVKAFAEVTRFMNDLASYKRGKNKNDVDSSVECYISEHGVTAEVAFAQISSLIEDAWKTINGARFENSKLLPAVQRVADITASMPLMYGDNKDAFTFSDGLKGLIERLFLNRP

SEQ ID NO: 2679 - protein, 355 aa, Zea mays
  VARIANT 97: note = Ancestral polymorphism is A, Derived polymorphism is V
MAGQRWVGKVAAAAVVALLLLSTALPGGARREPDVNNNGRSFVFNYTLTKAVVEYAAAVYMTDLTALYTWTCSRCNDLTRGFEMTCIIVDVQNCLQAFVGVDHNLNAIIVSIRGTQENSIQNWIKDLIWKQVKLNYPNMPNAKVHIGFYSSYNNTVLRPAITNAVRKARKLHGHSDVIVTGHSMGGALASFCALDLAMSFGSNNVHLMTFGQPRVGNAAFASYFAQYVPYTVRMTHERDIVPHLPPYFFFLPKLTYKHFPREVWEHEVDGNTTYQVCDGSGEDPNCCRSVFALFWSASDHLTYMGVEIAADDWSTCRIVLGRGVEQLKGSLPNNIVTSGRSVDVVIADDDTLQID

SEQ ID NO: 2680 - protein, 363 aa, Zea mays
  VARIANT 227: note = Ancestral polymorphism is R, Derived polymorphism is C
  VARIANT 222: note = Ancestral polymorphism is V, Derived polymorphism is M
  VARIANT 196: note = Ancestral polymorphism is G, Derived polymorphism is D
  VARIANT 195: note = Ancestral polymorphism is S, Derived polymorphism is R
  VARIANT 188: note = Ancestral polymorphism is A, Derived polymorphism is T
MTHETDDLKGIYPYYSLREFCRRPHIRFCLHPDLALSLSTTQHQAPCPPAISAAPNRGIRLRYGRRSPLLRPNSRLASSSASWLSVLRPRCPWKEIENHGPRPGSKWMEIEESASAAPWHPLRPPPLPHLPARETIAIVPLPRAARDDPLPRDSRVFATHGVSLCADLLLHLDLSEKIINLYWSVYCAEGIGTSSGSQEWKANLSWVLAALAPRRSSSGCFMLVHLRRPTSRINIILDEIHFSVFSALFSLILTNSGQTTIAVLASKNIVSPVRRIPVGGLSYGTDDHSLRDEFAKYGEVVEGIKLIAALGGLLKNGLSYGTDDHSLRVEFAKYGEVVEGTLFIVALALALLFADQLCFNLSN

SEQ ID NO: 2681 - protein, 260 aa, Zea mays
  VARIANT 156..260: note = Derived polymorphism lacks residues 156 to 260
  VARIANT 111: note = Ancestral polymorphism is A, Derived polymorphism is V
  VARIANT 110..260: note = Derived polymorphism lacks residues 110 to 260
MEHDAEARRGFARMGFGCKHYRRRCRIRAPCCGDVFHCRHCHNESTKDGHELDRHDVQSVICLVCDTEQPVDKEQFHCDDCGICRCSRRKGELLPLPKVWILLLDDPSRQALLHRELDEEQLPHLLRGEAAYCLHLVHALRSSPLVTSAAAVGARQYLFDSLRETSVLRCGHTMHLQCFHEMLKHDKFSCPICATPIFDMDKFFKALDAEMEASYLYTGKGWVVCNDCRDTTQVFSGMAGHKCCHCQSHNTCRVAPPVLP

SEQ ID NO: 2682 - protein, 872 aa, Zea mays
  VARIANT 774: note = Ancestral polymorphism is Y, Derived polymorphism is N
  VARIANT 667..872: note = Derived polymorphism lacks residues 667 to 872
  VARIANT 434: note = Ancestral polymorphism is Y, Derived polymorphism is C
MAGVGGSGGGGGDDAEMGGWTGLLHSSTKLLEQAAPTPHFPPLQRNLDQLEALSTKLKAKTIRSEAPSQSLSATRLLAREGINAEQLARDLKSFELKTTFEDVFPSEATTVEEYLQQLHEMAIVSSIQEAQKDNLKSFNNYMMQVLEDDWQKEKRDFLQSLSRLSTLPKRNTNLSTSGLGRPASMPPSTSSLHAPSGLPSAEVMPIPNKTIIEKKSSVYAGVVRDLNDSRGRSLPFNPATAFRAAYESLSIDAIGTKSVSMQKVWHLIQALVGEGLTHRNVSRKMSLVVGARHHLEWGHEKYILETINSHPALAALGGSVGNLQKIRAFLRVRLRDQGVLDFDATDLRRQPPVDTTWQQIYFCLRTGYYDEARQVAQSSRTAYNFAPLLADWISTNGAVSPETALAASEECDKMLRMGDRPGRPGYDRKKLLLYAIICGCRRQIERMLKDLPTLFNTIEDFLWFKLSALREYTNASSSNLMNEGLVPYTLDDLQSYLNKFEPSYYTKNGKDPLVYPYILFLSIQLLPAILYLSKEVGEDGYHVDAVHISIALADHSVLPDGIGSGQKIGVMDACAEAASIIRQYGSIYLRNGNIDLALEYYAQAAAAMGGGEASWIGEGHADKQRQRSLMLKQLLMEILLRDGGIQLLLGPSGMGEEGELKKYMMDWRSRQQFLLEAAHRCQEAGLYDKAVEIHKRVGAFAMALQTINKCLSDAVCAMARSMLDGESRAAALIHSGNEILETARYSSEASIQEKDLISEQQTVLRQLEAILHIYRLARAGQTVDALRETIRLPFLHLDPKAPNVTVDIFRNLSPHVQACVPDLLKVALNCIDNVRDTDGTLRAVKSKIANLVASNMSRNWPQDLYQKVAQCI

SEQ ID NO: 2683 - protein, 547 aa, Zea mays
  VARIANT 475..547: note = Derived polymorphism lacks residues 475 to 547
  VARIANT 111: note = Ancestral polymorphism is S, Derived polymorphism is N
MGCVHGRPSTPSPDHPPQPPEPPAPAAAQEATGKAEQPAAPAEKPAPRERRSLSPRSGPGPSFANRARGEQVAAGWPAWLSAVAGEAIDGWTPRRADSFEKIDKIGQGTYSNVYKARDTVSGKIVALKKVRFDNLEPESVRFMAREILILRRLDHPNVVKLDGLVTSRMSCSLYLVFEYMEHDLAGLAASPEIKFTEPQVKCYMNQLLSGLEHCHDRGVLHRDIKGSNLLLDNNGMLKIADFGLASFFDPDRKQPMTSRVVTLWYRPPELLLGATDYGVGVDLWSAGCILAELLAGRPIMPGQTEVEQMHKIFKLCGSPTEEYWKKSKLPGATIFKTQLPYKRRIRETFEDFPQSALQLIEILLAINPADRLTATSALRSDFFTTEPFACEPSSLPKYPPSKEIDVKRRDEEARRLRATGGRANGDGAKKTRARDRPKAVPAPEANAELQVNIDKRRFVTHAAKSKSEKFPPPHQDGAVGVPLDTSNHMDPLYEPPDPSSFSTVFTHEKGAVPTWSGPLVDPAAVVNQKRKHKFGRSSKQPATARAR

SEQ ID NO: 2684 - protein, 392 aa, Zea mays
  VARIANT 23: note = Ancestral polymorphism is R, Derived polymorphism is H
MATQRFTAALVACLLLLLALPARGRNITAILAGYKEYKLYNQYLSETKVCDEINSRQSTSMSVLVLSNDAMTTLASDAGDSLPAIKNALRLHSVLDYYDRKKVKKYGDESAATLYQATGDAASTTGNVKVVDQEDKNYGFSAATPGARICTVTKEVETHPFKFAILEVTAPIEFDGLFDTPSTDNLTRLLERAGCKVFASLAASTGVLKTYEAAMDKGLTLFAVNDDAFQAKDAPDVKAMSKANLTKLLQYHALPSYNTKTSLKSVKGPLRTLAAKADVTVVAKGDDVSLDTGKSRSRVASTVVDSVPFCLLTMDTLLVPPELYVGAPEAAPAPAPADAPQGSPPAADAPSVAADHADHKSKKPSASSAVAWRPAGALAAVAVCSVVLASLL

SEQ ID NO: 2685 - protein, 564 aa, Zea mays
  VARIANT 120..564: note = Derived polymorphism lacks residues 120 to 564
MLVLFETPAGFALFKVLDEGKLDKVEDLWKEFTTSDSARKVVELKAFNKFENTSDALSAATLIIDSKPSKGLRKFLQKHCEGETLAVADSKLGNAIKEKLKIDCLHNSAVMELMRGLRNQLTELITGLGAQDLGPMSLGLSHSLSRYKLKFSPEKVDTMIIQAIGLLDDLDKELNTYAMRVREWYGWHFPELTKIVTDNIQYAKVVKMMGNRTNAVNLDFSEILSDEELETQLKEAAVISMGTEVSDLDLSNIRELCDQVLALSEYRAQLYDYLKSRMNTIAPNLTALVGELVGARLIAHGGSLLNLAKQPGSTIQILGAEKALFRALKTKHSTPKYGLIYHASLIGKASQKHKGKISRSLAAKTALAIRYDALGDGEDNSIGTESRLKLETRLQVLEGRELGKSAGSTKGKPKIEVYEKDRKQGAGALTTPAKTYNPAADLVLTEETPKKSELASKKRKHHEVQTEPSAELAEGAVQEDRKKKKKNKESEEAPAAEGDGEKKKKKKSKDVGEEPAVAAAAATEGEKKKKKKKSDADGEGVTTQTEESGKKDKKKKKKRHADDE

SEQ ID NO: 2686 - protein, 401 aa, Zea mays
  VARIANT 257: note = Ancestral polymorphism is A, Derived polymorphism is V
MATILLSSRLPTTGTATPSPTRPAPRFLSFPGTAIRRRGRGPLLASSAVSPPAPASAAQPYRALPASETTVLVTGATGYIGRYVVRELLRRGHRVLAVARSRSGIRGRNSPDDVVADLAPAQVVFSDVTDPAALLADLAPHGPVHAAVCCLASRGGGVQDSWRVDYRATLHTLQAARGLGAAHFVLLSAICVQKPLLEFQRAKLKFEEELAAEAARDPSFTYSVVRPTAFFKSLGGQVDIVKNGQPYVMFGDGKLCACKPISEEDLAAFIADCIYDQDKANKVLPIGGPGKALTPLEQGEMLFRLLGREPKFIKVPIQIMDAVIWVLDGLAKLFPGLEDAAEFGKIGRYYASESMLLLDPETGEYSDEKTPSYGKDTLEQFFQRVIREGMAGQELGEQTIF

SEQ ID NO: 2687 - protein, 355 aa, Zea mays
  VARIANT 259: note = Ancestral polymorphism is Y, Derived polymorphism is H
MVSAVLRTILVTGGAGYIGSHTVLQLLQQGFRVVVVDNLDNASEAALARVAELAGHDGANLVFHKVDLRDRHALVDIFSSHRFEAVIHFAGLKAVGESVHKPLLYYDNNLVGTITLLEVMAANGCKKLVFSSSATVYGWPKEVPCTEEFPLCATNPYGRTKLVIEDICRDVHRSDPDWKIILLRYFNPVGAHPSGYIGEDPCGVPNNLMPYVQQVAVGRLPHLTVYGTDYSTKDGTGVRDYIHVVDLADGHIAALRKLYEDSDKIGCEVYNLGTGKGTSVLEMVAAFEKASGKKIPLVFAGRRPGDAEIVYAATAKAEKELKWKAKYGIEEMCRDLWNWASKNPYGYAGSRDNSK

SEQ ID NO: 2688 - protein, 531 aa, Zea mays
  VARIANT 171: note = Ancestral polymorphism is W, Derived polymorphism is S
  VARIANT 213..531: note = Derived polymorphism lacks residues 213 to 531
MEAALMQQATPTRWRCVGDASLASHGQGQQRAGAVRLGAARRAVSGAVRASSSRHLGPVRALVSEAAAGERAAEGEGTDAVVRLFVGLPADAVVSDGRGVGRPRAVSAALRALKLLGVDGVELPVSWAVAQPGPGGWFEWAGYRAVAAMVRDAGLDLRVSLRTDGDALPGWVANAAAADPDVLFTDRSGHRRVGCLSFAVDELPVLVGKSPLQAYEAFFRSFAEEFNDLFGSTITDVTVSLGPNGELQYPSYPSGNQGSRGFDGVGEFQCYDKYMLARLKRHAESSGQPLWGLSGPHDGPRYDDESPESSAFFRELGGSWKSAYGEFFLSWYTGELLAHGDRVLAAASSAFRGKPVELSAKVPLLRGPGTGPSPADATAGFHGGYGPVAEMFARHSCAVIAAGVEARPDATAEERLAQVKAACTEHGVHLAAESAPLAVARGSDGDGPARVVWLSAGRTRPCQFTYQRMGAEFFSPGHWPLFVQFVRALECPEEAHEDDLPASADGGERLTVPSAAAAAPKDQATREVQTV

SEQ ID NO: 2689 - protein, 52 aa, Zea mays
  VARIANT 43: note = Ancestral polymorphism is M, Derived polymorphism is I
  VARIANT 41: note = Ancestral polymorphism is E, Derived polymorphism is Q
  VARIANT 40: note = Ancestral polymorphism is P, Derived polymorphism is H
  VARIANT 9: note = Ancestral polymorphism is P, Derived polymorphism is L
MNVYEDRIPGRAIIISVIDNLVKGASGQALQNLNLMMGLPENMGLQYQPLFP

SEQ ID NO: 2690 - protein, 193 aa, Zea mays
  VARIANT 12: note = Ancestral polymorphism is I, Derived polymorphism is T
  VARIANT 19..193: note = Derived polymorphism lacks residues 19 to 193
  VARIANT 21: note = Ancestral polymorphism is A, Derived polymorphism is D
  VARIANT 22: note = Ancestral polymorphism is A, Derived polymorphism is T
  VARIANT 31: note = Ancestral polymorphism is M, Derived polymorphism is V
  VARIANT 42: note = Ancestral polymorphism is D, Derived polymorphism is N
  VARIANT 73: note = Ancestral polymorphism is G, Derived polymorphism is R
MNKFKKHALRVIAEHLSVEEAADIKDMFEKMDLNKDQMLNFDELKLGLHKFGHQIPDADVQILMEAADADGNGSLDYGEFVTLSVHLRKIGNDEHLHKAFAYFDRNQSGYIEIDELRESLADDLGQNHEEVINAIIRDVDTDKDGKISYDEFAAMMKAGTDWRKASRQYSRERFTSLSLKLQKDGSLQMESTQ

SEQ ID NO: 2691 - protein, 401 aa, Zea mays
  VARIANT 242: note = Ancestral polymorphism is V, Derived polymorphism is D
  VARIANT 77: note = Ancestral polymorphism is D, Derived polymorphism is N
MSFRSLIQDMKDEFGSISRHSLRSRSHRSAGNAARAAAAGPSEAMDQSCWSQLPPELLREVLVRIEASESWWPARKNVVSGAGVCRTWRGIMKEAVRVPEVSGKLTFPISLKQPGPRDGTLKCFIRRNRTTQTYYLYIGLTEALADDGKFLLAARKCRKPTCTDYLISLDKVDMSKGSSTYIGKLRSNFLGTKFTVYDAHPPYDGAAVSKSRSARVVGLKQVSPRVPAGNYPVSHISYELNVLGSRGPRRMNCVMDSIPASAVKEGGKTPTQTEFPLSSLDSFPSFPFFRSKSARIDSSTSQSSSQREDRLVLKNKSPRWHEQLQCWCLNFRGRVTVASVKNFQLVASEDNGPENQESDKVILQFGKIGKDLFTMDYGYPISAFQAFAICLSSFDTKIACE

SEQ ID NO: 2692 - protein, 452 aa, Zea mays
  VARIANT 27..452: note = Derived polymorphism lacks residues 27 to 452
  VARIANT 33: note = Ancestral polymorphism is P, Derived polymorphism is S
  VARIANT 43..452: note = Derived polymorphism lacks residues 43 to 452
  VARIANT 49: note = Ancestral polymorphism is T, Derived polymorphism is I
  VARIANT 71: note = Ancestral polymorphism is D, Derived polymorphism is G
  VARIANT 72: note = Ancestral polymorphism is P, Derived polymorphism is A
  VARIANT 89: note = Ancestral polymorphism is A, Derived polymorphism is T
  VARIANT 108: note = Ancestral polymorphism is I, Derived polymorphism is S
  VARIANT 170..452: note = Derived polymorphism lacks residues 170 to 452
  VARIANT 180: note = Ancestral polymorphism is R, Derived polymorphism is C
  VARIANT 213: note = Ancestral polymorphism is H, Derived polymorphism is L
  VARIANT 226..452: note = Derived polymorphism lacks residues 226 to 452
  VARIANT 244: note = Ancestral polymorphism is R, Derived polymorphism is I
  VARIANT 292..452: note = Derived polymorphism lacks residues 292 to 452
  VARIANT 293: note = Ancestral polymorphism is Y, Derived polymorphism is H
  VARIANT 325..452: note = Derived polymorphism lacks residues 325 to 452
  VARIANT 409..452: note = Derived polymorphism lacks residues 409 to 452
MGANIDNAVNDGSGPPLFKICGQVHHRIGSLLPQEGSTPQFLQLYIYDTVNEVENRLRCLNPTKETIQNIDPLIVQELIKMLDEHNPFAKKFRMARDKLSDYEDEDFIIRIVGAREGDPVQYNLPTTDELAMLVCGDISLETFKRDIIIQKHNRDLKRISSLHPAYMALQYPLLFPFGERGFQIGVPYVGMENAERSARSHMTMQDFFSYRFHYKKNEPNPFLCYELLSSQAKVDARAAIDENRLQYILQNQNNLWTESIQGISDAVGRGCIDGEEMGLRVVLPASHIGGRRYMFQNYHDGLAICRVYGPPDFFVTFACNPNWPEILESMFEPGQKASDRSNIIVRVFHLKLNDLLNDIRSGDIFGRQVAERRQYPIKVCYAMTINKSQGQSLSEVVVYLKNPVFTHGQLYVAFSRVTSKKGLKVLIEDEDGNPSDETKNIVYNEIFSRFIQ

SEQ ID NO: 2693 - protein, 185 aa, Zea mays
  VARIANT 23: note = Ancestral polymorphism is G, Derived polymorphism is E
  VARIANT 31: note = Ancestral polymorphism is T, Derived polymorphism is A
  VARIANT 32: note = Ancestral polymorphism is S, Derived polymorphism is L
  VARIANT 51: note = Ancestral polymorphism is F, Derived polymorphism is L
MATDDTDEMRMFCFDNVAKRIVEKTCTSLLTSVTDTSNIPPDLAAIVSLKFTFVVVYNLMSFQNQEKELLIKSVIASHGRDLSLPSTKLSIPMHPSTPTKLPSRTRQAISPSTTLSNLSTSISLEQHSSFEAGDSLEDQNPQSFESPPKRIYCPWKQNDGAGVPNISHYAHQFLSNIDVYVLFGK

SEQ ID NO: 2694 - protein, 232 aa, Zea mays
  VARIANT 130: note = Ancestral polymorphism is P, Derived polymorphism is L
  VARIANT 134: note = Ancestral polymorphism is I, Derived polymorphism is K
  VARIANT 152: note = Ancestral polymorphism is W, Derived polymorphism is R
  VARIANT 158: note = Ancestral polymorphism is Q, Derived polymorphism is E
  VARIANT 166: note = Ancestral polymorphism is P, Derived polymorphism is T
  VARIANT 188: note = Ancestral polymorphism is F, Derived polymorphism is I
  VARIANT 194: note = Ancestral polymorphism is C, Derived polymorphism is R
  VARIANT 216: note = Ancestral polymorphism is Q, Derived polymorphism is R
MVKAVAVLGSSDGVKGTIFFTQEGDGPTTVTGSVSGLKPGLHGFHVHALGDTTNGCMSTGPHYNPASKEHGAPEDENRHAGDLGNVTAGADGVANINVTDSQIPLTGPNSIIGRAVVVHADPDDLGKDSLIITIYRSVILSDYSMAEREKIWWTRAQEEHRKRWRPCCLWYDHPFPSPILLRQTSFLFFFHTPRGFFIALYLPPQGSSDSRAELKQMVVGLRGRLGVPSPAG

SEQ ID NO: 2695 - protein, 207 aa, Zea mays
  VARIANT 4..207: note = Derived polymorphism lacks residues 4 to 207
MTAQTAEELATQIEQQKLEEQKTEAEEVVVEDEEEEDEDDDDDDKDDDELDGQEGDASGKSKQSRSEKKSRKAMLKLGMKPITGVSRVTVKKSKNILFVISKPDVFKSPNSDTYVIFGEAKIEDLSSQLQTQAAEQFKAPDLSQMILNPETSGPGQEDNDEEVDETGVEAKDIELVMTQASVSRPKAVKALKASNGDIVTAIMDLTT

SEQ ID NO: 2696 - protein, 549 aa, Zea mays
  VARIANT 221: note = Ancestral polymorphism is V, Derived polymorphism is M
MALYLLFESASGYGLFHAYGIDEIGQSVEAVRSSVLDLDRFGKAVKLTAFNPFSSAVDALNQCNAISEGIMTDELRSFLELNLPKPKEGKKAKYSLGVVEPKVGSHISEVTGIPCQSNEFVQELLRGVRLHFDRFINELKDSDLEKAQLGLGHSYSRAKVKFNVNRVDNMVIQAIFLLDTLDKDINSFSMRVREWFSWHFPELVKIVNDNYLYAKLAKFIVNKSDLTEKDIPALADIVGDEDKAKEIVEAAKASMGQDLSPVDLINVQQFAQRVMNLSEYRKNLYEYLVTKMNDIAPNLTSLIGEVVGARLISHAGSLSNLAKCAASTLQILGAEKALFRALKTRGNTPKYGLIFHSSFIGRASTKNKGRMARYLANKCSIASRIDCYSEASTSVFGQKLREQVEERLEFYDKGVAPRKNLDVMKAAIDSMVNGTSMDDDATCADIEKTDASPKKSKKKKTKTKADGDAMDVDKPSNVAGGEAEPGTEKKKKKKKHKLEEEAQEENGAADTTPKKKKKKSREASEEAEPKTATDGKKKKKKKAKAEDDE

SEQ ID NO: 2697 - protein, 375 aa, Zea mays
  VARIANT 100..375: note = Derived polymorphism lacks residues 100 to 375
  VARIANT 94: note = Ancestral polymorphism is R, Derived polymorphism is C
  VARIANT 83..375: note = Derived polymorphism lacks residues 83 to 375
  VARIANT 79: note = Ancestral polymorphism is R, Derived polymorphism is C
  VARIANT 74: note = Ancestral polymorphism is D, Derived polymorphism is N
  VARIANT 71: note = Ancestral polymorphism is R, Derived polymorphism is W
  VARIANT 41: note = Ancestral polymorphism is A, Derived polymorphism is V
  VARIANT 37: note = Ancestral polymorphism is P, Derived polymorphism is Q
MATGSAAGEESSAAARRLRRLSLHLLQPAPADRHHQPLALAACGHRVEGGTDVAAALAAYLRGRHRAAQMRLFDFFRARPDLQTPIELPTAAHRDLCYRQLRTLVREAGVRPLTLMATDPAEYFAVMEAAGGADISLGVKLGVQYRLILPLQGKGGEAADMGIHAFIVPIRDLETHAVLPGIEINDCGHKIGLNGVDNGALRFRSVRIPRDNLLNRFGDVSRDGKYTSSLPTINKRFAATLGELVGGRVGIAYCSVGVLKVAVTIVVRYALLRHQFGPPKQPEISVLDYQSHQHKLMPMLASSYAFHFATVQLVDKYSEMKKTNDEDLIADVHVLSSGLKAYITSYTAKSISVCREACGGHGYAAVNRFGHIPNI

SEQ ID NO: 2698 - protein, 553 aa, Zea mays
  VARIANT 130..553: note = Derived polymorphism lacks residues 130 to 553
MAKKKEKAVNVSGKPRHSNDVNRPNDKKGAGGGAGGGSRSAATVRRLKMYKTRPKRDRAGKVLRNDFQSKELPNTRIEPDRRWFGNTRVVGQPQLEMFREELQSRLSDNFSVILKERKLPLSLLQDHQKQAKAHLLEVEPFEHAFGPKGKRKRPKLTALDYESLLKRADDSQDVFEQKYASSKLPREEEEDGLRDLVRHTMFEKGQSKRIWGELYKVIDSSDVVVQVLDARDPMGTRCYHLERHLKENCKHKHLVFLLNKCDLIPAWATKGWLRTLSKDYPTLAFHASINKSFGKGSLLSVLRQFARLKNDKQAISVGFVGYPNVGKSSVINTLRSKSVCKVAPIPGETKVWQYITLTKKIFLIDCPGVVYQNNDSETDIVLKGVVRVTNLADAAEHIGEVLRRVKKEHLQRAYKIQDWSDDNDFLVQLCRTTGKLLKGGEPDLTTAAKMILHDWQRGKIPFFVPPPQQSDGGASESAEPIGITKEDGVSSDRTAAAMKAIAGIISSQQNMNVPCHKENNADNEDTTENADNEDIESSDNEDNDDIEPAERSE

SEQ ID NO: 2699 - protein, 63 aa, Zea mays
  VARIANT 22: note = Ancestral polymorphism is S, Derived polymorphism is G
  VARIANT 24: note = Ancestral polymorphism is R, Derived polymorphism is Q
  VARIANT 32: note = Ancestral polymorphism is L, Derived polymorphism is M
  VARIANT 38: note = Ancestral polymorphism is I, Derived polymorphism is K
  VARIANT 41: note = Ancestral polymorphism is D, Derived polymorphism is Y
MDKVVLTSIVLKSNVTMLDIVSTRMLGQYGFLARVFAIFEDLCISVDCVATSEVSVSVSLDPS

SEQ ID NO: 2700 - protein, 365 aa, Zea mays
  VARIANT 309..365: note = Derived polymorphism lacks residues 309 to 365
  VARIANT 168: note = Ancestral polymorphism is A, Derived polymorphism is V
  VARIANT 134: note = Ancestral polymorphism is A, Derived polymorphism is V
  VARIANT 133: note = Ancestral polymorphism is A, Derived polymorphism is V
  VARIANT 123..365: note = Derived polymorphism lacks residues 123 to 365
  VARIANT 114..365: note = Derived polymorphism lacks residues 114 to 365
  VARIANT 48..365: note = Derived polymorphism lacks residues 48 to 365
  VARIANT 36..365: note = Derived polymorphism lacks residues 36 to 365
MAARAIAEREDVVARLEGDKAGLEKLLAEREKEQAQEIESLRRFKLEEEIIDAEYTLTCDRIVSLKDKPKARVMVAGGGIGGLAFALAARRKGFEVLVLERDVSAVRGEGRETQPTSLSASGEERKAVVRVVAADMPPTLQRRTFCCAHDELAAMPHFPRRLKPKRLALALKKLIWKVLRVADPTIGSSSIKRPLVTEAATFMVMRLLPEKPSKAEIEKVKKRREELLKRHDMKRKWFVFDNHNLFYNNFALMVVCEWELGEARKRDALDRARVHGEEPPPEVLAEERGLHASIEGDVKSLLDGKTSTELEDMHGQIESQMSSGTAKVVEYWEAILKRLHIYKAKAFCDFDSVISVSTSALREVL

SEQ ID NO: 2701 - protein, 531 aa, Zea mays
  VARIANT 46..531: note = Derived polymorphism lacks residues 46 to 531
MNHFRASRLQESEFCSETNYILQLLQPKAVCGTFPEHQCLPDTAEECSFDFWHKRKALETQLPGGYYSKHLTKGGRLPTIQQEMQQRKLLYMGLYLLIWGEAANLRFMPECICYIYHHMAFEMYGMLAGNVSALTGEYVKPAYGGEKEAFLKKVVTPIYHTIAKEAERSKREKGNHSEWRNYDDLNESADCFRLGWPMRADADFFCQPDERNESTRISKQKGKVNFVELRSFWHIFRSFDRLWSFFILALQVMIILAWDGGSLASIFDYAVFKKVLSIFITSAILNLGQATLDIIFNWKARRTMEFAVKLRYVLKFTMAALWVVLLPVTYAYTWENPTGIIRIIKSWFGNGRNHLPLFVVSVVIYLSPSMLSAILFLLPFLRRSLESSDFKLVRFIMWWSQVNLIFNKLYTIHPLILNYHFTSVYRPRLFVGRGMHESAFSLFMYTMFWIALLLIKFAFSYYVEIKPLVEPTKVIMKTPIHTFRWHEFFPRGMHVFRTIFRAHSIILTPKFILQKRAISVLLLQFGLQSFW

SEQ ID NO: 2702 - protein, 523 aa, Zea mays
  VARIANT 62: note = Ancestral polymorphism is S, Derived polymorphism is C
  VARIANT 165: note = Ancestral polymorphism is R, Derived polymorphism is S
  VARIANT 283: note = Ancestral polymorphism is G, Derived polymorphism is D
  VARIANT 292: note = Ancestral polymorphism is R, Derived polymorphism is G
  VARIANT 381: note = Ancestral polymorphism is R, Derived polymorphism is W
MDVALSTIVFVIAIFIPALLTLVQRSRSRHAGHNPPPPPEPRAIPLVGHLHHLLRKKPLHRCLAHLAERHGDVLGLRFGSSRVAVVSSASVAQQCLVALDTSFGNRPRLPSARILSYEWSTMGHSNCGPYWRQARRTTSTEFSSVERVQHFADVHEQEARAMARRLCRVAHASGGRALVDVKSRLLEMLMNGLLDMLFRRTTSRSRSSDEKDEAVEVSEEARCFMAMAEETMELTLTVWDFLPPLARWLDVDAVGRRLQRLQANRTEFLQRLIEEHKEMEKSGQVTRRTLVGVMLELQDKDPEAYTDQLIRSLCVSALEAGTLSTGYTIEWVMSLLLNNPHIMKKARDEIDACVGEPKRLLDATDLPKLPYLRCIILETLRLYPVVPLLVPRESSTNCTVNGFNIAKGTMLLVNTFAIHRDPRTWDDPETFLPERFEDGSNQSGKTTMDLSFGMGRRRCPAENLGMQLAGIALGTMIQCFNWERVGTELVDMAEGSGLTMAKKVPLEAFCQPRASMVDLLANI

SEQ ID NO: 2703 - protein, 129 aa, Zea mays
  VARIANT 12: note = Ancestral polymorphism is V, Derived polymorphism is L
  VARIANT 85: note = Ancestral polymorphism is S, Derived polymorphism is F
MAPVVMMSMCVVVSLVAVQLQATSSDGATAATPSVVLPPVTVPRVRGRLEAGRKLQAVDAVGMGMDSVVRRTVVLTTMQTSNSPSLGYGSLRPNNAVCGSSCAGRPPGEPYLHQIRPCGEYYQCPSTPS

SEQ ID NO: 2704 - protein, 551 aa, Zea mays
  VARIANT 132: note = Ancestral polymorphism is R, Derived polymorphism is W
  VARIANT 254: note = Ancestral polymorphism is E, Derived polymorphism is V
MENPRPQAPALTPPMAPLPVPIHPPIAPIPVPPPRVPAPAPAAAASMASTPTPSTGDGGEAEYEVSDDHRAARERHERAVQELLQRRRAYAMAVPTNDSAVRARLRRLGEPITLFGEREMERRDRLRALMVRLEADGQVDRLLRAQEDDQAARIGEEEEEEQIEYPFFTEGSQELLKARLDIARYSLPRAKARIERAKRRHEDPDEDPEAEAELVVKQAGEFVLECSEIGDDRPLTGCSFSRDASMLATSFNMVDYVLVLLLPFQEITICLSTLCSSWSGIVKVWSMPQITKVATLKGHTERATDVVFSPADDCLATASADRTAKLWKPDGSLLMSFDGHLDRLARLAFHPSGKYLGTASFDKTWRLWDINTGKELLLQEGHSRSVYGVSFHPDGSLAASCGLDAYARVWDLRSGRLFFTLKGHVKPVLGVSFSPNGYLVATGSEDNFCRIWDLRKRQMLYSIPAHKSIISHVKFEPQEGYYLATSSYDTKAALWSARDYKPIKSLVGHESKVTSLDISGDGQKIVTVSLDRTIKIWSCRSSTQDNEMELD

SEQ ID NO: 2705 - protein, 328 aa, Zea mays
  VARIANT 40: note = Ancestral polymorphism is L, Derived polymorphism is V
MTTTQFAMVEELASLIKDNLHSKHLILSTEEALIAALQQLHCRDGDREEDDDAADTIELQPAGAYHRLLLHRLAEIYGFAHESVGEGEDRHLVLQCCPETAIPSVLVSDMIWKFDNSDDLASVVLTRNDIDFQKPQKADVVKDVSVKNSHLKDNTDLKPLKQPAVLPAASLKEREAAYRAARERIFSGDGAKGNDRSYVKCRQVPVVAKRMIAHALGQKVQNTTETAASKESKGKQLSNGKTIPTHSRNNFCPVTPDNIEAVLMGMPSSAGSNSYQTPPSQRCHATNTRAVTAESLKKEQTGAAKRMFAHALGLSAARGSCGTLPKPK

SEQ ID NO: 2706 - protein, 329 aa, Zea mays
  VARIANT 28: note = Ancestral polymorphism is L, Derived polymorphism is M
  VARIANT 65: note = Ancestral polymorphism is G, Derived polymorphism is W
  VARIANT 128: note = Ancestral polymorphism is G, Derived polymorphism is E
MVSHSLSAWLMSSAPPPAWFAALVAVGMYTALRSAATFLAWLHRAFLRPGRDLAGRYGTWAVVTGATDGIGRAVALELARAGLHLVLVGRSPDKLARVAKELAAAAPACKVRSVAFDLAVTGDAARRGVARVAAAVEGRDVGVLVNNAGATYPCAAYFHEVEGPVWEAVLRVNVEAATRITRALLPAMAARGRGAVVNVGSGSSVVVPAFPLYAVYAASKAYVDQFSRSLSVEYKQYGVDVQCQIPLYVATKMSPVKGASPFIPSPEEYARAALRCVGYEARCVPYWRHSVQWFLASLAPDAALNHWRLQTGLQKRNETKALLGGKDCS

SEQ ID NO: 2707 - protein, 691 aa, Zea mays
  VARIANT 42: note = Ancestral polymorphism is R, Derived polymorphism is C
MLFPVELERSAGRQRPQDTPTSSFFSAASPPTLFPLLCWVLRFALLAALRLSPISTRLVLAWLPLPTDSTGFKRPTSAETWPRACVRILRTRSPEPPGPIEFRLPMPALLLLLLLAAAPAPARAGDPYSYYDWEVSYISAQPLGVKQKVIGINGQFPGPPLNVTTNWNVVVNVRNALDEPLLLTWNGVQQRKTAWQDGVLGTNCAIPAGWNWTYTFQVKDQVGSFFYFPSTPLHRAAGGYGAITINNRDVIPIPFAFPDGDITLFIGDWYNRGHRELRSALDGGTLLGAPDGVLINGLGPYQYNESVVPPGIVYERINVEPGKTYRFRVHNVGVSTSLNFRIQNHNLLLVETEGSYTSQQNYTNLDIHVGQSYSFLVTMDQNASTDYYVVASARFVDAAVVDKLTGVAILHYSNSQGPASGPLPDPPNDQYDTAFSINQARSIRWNVTASGARPNPQGSFHYGDITVTDVFLLQSRAPELIDGKLRSTLNEISYIAPSTPLVLAQIFNVPGVFKLDFPNHPMNRLPKVDTSIINGTYKGFMEIIFQNNATNVQSYHLDGYAFFVVGMDYGLWTENSRGTYNKWDGVARSTIQVFPGAWTAILVFLDNAGIWNLRVQNLDTWYLGQEVYINVVNPEDSSTTLPDNAIFCGALSSLQKEQSHRFQYSKAAPVPQWGETISLLVLLACFALWSL

SEQ ID NO: 2708 - protein, 539 aa, Zea mays
  VARIANT 7..539: note = Derived polymorphism lacks residues 7 to 539
  VARIANT 258: note = Ancestral polymorphism is E, Derived polymorphism is G
MAPKTVWGYFFIDYIPEPLQVSDKQRVVELKGEVARLFEDCNCKDVVERMNLVDVVQRLGIDHHFKEQIDTALKNIQGAEFNSSDLHEVSLRFRLLRQHGLWVPADQFDKFRRQEDGSFSSDIADDPKGLLGLYNAASLLIHGEEVLEEALLFARRHLESIRRGGGLHDSPYLSEQVGRSLKIPLPRTLKRLEAVSYIPEYSSADDTTYIHPEILELARLDFNLLQHVHQNELRTVTQWWKGLCDVIGPDYGRDRIVECYFWAFSMYYEEEHARARMILARLIMLASLLDDTFDDRATLQECRELNKAIERWDESDDISLLPECIQKFFLEVIRNFAEFEDELEAHEKYRVAYARKAYQLLSKSYLQEVEWCHQGYTPSFDDHVSVSTASAGIQVLCVGMLVGMGDAATKEVFEWMIGSNNRVVRACAEVTRFMDDMADFKRGKNKTDVATTVECYMKEQNVTGEVAFDKIGSFVEDAWKTLNQAALVGDRALLPVVQRVAGLAMSMMVFFHGKIDRYTDSEHLKETLEDLFVNHVPLC

SEQ ID NO: 2709 - protein, 476 aa, Zea mays
  VARIANT 12: note = Ancestral polymorphism is E, Derived polymorphism is K
MDKEKRRRSWIERIRRLFTTSSSDPKPAPKPAPDKKAKSKRWLPGKLRAQQSFALPAPAPAATEPDQIRRAEDEQSKHAVAVALATAAAAEAAVAAAHAAAHVVRLTGQAPVVPPLPRQVRGQEKEREQAAVAIQSAYRGYLARRALRALKGLVRLQALIRGQAVRRQTAATLRGLESLMRIQARHRSRAGGVDHHQQQAADDDDALLLRRGRELFAAAAAVHEQQQASNKRWDSSIFSKEEMSAMTRSKEEAALKRVRALQYASLHNEKLGLRRPPSPSMSRDDEADALNNQRWSWLEEWVGSQPFDKDVPVAHQSPYTRSASRGEHDDVVDRLGCSARRSFARPTRTPPRGDCYGDAAQFPGYMASTASAKAKFRSMSTPKERSAAGYDAYSEHCFPFADRLLSPIPSMSPIPSVASDMGFARPPVAQRSPRVPAKSPMTPARARTRRSHGGHHSFGSEAALHQLQMEHYTPVR

SEQ ID NO: 2710 - protein, 508 aa, Zea mays
  VARIANT 401..508: note = Derived polymorphism lacks residues 401 to 508
  VARIANT 258: note = Ancestral polymorphism is H, Derived polymorphism is Y
  VARIANT 170..508: note = Derived polymorphism lacks residues 170 to 508
MVTYDLRLRLPSSGSGCRPLPWSMDRSPAAAGLQPLPNRLPATGFRPQPATGVCHLRIRPLGTSVPSLPPTFIVRSPTPGPQLQQYSTSSRNSEEEPSPPNPQPIYCPPGVRPKSRVVARLPQGLLPRSFPLEALHLFKHARQHLADDTFVFKFVLKACAGLGWHRAGAQLHALVVQKGFEFHAYVHIALINVYVMSRCLVEARKVFDEMPVKNVVSWNVMITGFAGWDEVEYARLLFDQMPCRNVVSWTGLIDGYTHACLYAEALTLLRHMMAGGISPSEIIVLAVIPAISNLGGIVMGEMLNGYCEKKGIMSDVRVGNSLIDLYAKIGSVQNSLKVFDEMLDRRNLVSWTSIISGFAMHGLSVEALELFAEMRRAGIKPNRITFLSVINVCSHGGLVQQGLAFFKSMVYEYNIDPEIKHFGYIIDMLGRAGRLCEAEQIIEGLPMEVNVTVWRILLGCFSKYGEVEMGERAIKMISDLERESGGDFLQVLRAAVGHILARVQDFLV

SEQ ID NO: 2711 - protein, 337 aa, Zea mays
  VARIANT 273..337: note = Derived polymorphism lacks residues 273 to 337
  VARIANT 244: note = Ancestral polymorphism is T, Derived polymorphism is M
  VARIANT 173..337: note = Derived polymorphism lacks residues 173 to 337
  VARIANT 164: note = Ancestral polymorphism is G, Derived polymorphism is R
MAVGCFNPVLSPLVPSPPRSRLRAALRSHSHQPTAVSLRLLPSGAAAGRGTWRLAAAAESQAVQEQQARTEEPGEAGGPGAAEASSKLVLVVGGTGGVGQLVVASLLSRNIKSRLLLRDPEKASALFGKQDESVLQVYKADTRNPNDLDPLMFEGVTHVICCTGTTAFPSKRWDGENTPERVDWDGIRNLVSALPQTIKRLVLVSSIGVTKYNEIPWSIMNLFGVLKYKKMGEDFVRNSGIPFTIIRPGRLTDGPYTSYDLNTLLKATAGERRAVVIGKGDKLVGEVSRLVVAEACIQALDIESTEGQIYEINSVKGEGPGTDPEKWEELFRSVQSD

SEQ ID NO: 2712 - protein, 198 aa, Zea mays
  VARIANT 86: note = Ancestral polymorphism is D, Derived polymorphism is G
MDDIGGGAPGACPKNKKPRHLSRSLTYHHHPYQGRQVLPAPAPNPQRPQSVVLYTTSLRGVRRTFADCCAVRAALRGLRVAVDERDVSMDAALRRELQGILAARGRGFSLPQLLVGGALVGGADEVRRLHESGELRRVLEGAPGQDPAFVCGACGGFRFAPCPACDGSRKVFVEEEGRARRCLECNENGLVRCPNCCS

SEQ ID NO: 2713 - protein, 302 aa, Zea mays
  VARIANT 38: note = Ancestral polymorphism is P, Derived polymorphism is R
  VARIANT 6: note = Ancestral polymorphism is A, Derived polymorphism is D
MMATTAYIDDSCSEVIDPPKTEVLDVAELPGDHTQNPPKPNVVVSSSVRELLECPVCLSAMYPPIHQCSNGHTLCSGCKPRVHNRCPTCRHELGNIRCLALEKVAASLELPCKYQCFGCPGIYPYYSKLKHESQCQYRPYSCPYAGSECTVAGDIPYLVNHLKDDHKVDMHNGCTFNHRYVKPNPHEVENATWMLTVFSCFGQYFCLHFEAFQLGMSPVYIAFLRFMGDDAEAKNYSYSLEVGGTGRKMVWQGVPRSIRDSHRKVRDSYDGLIIQRNMALFFSGGDRKELKLRVTGRIWKEQ

SEQ ID NO: 2714 - protein, 86 aa, Zea mays
  VARIANT 69: note = Ancestral polymorphism is S, Derived polymorphism is C
  VARIANT 45: note = Ancestral polymorphism is G, Derived polymorphism is A
  VARIANT 39: note = Ancestral polymorphism is E, Derived polymorphism is K
  VARIANT 35: note = Ancestral polymorphism is P, Derived polymorphism is L
  VARIANT 33: note = Ancestral polymorphism is A, Derived polymorphism is P
  VARIANT 29: note = Ancestral polymorphism is E, Derived polymorphism is K
  VARIANT 26: note = Ancestral polymorphism is V, Derived polymorphism is D
  VARIANT 25: note = Ancestral polymorphism is T, Derived polymorphism is M
  VARIANT 9: note = Ancestral polymorphism is L, Derived polymorphism is F
  VARIANT 7: note = Ancestral polymorphism is W, Derived polymorphism is R
  VARIANT 4: note = Ancestral polymorphism is M, Derived polymorphism is T
MWCMVKRKLFMQNKERLVHVLKGITVGIEKCQATPLSQEVLIVWGDHNQLFLVEAFAVHRYSSCGFLHSLRLKNIWLTVTPSARAG

SEQ ID NO: 2715 - protein, 608 aa, Zea mays
  VARIANT 274: note = Ancestral polymorphism is S, Derived polymorphism is R
MATSPPQNPSSGEPSDASSLAAAALEAPVRVWRSLVARFPPLPDSSSFLAGVSDLQLRYFGNSRPRRRRRSALPLPLRPVAAHSARIAGEMPKAFVILDDVVQHTLTNLHSIHKSLLFWQAKAEGTNSQKVYFMIFERGPRAFVDATYQTLTRLGSNGRPVQYILHSASDMVSTKLAALTSMQHCLAAFLAEVHSEVDKCREGLTENSDKSLHTLFIVLNTTFSKLEVSLRNACEGQDELFIDDGNLHELFGKLPEVDVESSEWTEALATDGTSLIYQNLQKLDSFLSSQLSSHKRPNKLTIYWLPYTCGAVGLSVCSLWLLRHSSLMGSPDIDNWIRDAKESVAGFWDEHVEKPIISIRDELFETFKQRDKGVMEKQEVQLTEDSLRRMLVAFCEQTEGQKLLEDLPVQAMLETLTKRYEKELIHPIQNLFSGELARAMLIQIQKLKLDLESGLLEMDQILRANAINFAVLAALPAFGLSLLLLVLLRAWVQRDHGAEGRGNIARCQRRLLLVDVERRLMEFQHYRDNGMEEEARCKFGLVLYTLDRLCKAVESHAKETGEWLSLRQDIFDLSKLDMGMPDKMIVVSRLKWMYNCLLPFSSSRLPRL

SEQ ID NO: 2716 - protein, 290 aa, Zea mays
  VARIANT 120: note = Ancestral polymorphism is A, Derived polymorphism is T
  VARIANT 194: note = Ancestral polymorphism is S, Derived polymorphism is Y
  VARIANT 201: note = Ancestral polymorphism is R, Derived polymorphism is G
MAAPTTLRSAAARARARAAELVRGRWPQRRLGTTSAAETESKKNKEEEEEGAGWELSAAREYYDYRKSIYGDVTHRALLVDAVGTLVVPAQPTAQVYKSIGEKYGVKYSEDEILMRYRRAYEQPWGGSRLRYVDDGRTFWQHIVTSSTGCSDAQYFEELYQYFMTEKAWKLCDPDAESVFKALRKAGVKTAVVSNFDTRLRPLLQALKCDHWFDAVAVSAEVAAEKPNPIIFLKACELLGVKPEEAVHVGDDRRNDIWGARDAGCDAWLWGSDVRSFKEVAERIGVEVTK

SEQ ID NO: 2717 - protein, 135 aa, Zea mays
  VARIANT 50: note = Ancestral polymorphism is S, Derived polymorphism is N
  VARIANT 34: note = Ancestral polymorphism is E, Derived polymorphism is K
MVAISAHLIATLPSLPTLRPCPRRLQPSAFATSEAPHRAPAPGVALRGCSRRCSPSVRRFHGFQNAISFGKEHNRQALFASGRGSPSSSDDGSSSPDGPPVLTILAGVTVFLLVLWVVGSVVTWIVGLVFGAAKS

SEQ ID NO: 2718 - protein, 435 aa, Zea mays
  VARIANT 105: note = Ancestral polymorphism is P, Derived polymorphism is L
MPVPKPMERKQAAYSNLDERYAIQGEKYQGQQYSHIYFTRLHHMRNLLHALVPSWKPQLPVTTVLGLEEGKDCIIVGTLYKHMKLKPSILDEYAKERSAIPLVKPHNFMHPDDHLILEDESGRVTLAGAIPPAAFVTGVVVALHGKETSAGNFLVEDVLEAGLPPQSALSSAEEDKYVVFISGLSVGSDTFNPLQFQLLIDHVTGHLGDENEQSIASNIVRIVVVGNSVHISPRFVNGQTVPSKDQSRIAEPIKELDIMLTQLVASLPVDMMPGCHDPANFSLPQQPLHRCLFSGASTYNTFSSCSNPHQFELDSVQFLGTSGQNIDDLYKYSDAKDKLEFMERTLRWRHLAPTAPNSLGCYPYTDKDPFLVESCPHVYFVGNQDKYETRLLEGQEKQKVRLISIPRFSESGVAVMLNLRNLECSTLSFSTSFDA

SEQ ID NO: 2719 - protein, 210 aa, Zea mays
  VARIANT 50: note = Ancestral polymorphism is G, Derived polymorphism is S
MAAAAADSDTAAAVGAMSTCAHCQREIPFLNIDLHSVHCARNLQKCQHCGEMIPRKLMDEHYDENHAPINCSLCKETIERESWDLHKGEKCPQRIVACEYCEFELPAVDLHEHQDVCGNRTELCQTCRKYIRLREWTGHEIQCHTNSNGSADTSRAIPERELRPPPPPVRQARPARPAHASPHKRLLFTIAVTGIAVMIGSILFQRDEGF

SEQ ID NO: 2720 - protein, 265 aa, Zea mays
  VARIANT 140: note = Ancestral polymorphism is V, Derived polymorphism is M
  VARIANT 116: note = Ancestral polymorphism is T, Derived polymorphism is M
  VARIANT 63: note = Ancestral polymorphism is N, Derived polymorphism is D
  VARIANT 23: note = Ancestral polymorphism is H, Derived polymorphism is Y
MDDSENSLPSDFVSLIDVWYKGHALYSKVIWGIPSSDSANGWFYNYPFRIDLSQHSAENNENNNGDVFLSTVSGVSPVPSMEQERKDGKLWRELNDGVKLSWIVVNKKMKRAVNLTSWHPLSGQRHWPTDADFVLRFGSVLPAKEVLPCQVAECILLMKFRVTGMGGEEAGEPSTLALTELSMQIQDMGGVHLNGRCSLLLLKEALSCHRSRNYDEVLESCNLYLKAQSELKEEKIRSECRFDTLCVFSGIAIFAAICTMWYRKF

SEQ ID NO: 2721 - protein, 308 aa, Zea mays
  VARIANT 263: note = Ancestral polymorphism is R, Derived polymorphism is W
  VARIANT 186: note = Ancestral polymorphism is G, Derived polymorphism is C
  VARIANT 15..308: note = Derived polymorphism lacks residues 15 to 308
MTTGATSRLLDPESSEEETAKLASACLDWGFFQLINHGIPDEVTGNLMNDVAGFFGQPLDAKKECAQQADSLEGYGQAFVVSEDQKLDWADMLFLIVQPREARDTRFWPTRPASFGDSVDSYSLEASRLAYRLLELMARGVGAADPASLRRVFEGQTQGMRVNYYPPCRRAADRVLGLSPHTDASGLTLLLQASNGVQGLQVRKDGRWFAVDAIDGALVVNVGDFLEILSNGKFTSVEHRAVVHPTRERMSAALFLYPRQNMRVGPLPEFVNGGNERYGSTDYEEFMKHYFATKLDGRKHLDRLKLEQ

SEQ ID NO: 2722 - protein, 288 aa, Zea mays
  VARIANT 40..288: note = Derived polymorphism lacks residues 40 to 288
  VARIANT 56: note = Ancestral polymorphism is L, Derived polymorphism is H
MVQLECSTHPLRTRPCPPGVGVRDPVPVLELLQRHRNRLRSLKVWLKADGQVDRLLHAQEDDQAARIVEEKQQQIKRLQRQGDHYAARARCMSSSIGTMTASEPSWSNSSARPTHSAPALVPQALVCGIRYRCWSSSSGVATTSNPSRSGSRLMARSTISSMHRTTIRPHTSLRRSNNRSSTPSSLRARRSFSRRVSTLYSTCCPRTNDTTRTSMRIQRRRPNSSSRRLGSFVLEWSKIGDDFSLTGCSFSRDASMLTTRMAGDAYDGANIISLRENINREQHMNRGN

SEQ ID NO: 2723 - protein, 627 aa, Zea mays
  VARIANT 169: note = Ancestral polymorphism is H, Derived polymorphism is L
MRSGRGKMATPPPPIRPAAALLLLVLAGVLASAASADLVISKADRRVDLTSHIVRVLASLKAENVGPDPVSQVLLPFPNIQAKNLAAIRAFGSEGKVKGQSTVLPIEVVQPSGAPPELTFFSALLPKPLEKGKTLYLDVLTVFTHSLQPFPEEITQAEAQLVVYQDSAHYLSPYPVKAQTLAIRLPGGRVESYTRHPNAKLVDSELKYGPFHDLPPFSYLPVIVHFENNNPFAVAKEVIREIEISHWGNVQITEHYNIAHGGARLKGEFSRIDYQSRPYVRGVSSFRHLIAKLPPRAHSIYYRDEIGNISTSHLWSDSMKTQLEIEPRFPLFGGWQTTFTVGYGLPLEDFVFYSDGKRFLNITFGSPLEEILIEKLIVKVRVNVVLPEGSKDIEVSAPFPTQQQQEVKYSHLDIVGRPVVVLEKPDVIPEHNLYFQVYYRFNNISLLREPLMLITGFFLLFVACIVYMRTDMSISKSSPSYLAKLQWDEVQATVQKIQGIFEQCLAVHDKLEASLRDLSRTGDIQSCKAARKAADTQFKELSKDLKPLLATLQSSPQSYQILPKVEDLIVKEREMQEKLMTRHSTVVDSFEKKLRGQDVENRIALQQQKIAALRQEVESLLEYISEI

SEQ ID NO: 2724 - protein, 238 aa, Zea mays
  VARIANT 13: note = Ancestral polymorphism is A, Derived polymorphism is V
  VARIANT 20: note = Ancestral polymorphism is C, Derived polymorphism is S
MRAEATESSALTAGAAHLLCFAGLAAAHTLAGRGALVSDPALALRLLVVFSLTSPPPVPVCEAPIVIAVFSYLRRDAKSCSIFKAVARGLICLPVGAFLNAFGAIVLGAPVGIKYWIPTIYWSLLMSLFTVIDIFADFLFVPAACVFGASKIDWQNVLSHSIYFMPNDVENYMISAPCHGAVLGAWLGGWPMPLDWERPWQEWPICVSYGAVAGYLVGMAVSVVLVAVHNRRVRAKAD

SEQ ID NO: 2725 - protein, 337 aa, Zea mays
  VARIANT 226: note = Ancestral polymorphism is R, Derived polymorphism is S
  VARIANT 146..337: note = Derived polymorphism lacks residues 146 to 337
  VARIANT 109: note = Ancestral polymorphism is G, Derived polymorphism is R
MNASAIPSPAGGGRFFTGFTKLCKGLAVIIFLVHILVHLFPSAATYLTLIPARTIPFAWNLITACYIEQTIPGDTASHPYLTRLLCFHQVIMSIVGLLLLGKVLEPLWGAKELLKFIFIVNLSTSACVFVTTIVLYYITQEETYLYTPVSGFYGVLSGLLVGIKQILPDQELNLFVLKISAKWIPSIVAFTSVVVSFFVKESISYLPIILFGIYMSWIYLRYFQRSLEVGLKGDPSDEFSFSSFFPVFLRPVLDPIASIFHKLFCGRSAKPEGTGQTLDGSQFPGLGSIEANRRRERGQRALEQRLAEKPAAVRNTEGTPPPKQQLEDAEDDASDEV

SEQ ID NO: 2726 - protein, 321 aa, Zea mays
  VARIANT 84..321: note = Derived polymorphism lacks residues 84 to 321
MGSGSSKTTTADGLDHPHALLRTDVEIGVTTSSHSVSPKLGGDDDDSKCVSLHKELVWGFFRNARHIVRQLGEVHVTHKSGEPYGSWDLEHLASESSFAMVDKVPFQREDYPGYNQKRGDGGIPPPLPMSRIPSPDLLAPREQPWYQQRTILDHLGVDDYFFAREHQMSLQREYEMKRQVIPLEHRHTDRESVEKLEWLHRMIALYDGKDTEEQSHCSPSWSSEGNLKYTLIFILELLPMAKLAKLWRELLTPTSKGGGGAGEGFDVTKSGDARVGLVGFPSIGKSTLLNKLTGTFSEDIESDDEDLDFEVDDGAEDEPKA

SEQ ID NO: 2727 - protein, 92 aa, Zea mays
  VARIANT 3: note = Ancestral polymorphism is G, Derived polymorphism is E
  VARIANT 8: note = Ancestral polymorphism is T, Derived polymorphism is I
  VARIANT 13: note = Ancestral polymorphism is A, Derived polymorphism is T
  VARIANT 14: note = Ancestral polymorphism is P, Derived polymorphism is H
  VARIANT 15: note = Ancestral polymorphism is H, Derived polymorphism is Y
  VARIANT 18: note = Ancestral polymorphism is A, Derived polymorphism is V
  VARIANT 19: note = Ancestral polymorphism is A, Derived polymorphism is D
  VARIANT 20: note = Ancestral polymorphism is G, Derived polymorphism is R
  VARIANT 31: note = Ancestral polymorphism is S, Derived polymorphism is F
  VARIANT 44: note = Ancestral polymorphism is S, Derived polymorphism is F
  VARIANT 51: note = Ancestral polymorphism is V, Derived polymorphism is I
  VARIANT 65: note = Ancestral polymorphism is N, Derived polymorphism is K
  VARIANT 69: note = Ancestral polymorphism is W, Derived polymorphism is G
  VARIANT 70: note = Ancestral polymorphism is P, Derived polymorphism is S
  VARIANT 76: note = Ancestral polymorphism is G, Derived polymorphism is R
  VARIANT 80..92: note = Derived polymorphism lacks residues 80 to 92
MFGVVGITVTSLAPHAAAAGVCFVAFRNEQSAGYAAAYDFLTGSPGAFLTVSGPGCVHGLAGLSKATAWSLLMISGSCDQADAGRGDFQELD

SEQ ID NO: 2728 - protein, 178 aa, Zea mays
  VARIANT 7..178: note = Derived polymorphism lacks residues 7 to 178
  VARIANT 9: note = Ancestral polymorphism is P, Derived polymorphism is L
  VARIANT 19..178: note = Derived polymorphism lacks residues 19 to 178
  VARIANT 26..178: note = Derived polymorphism lacks residues 26 to 178
  VARIANT 48: note = Ancestral polymorphism is H, Derived polymorphism is Y
  VARIANT 58: note = Ancestral polymorphism is T, Derived polymorphism is I
  VARIANT 70: note = Ancestral polymorphism is V, Derived polymorphism is M
  VARIANT 75: note = Ancestral polymorphism is G, Derived polymorphism is D
  VARIANT 111: note = Ancestral polymorphism is P, Derived polymorphism is L
  VARIANT 119: note = Ancestral polymorphism is I, Derived polymorphism is S
  VARIANT 123..178: note = Derived polymorphism lacks residues 123 to 178
  VARIANT 126: note = Ancestral polymorphism is A, Derived polymorphism is V
  VARIANT 139: note = Ancestral polymorphism is P, Derived polymorphism is S
  VARIANT 162..178: note = Derived polymorphism lacks residues 162 to 178
  VARIANT 167..178: note = Derived polymorphism lacks residues 167 to 178
MEDALSQDPHVVRLLDLKQGVNKEGQTILYLIFEYMDTDLKKFIRGYHANHEKIPAQTVKILMYQLCKGVSFVHGRGVLHRDLKPHNLLMDRKTMALKIADLGLSRAITVPVKKYTHEILTLWYRAPEVLLGATHYSTPVDIWLLGTPNEEMWPGVGKLPNWHVYPQWKPTELSTLVP

SEQ ID NO: 2729 - protein, 248 aa, Zea mays
  VARIANT 120: note = Ancestral polymorphism is D, Derived polymorphism is V
  VARIANT 42: note = Ancestral polymorphism is P, Derived polymorphism is S
MAMCSTTFPFVFYDLLEQSLPFYNMLKRQIRKIRGPQQPPLSDPPLPVPANKNILVWVGDELLPRNSAKVSVFDSVVQGGDAVWEGLRIYDGKVFKLDEHLDRLFDSAKAMAFSNVPTRDWIKDAIFKTLIANGMFNNAHIRLTLTRGKKVTSGMSPAFNLYGCALIVLAEWKPPVYDNSHGIKLVTATTRRNSPNSIDSKIHHNNLINNILAKIEGNLAQAEDAIMLDKDGFVSETNATNIALREQL

SEQ ID NO: 2730 - protein, 451 aa, Zea mays
  VARIANT 70: note = Ancestral polymorphism is S, Derived polymorphism is C
  VARIANT 59: note = Ancestral polymorphism is C, Derived polymorphism is Y
  VARIANT 40: note = Ancestral polymorphism is A, Derived polymorphism is S
MPGSIASRWRELHGKDSWKGLLDPLDMDLRASVIAYGELAQATYDGFNTEARSPHAGACLYGHADLLAASDSAGGGAGGISDRYRVTKFVYATSGLHVPDAFLLLPQPALGQQEPWCRESNWMGYVAVATDEGAAALGRRDVVVAWRGTVRSLEWVNDLDFTPVPAAPVLGSAAAAHPRAMVHGGFLSLYTSSNASSKYNKLSARDQASGSMSMTQFLPSLLLRRNHRFFEVCLVLEEVRRLMELYKDEETSISVTGHSLGASLATLNAVDMVANGVNAPGAATATGTSGGSSSSPAQPQPQRAGCPVTAIVFASPRVGGPFFKAAFASFADLRALHVRNKGDVVPLYPPLGYVDVAVPLPIHTARSPWLRRPGTPQTLHNLECYLHGVAGEQGAAGGFRLEVGRDVALVNKGADALRDEYPVPARWRVALNKGMVRGADGRWALKDFEHI

SEQ ID NO: 2731 - protein, 151 aa, Zea mays
  VARIANT 76: note = Ancestral polymorphism is S, Derived polymorphism is R
MQMQAAGKEPAAAAVPAANKPPSICDRLQRAFAARPAFRPLRRITVGRHQDGGAAKPAGAGDGVSAAFGPAPNKHSGPPLPAPPATVAPQCEQPVPVRLPAVASKVAAGGAPTGPPVPVPPPDVMAGDMGQQIQGKTRVGSRVRNRKALSK

SEQ ID NO: 2732 - protein, 356 aa, Zea mays
  VARIANT 271: note = Ancestral polymorphism is S, Derived polymorphism is L
  VARIANT 168: note = Ancestral polymorphism is K, Derived polymorphism is N
  VARIANT 164: note = Ancestral polymorphism is T, Derived polymorphism is I
  VARIANT 65..356: note = Derived polymorphism lacks residues 65 to 356
  VARIANT 21: note = Ancestral polymorphism is R, Derived polymorphism is H
MSFFFRMASRLRPSTPEEVVRSIKDSFLALHTRTHAKALEEVEKNMSSLRLLIFGDGEVEPNEEQVLQITLEICKEDVISLIVQDLPSLGWGVPLWLQVRKDLAICWCILLRQKVDETYCCVQYLENHLELLDFLVGCYKNLDIALNCGNMLRECIKYPTLAKTGFLKLKFHEFFIMFYFRYILESGSFELFFEYVELPNFDIASDALNTFKIVAGSAYQARSCSRRVLEFPLRAEFLLETHNSQIMKRYIVEVRFLNIMINLLKVIVHASSQDSSKNIRICAFHVFKVFVANPNKPRCIVVALLDNRREVLKLLHNLPSSKGIVVHGYRLFIQMEPLGHLRNQDRKRPKHHSVEE

SEQ ID NO: 2733 - protein, 321 aa, Zea mays
  VARIANT 98: note = Ancestral polymorphism is F, Derived polymorphism is L
MMIRQPSSSSSVLMFREAPAFRNGPDCGADGRVDIAMTLDANYLRGTMAAVLSILQHTACPESVAFHFLTADADADGHGLSAALRASFPFLDLRVYRFDPSRVRDRISRSVRQELDQPLNYARVYLADTLPRDVRRVTYLDSDVVVVDDVRTLASVDLAGHVVAAPEYCHANFSNYFTDAFWSHPALNGTFHGRRPCYFNTGVMVMDVDKWRAGGYTRRVEEWMAVQKRRRIYHLGSLPPFLLVFAGHIRAVDHRWNQHGLGGDNVEGRCRGLHPGPISLLHWSGKGKPWLRLDARRPCSVDYLWAPYDLYRYSSPVIDEW

SEQ ID NO: 2734 - protein, 935 aa, Zea mays
  VARIANT 3..935: note = Derived polymorphism lacks residues 3 to 935
MLQSKSFVKKTKQGRIQKVVREHYLRDDIYCGFVPCTACAAAAERKLGAAAAAILVVDTNVVLHQIDLLENPAIEDVVLLSVVLDEVKNKNLSVFNRIKALCINKARRFYVFANEQHRDTYVKDMVGESSNDRNDRAIRVAARWYQSHLGESVKVLLITNDRDNKRKAIEEGLNAETVESYVRSLAQPGLLDLVVVPTSGDVSMEDVDDHRPSKKKVIYNEHKPMSEITSGLRCGIYHQGKLRVNRYNPFEAYVGSESIGDEIVIRGRSNMNRAFDGDIVAVELLPQDQWHESKSFIADDDEEEEEDVHLVPNSADDAPRNTNSTQSTVGSSAPSISSRPVGRVMGIIKRNWNSYCGSLQPMPMPAGSGGVAHALFVSKDRRVPKIRIQTRQLENLVNKRIVVAVDSWDVLSRYPSGHYVRTIGDIGDKETETEVVLIENDINTRPFSTQVLACLPPLPWTLSPEDLANPNRQDLRQVRVFSVDPPGCRDIDDALHCTLLPNGNFEVGVHIADVTNFVHPGTPLDEEAAQRGTSVYLVGQRIDMLPKPLTEDVCSLRADVERLAFSVIWEMTPDADVISTRYTKSVIKSCAAMSYVEAQARMDDSRLVDPLTVDLRNLNSLAKIMRQRRCERGALTLASAEVKFEIDSETHDPLDIGIYQIREANQMIEEFMLAANVSVAEKILKHFPLCSLLRRHPSPTKEMLEPLLRTASSIGLNLDVSSSKALAESLDNAKSNDPYFNKLIRILATRCMTQAVYFCSGDLTFSEYYHYGLAASLYTHFTSPIRRYADVVVHRLLAAALNIAKLPPIFQDGPQLTGIADNLNYRHRNAQMASRASVELHTHIYFKTRPTDTEARIVKIKANGFIVFVPKFGIEGPIYLTPKGDKGGDWVVDEVHQRVTKPGTNISYAILQTVRIHMEVVEPQPHRPKLQLTLI

SEQ ID NO: 2735 - protein, 490 aa, Zea mays
  VARIANT 183: note = Ancestral polymorphism is R, Derived polymorphism is W
  VARIANT 194: note = Ancestral polymorphism is T, Derived polymorphism is I
  VARIANT 213..490: note = Derived polymorphism lacks residues 213 to 490
  VARIANT 240: note = Ancestral polymorphism is L, Derived polymorphism is Q
  VARIANT 267: note = Ancestral polymorphism is Q, Derived polymorphism is H
  VARIANT 285: note = Ancestral polymorphism is C, Derived polymorphism is R
  VARIANT 295: note = Ancestral polymorphism is D, Derived polymorphism is Y
  VARIANT 341: note = Ancestral polymorphism is S, Derived polymorphism is L
  VARIANT 359: note = Ancestral polymorphism is T, Derived polymorphism is A
  VARIANT 406: note = Ancestral polymorphism is T, Derived polymorphism is M
  VARIANT 427..490: note = Derived polymorphism lacks residues 427 to 490
  VARIANT 428: note = Ancestral polymorphism is P, Derived polymorphism is S
  VARIANT 437..490: note = Derived polymorphism lacks residues 437 to 490
  VARIANT 443: note = Ancestral polymorphism is M, Derived polymorphism is T
MVQIAAPPRRRDGRAPSPSPGVMHATPPPRCHGALAFAPVNHGRQCRRRPQPRPHLPPPTLSHDLCRHVSAFGGPSSSSSALGGPSSSSGQICVWRPVLILIRAPPPAISAAASSPPSPVISVAVRTWVRSDLRLVAIPVLILFLAPTPTLHPISDLGEDDKVIVERCARERSRPPAAPHHRREATRGDAQAVTLFLLHPRPPLGPRGRAIQRGTVLPIKDTCGGEEGLLALALWATHWLKMGSANKINERYLKLQKSKKSTKTKLQVDQAIVWLFLHIECKNYCIYIFQVDFHYTQPQGHLLTKYISMLQALGVPVHRLVKAADSVSVCLSKGLGAPIRSVVVGSEAFIDKARILRKTLGGGMRQVGFLCAAAYVAVRDTVGKLADDHRKAKALAEGLTKIKQFTVDSSSVETNMVFFDIVDPHISPSKLCQVLEQRNVLAMPASSKSVRFVIHYQILDSDVQYALTCVESLFRKIVVALLGTEMLLMK

SEQ ID NO: 2736 - protein, 135 aa, Zea mays
  VARIANT 57: note = Ancestral polymorphism is P, Derived polymorphism is T
MASGNNNKQRSEEEWRVVLSPEQFRILRLKGTELPGTGEYNKFYGDGVYNCAGCGTPLYKSATKFDSGCGWPAFFEGLPGAINRTPDPDGRRVEITCAACGGHLGHVFKGEGFKTPTDERHCVNSVSIKFSPGSS

SEQ ID NO: 2737 - protein, 524 aa, Zea mays
  VARIANT 6: note = Ancestral polymorphism is V, Derived polymorphism is D
  VARIANT 12: note = Ancestral polymorphism is V, Derived polymorphism is G
MEMELDPFLGVVLATAVLLVAVLRRKRGSSRKYKMPPGPRPWPVIGNLNLIGALPHRSIHALSARHGAFMSLRFGSVPVVVGSSVEAARFFLRTSDTSFIDRPRMAAGKYTAYDYSDIVWSPCGAYWRQARKLWKAHLFSDRQLRSQEHVRSEELRVLLRALSSSSSAGAAGRGRRAVALKEHLLMYSLNVISRMALGGKYVGEGGTAGSPISPAEFSWMVDELFLLNGVFCVGDFIPWLGWLDLQGYVGRMKRLGKMFDRFLEHVVDEHDQRRRREGGGFVPADMVDLLLELADDPKLEVPIERDGVKGFALDLIAGGTDSTAVTIEWAMSELLRKPEVLAKVTEELDGVIGHGRLVTEQDIPDLPYLEAVVKETLRLHPVTPLLAPRLCREDASTGSYDIPRGTLVFVNVWAIGRDPAVWGHDAEEFRPERFVGSAVDVKGHDLELLPFGSGRRMCPGYVLGLKMVQVTLANLLHAFSWRLPDSVAPEKLNMQEKFGLAVPRLVPLEAVAVPRLPPHLYAGP

SEQ ID NO: 2738 - protein, 303 aa, Zea mays
  VARIANT 36: note = Ancestral polymorphism is A, Derived polymorphism is V
  VARIANT 89: note = Ancestral polymorphism is P, Derived polymorphism is S
  VARIANT 102: note = Ancestral polymorphism is A, Derived polymorphism is S
  VARIANT 111: note = Ancestral polymorphism is G, Derived polymorphism is S
  VARIANT 144: note = Ancestral polymorphism is R, Derived polymorphism is C
  VARIANT 152: note = Ancestral polymorphism is H, Derived polymorphism is Y
  VARIANT 185: note = Ancestral polymorphism is S, Derived polymorphism is A
MAATRTALALLGHEGMESGPRPAAPRRSRLRVVAVALRTRPTSLAAPGLPPAAPEPVLPSPPVAAGAAAVLLEAGVPPADLRRAAGMCPELLSVSAEAVEAALRFLTEEAGVAEADLPRVLRRRPRLLVSPVAARLRPTLYFLRALGVPDLHRRADLLSFSVEGKLLPRLEFLESLGLPARAARSMARRFPALFGYGVEGNMRPKADYLLGAMARRADELYDFPEYFSYALATRIVPRYEACAARGVSRLPLPAMLRPGDAKFRSTLTSCVGSMLPRRRSALWHATWVDDDAAAAAAAKETTV

SEQ ID NO: 2739 - protein, 525 aa, Zea mays
  VARIANT 41: note = Ancestral polymorphism is P, Derived polymorphism is S
MELPAPSSASFFLVAVVAGATLFLVTVLRLRARSTRKYRLPPGPRPWPVIGNLNLIGPLPHHSVHELSKRYGPLMSLRFGSFPVVVASSIDTARLILKTHDLAFIDRPQTAAGRYTTYNCAGLFYQPYGAYWRQARRLCQAELFSARRLMSLEHVRSDEVRAMLSDLRAAASAPAGGHDAVTLREHLYMVNLSVVSRMLLGKKYVVEGSSSPATPEEFRWLIDEHFFLNGVLNVADMIPWLSPLDPQGYVKRMKRSAKMLDRFLEHVVDEHNERRRREGEDFVAMDMMDVLLELADDPSQLEVPITRDNVKGFTLDLMGGGTDTSAVTVEWAMSELLRNPEVLAKATEELDRVVGRNRLVAEGDIPSLPYLDAVVKETLRLHPVAPLLTPRLCREDVSVGGYDIPAGARVFVNAWAIGRDPAVWEAPLEFRPERFAGSGVDVKGQHFELLPFGSGRRMCPGMGLALRMVPTILGNLLHAFAWRLPDGVAAEELGMEETFGLTVPRLVPLQAVAEPKLPARLYAVL

SEQ ID NO: 2740 - protein, 74 aa, Zea mays
  VARIANT 54..74: note = Derived polymorphism lacks residues 54 to 74
  VARIANT 51: note = Ancestral polymorphism is T, Derived polymorphism is I
  VARIANT 45: note = Ancestral polymorphism is P, Derived polymorphism is S
  VARIANT 37: note = Ancestral polymorphism is A, Derived polymorphism is V
  VARIANT 34: note = Ancestral polymorphism is A, Derived polymorphism is T
  VARIANT 31: note = Ancestral polymorphism is E, Derived polymorphism is K
  VARIANT 28: note = Ancestral polymorphism is G, Derived polymorphism is S
  VARIANT 17: note = Ancestral polymorphism is L, Derived polymorphism is M
  VARIANT 14: note = Ancestral polymorphism is L, Derived polymorphism is Q
MTWWPLKDHIYLHLNHLPPEVLKERLPGISETAAIFAGVDVTKEPIPVLPTVHYNMGGIPCPNELPWGGSGYQG

SEQ ID NO: 2741 - protein, 235 aa, Zea mays
  VARIANT 220..235: note = Derived polymorphism lacks residues 220 to 235
  VARIANT 169: note = Ancestral polymorphism is R, Derived polymorphism is C
  VARIANT 62: note = Ancestral polymorphism is A, Derived polymorphism is E
  VARIANT 46: note = Ancestral polymorphism is G, Derived polymorphism is A
  VARIANT 33: note = Ancestral polymorphism is R, Derived polymorphism is C
MAGLAATLPSPAAGASPLLLHCNAAPSVSFRHRRRWQRPAATRHDGRVAQLLLPVARRWLPAAAPPGVNGARGGIAASGSGAGAVAGEAPYRGNEGQGSLWMVFLATAVVVCGSFEFGTCVGYSAPAQAGIVSDIGLSNSEYGVFGSVLTIGAMIGAVTSGSLADILGRKMTMRFAAVVGIFGWLTVYFAKDAMMLYAGRVLLGYCTGVLSYVVNIYSSQYMYLNLHSYVSKPFV

SEQ ID NO: 2742 - protein, 546 aa, Zea mays
  VARIANT 108: note = Ancestral polymorphism is G, Derived polymorphism is R
  VARIANT 100: note = Ancestral polymorphism is A, Derived polymorphism is V
MPPPRLRFARHLCSATASDPAGAPTSSTISNAAALAAAAALRTPRLEPRLLSLVPRAVLLHPDFARLTLSCLLPAVAPSLRFLRALSPHLPGPAPDTAPVNVSPPLPGVDKFLLRLPPHLAADVAELLSSYLRIHLSLRAFNVASCSALRAARPDLVFRFFSAFSSSPEFPGNATTVGCLARAYAAEGRPLDGLGLLRDAARRGSPPPADAVADLIGAFAAEGNFGKVSDTLHLMIATGCTPDKVIYQRVIHGLFRRRMGGEALRVFREIKQRGYDIDGVTYTTVIHGLCEMRLIGVAQQMWDEMVGRGIAPNEYAYCSLVTYYCRVGDLDKARKVYDEMLEKGFKQTTVSCNILIKGFCVHGRVYDALEVFEEMSIKGIKHDVITYDTLINGLFKAGKLDLAMRMYEWLLSSGLEPTSSTFGRLICAMCENGQVHAAVDLIKSMRTKGLEPPVWTNDHIISGFCKINLSDEGMAWLAGMLKDNIRPQRQTFDYLVESLSTSGRLDDVLLVLNIMFKVGFEIGTFACTVLAEKPCTSNVSLLPPTG

SEQ ID NO: 2743 - protein, 245 aa, Zea mays
  VARIANT 53: note = Ancestral polymorphism is P, Derived polymorphism is T
MTGYRSRSPSRSYSPRRRYSRSPPRRKRYDDPRDRYRWAGAGGGGDRRGYGRPLAQSGLLIRNISLTARPEDIRATFEQFGPIKDVYLPRNFHTRELRGFGFVKFRYPEDAAVAKREMHHQVIGGREISIVYAEENRKTPQEMRMRTRTSGRYMDERYTRLSRSPRSRSHSYSPPPSPVRRDFRGRERPDSYSPQYSHSPRPRDSRHHRSDGRSPTPSLDDHKPKATPVNGGHGPAVASRSITQP

SEQ ID NO: 2744 - protein, 432 aa, Zea mays
  VARIANT 156: note = Ancestral polymorphism is P, Derived polymorphism is S
MTKAWRPMLASATKCCAAEDAAVAPDGLARCRPQQSELSRRLASFRRLSSLANSPASAAGTDKDGGSVKQAGEMAGPLQLHSFGLGELRGVTHDFASSFLLGEGGFGAVYKGFVDAGMRPGLAAQPVAVKQLNAAGFQGHREWLAEVIFLGQFRHSHLVRLLGYCCEDEERLLVYEFMPRGSLENHLFRRISATLPWGTRLKVAIGAAKGLAFLHAASTPVIYRDFKASNILLDSDFTAKLSDFGLAKMGPEGEDTHVTTRVMGTHGYAAPEYVQTGHLNVKSDVYSFGVVLLELLTGRRAMEHVRGRSAHADQQLKLVDWTRPYLSGGSRRLRCIMDQRLAGHYSVKGARAVAQLAVQCTAQQPRDRPRMVAVVDALDKLQGLKDMAVTVGLWPATAPVAGRNAISAKIRAEVKGAAGAGSRRRSASSKLP

SEQ ID NO: 2745 - protein, 117 aa, Zea mays
  VARIANT 108: note = Ancestral polymorphism is Q, Derived polymorphism is L
  VARIANT 106: note = Ancestral polymorphism is K, Derived polymorphism is M
  VARIANT 49..117: note = Derived polymorphism lacks residues 49 to 117
  VARIANT 27: note = Ancestral polymorphism is R, Derived polymorphism is W
  VARIANT 26: note = Ancestral polymorphism is C, Derived polymorphism is Y
  VARIANT 23: note = Ancestral polymorphism is P, Derived polymorphism is S
  VARIANT 18: note = Ancestral polymorphism is T, Derived polymorphism is M
  VARIANT 9: note = Ancestral polymorphism is R, Derived polymorphism is Q
MVVVGGRNQAMYALAQCTLDIPPDHCRASSMAPWQSGDGRSAAARWAWQSSGRGAPCDMRWTCSSSTSLATARCCPYIFTDIFNNDLGGPYAFLKPPFVQRSLLYMIQARRKKRFGP

SEQ ID NO: 2746 - protein, 97 aa, Zea mays
  VARIANT 12: note = Ancestral polymorphism is V, Derived polymorphism is I
MAKRLIPSLNRVLVEKLLKPSKSAGGILLPETTKQLNAAKVVAVGPGDRDRDGKLIPVSLSEGDTVLLPEYGGTEVKLAEKEYLLFREHDILGKLEE

SEQ ID NO: 2747 - protein, 368 aa, Zea mays
  VARIANT 352..368: note = Derived polymorphism lacks residues 352 to 368
  VARIANT 349..368: note = Ancestral polymorphism lacks residues 349 to 368
  VARIANT 157: note = Ancestral polymorphism is A, Derived polymorphism is V
MAALPLPVTRAAASDQQQQQGHGGAGAEVWRRAAKALLFLAAVALPCLVLYHRAVVAPGDLFGAAAIPWRRAAADLDSEDGSLERVLTAAAMRRPSDTVILTTLNSAWSEPGSVLDVFLESFRSGESTRELLQHLVIVSLDTAAHARCGQVHRHCFALVTDGVDFSGQKNFMTDGYLRMMWRRVDFLREVLEKGFSFVFTDTDIVWFRNPLPHFYPDGDFQIACDHFTGDPSDLNNAPNGGFAYVRSSAETAEFYRFWYAARERHPGLHDQDVLNAIKRDPYVGELGVRIRFLSTELFGGLCEPSRNLSRVCTMHANCCVGLRRKIGDLNAMLQDWRRYRALPREEKREVSWTVPRNCSLFHTQEERG

SEQ ID NO: 2748 - protein, 670 aa, Zea mays
  VARIANT 253..670: note = Derived polymorphism lacks residues 253 to 670
MCLTSDYRAMAKGGERQFTGLVDVYRKTFRFDGVAGVHNFLAEVPPLLDQPGAMGLCLGKSAAVQEPAVAEDNSVADGAAAGCGDGPPVKAPRTPKQPKFSFYLPSPLQPSSYKGSPANSSAASTPARGGFKRPFPPPSPAKHIRALLARRHGSVKPNEASIPEGGELDLGLDKSFGYSRHFAAKYDLGREVGRGHFGFTCAAKCKKGELKGEDVAVKVLPKAKVRAYPLSLLSFVLDWIFLFPWLLAFFNRSARMTTAIAIEDVRREVRILSSLAGHINLVQFYDAFEDEENVYVVMELCKGGELLDRILARGGKYSEGDAKVIIHQILSVASFCHLQGVVHRDLKPENFLFMSKDENSALKVIDFGLSDFVKPDDRLNDIVGSAYYVAPEVLHRSYGTEADMWSIGVIAYILLCGSRPFWARTESGIFRAVLKAEPSFDEIPWPTLSAEAKDFVRRLLNKDYRKRMTAAQALCHPWIRGTQEVKINLDMIIYRLMRAYISSSSLRKSALRALAKALTTDQLFYLREQFTLLGPNKSGHISLQNMKTALIKNSSGAMNDSRILDFVNSICNIQYGMIDFEEFSAAAISVYQMEGLETWEEHAQQAYELFDKEGNRPIVIEELASELGLGPSISLHVVLKDWIRHSDGNLSFLGFIKLLHGVSSRAITKV

SEQ ID NO: 2749 - protein, 958 aa, Zea mays
  VARIANT 244..958: note = Derived polymorphism lacks residues 244 to 958
  VARIANT 31: note = Ancestral polymorphism is A, Derived polymorphism is G
MEMTSAMELSLEQIRKEAVDLENISMEEVFAFLKCCKEGLSTEEAQKRVLMFGPNKLEERKESKVLKFLMFMWNPLSWVMEMAAVMAIALANGDNRPPDWQDFVGIVVLLVINSTISFVEENNAGSAAEALMANLAPKTKVLRDGQWSEEDAAVLVPGDIISIKLGDIVPADARLLEGDALKIDQSALTGECLPVTKSPGSSVYSGSTCKQGEIEAVVIATGVHTFFGKAAHLVDSTNQVGHFQKVLKAIGNFCIGAIAMGVIVEVVVMYAVQHRRYREGIDNLLVLLIGGIPIAMPTVLSVTMAIGSHKLSLQGAITKRMTAIEEMAGMDVLCSDKTGTLTLNKLSVDRTLVEIFAAGVTKDDVILFAARASRVENQDAIDAAMVGMLGDPKEARDGIEEVHFFPFNPVDKRTALTYIDLADGSWHRVSKGAPEQILALCNCGDDVCNLVHTVIDKYAERGLRSLAVARQQVPEKSKESLGDPWEFVGLLPLLDPPRSDSSDTIKRALDLGVNVKMITGDQLAIAKETGRRLGMGTNMYPSSALLGQSKDEATASVPVDDLIEKADGFAGVFPEHKYEIVKRLQEMKHICGMTGDGVNDAPALKKADIGIAVAGATDAARSASDIVLTQEGLSVIISAVLTSRAIFQRMKNYTIYAVSITIRIVLGFLLIALIWKFDFSPFMILVIAILNDGTIMTIAKDRVKPSPLPDSWKLNEIFATGVVYGTYMAVMTVVFFWAMRSTDFFSNTFHVRSLRGSTEEMMSALYLQVSIISQALIFVTRSRSWCFAERPGFLLCAAFVIAQIVATLIAVWADFGFAHIRGIGWGWAGVIWLYSVVTFVPLDLFKFAIRYVLAGKAWNNLLQNKTAFTTKKNYGGEERMAQWATTQRSLHGLPVTEPEAGGRRSGSFVELSEVAEQARRRAEFARLREKNTLRGQLESSARLRGVDLNAIKSPFYSV

SEQ ID NO: 2750 - protein, 473 aa, Zea mays
  VARIANT 284..473: note = Derived polymorphism lacks residues 284 to 473
  VARIANT 341: note = Ancestral polymorphism is R, Derived polymorphism is I
MAIPPRITAAGGGGRKTRVPPLPPARTLLTAFAAAVALAILCFLSSSPTATLSGSWRSGARSGDKYLYWGSRVDCPGKHCGSCAGLGHQESSLRCALEEALFLGRIFVMPSRMCLSSLHNTKGIIQNGATTKQRWEESSCAMESLYDIDQISRTVPVILDNSKNWHDIVSRSMKLEVGGVAHVQGISRGELKQNSIYSTALIINRTASPLAWFMECKDRKNRSSVMLSYNFLPSMPAEKLRNAANKTSDWAKRELSSRHMPRDIYRFVTCQAYIRFGIIYIAGYDAAPKSVPPFQMKEILGDYDAIHVRRGDLLKNRKDRFGVERSLHPHLDRDTRPEYIRKRIAQWIPPGRTLFIASNERTPGFFSPLSDSALLGFYLYVCYYIKNHFVLTESVCSFIWQQFRYKLAYSSNFSSILEPIIENNYQLFMVERLMMQGAKTFIKTMREFGSDLTLCDDPKKNTKVWQKPVYTDD

SEQ ID NO: 2751 - protein, 332 aa, Zea mays
  VARIANT 238..332: note = Derived polymorphism lacks residues 238 to 332
MMAAFLVERRGAARGGGCGDTTTGRGGVRSMDADMGMSSHAAANKPAPGPAPFLTKTFQLVEDHRTDHVVSWGEDGATFVVWRPPEFARDLLPSYFKHNNFSSFVRQLNTYGFRKIVADRWEFANEFFRKGAKHLLSEIHRRKSSSCSQPPQKLQPPPLPQHQRPYDLSLFFPPPQPPRHPTSGYHVVQEEDHGHGGNKDFLATLSEDNRELRRRNSLLLSELAHMRRLYNDIIYFLQNHVEPVPPPPPGTTTTAASCRLVELGSADDASAAQTWRPRRGDDDEAPVKLFGVRLNDGKKRRAQQVVPLEEKGGGNDQGEGLADGDRKWPWRW

SEQ ID NO: 2752 - protein, 644 aa, Zea mays
  VARIANT 4..644: note = Derived polymorphism lacks residues 4 to 644
MGIGTMARKEKAIVFVSNTYLTKSSLMPELEGLEEVHFYIELVQFIQVRDMLGDGRLIKRRVVDGKGEFPMDCPLHDSLLRVHYKGILLDEPKSVFYDTRADNDGEPLEFCSGEGLVPEGFEMCVRLMLPGEKSVVTCPPDFAYDKFPRPANVPEGAHVQWEIELLGFEMPKDWTGLTFEEIMDEADKIKNTGNRLFKEGKFELAKAKYDKVLREYNHVHPHDDEEGKIFANSRNSLHLNVAFCYQKMGEYRKSIETCNKVLDTNPVHAKALYRQGMSYMLLGEFDDARNDFEKMITVDKSSEPDATAALLKLKQKEQEAEKKARKQFKGLFDKKPGEISEVGVESEGGKDAGDARGSGEATSADRGANTMDSPTRESEVTLEIMVVKMNCPEGSRFSSGRGRGHLLLLNATLHIHTYRWVPTSEGPSPVTTTVHVTGFKKFHGVADNPTEKIVRNLASFMDTRGLPKGLVLGSCTVLEAAGQGALGPLYQLLESTVVSGRGRGMPAQERVILLHFGANSGSHRFALENRAVNEATFRCPDELGWKPQRTPIISSDGNILHARQTTLPLKEISKSLQQMGYDVMPSDDAGRFVCNYVYYHSLKFAEKHGITSLFVHFPLFLAIDEEVQMQFVASLLEVLASLNF

SEQ ID NO: 2753 - protein, 335 aa, Zea mays
  VARIANT 126: note = Ancestral polymorphism is P, Derived polymorphism is L
MAAATAPKTMPSSVFAAALLLLAAAACQASPYYPLELGYYRYTCPQAEAIVKASMEKAIAQNPGNGAAVIRMLFHDCFVEGCDASVLLDPTPFSPTPEKLAAPNNPSLRGFELIDAIKDALEAACPGVVSCADIIAFAARDASCFLSQGKVSFDMPSGRLDGTFSNASESVKFLVPPTSNLSDLASSFAVKGMSLEDLVVLSGAHTVGRSHCSSFVSDRLDVPSDINPALAAFLRTRCPANTTTSDDPTVMQDVVTPNAMDNQYYKNVLSHTVLFTSDAALLTSPETAKLVLDNAKIPGWWEDKFEKAMVKMASLEVKTGHQGQVRKNCRAINHY

SEQ ID NO: 2754 - protein, 337 aa, Zea mays
  VARIANT 21: note = Ancestral polymorphism is A, Derived polymorphism is V
MASKVPAALLSCAFLLLLGAACQAAAGHYSPPSPASCGLKVGYYDHKCPPAEAIVKSVVRAAVRRNPGIGAGLIRMLFHDCFVEGCDASVLLDPTPANPQPEKLGPPNNPSLRGFEVIDAAKAAVERACPGVVSCADIVAFAARDASSFLGGRRVDFDMPAGRLDGRASNASRTLDFLPPPTSSLPELVQSFAAKGLSAEDMVALSGAHTVGRSHCSSFVPDRLAVPSDISASFAASLKGQCPASPSSSDDPTVVQDVVTPDRLDNQYYKNVLAHRVLFTSDASLLTSPATAKLVDDNANVPGWWEDSFKVAMVKMASVEVKTGNSGEIRRNCRLVN

SEQ ID NO: 2755 - protein, 363 aa, Zea mays
  VARIANT 237: note = Ancestral polymorphism is I, Derived polymorphism is V
  VARIANT 330: note = Ancestral polymorphism is R, Derived polymorphism is Q
MASEPVARAVAEEVARWGAMRQTGVSLRYMMEFGARPTERTLLLAAQFLHKELPIRIARRALDLDSLPFGLSTKPAILKVKDWYVESFREIRSFPEVRNQKDELAFTQMIKMIRVRHTNVVPAIALGVQQLKKDLGGPKAFPPGIHEIHQFLDRFYMSRIGIRMLIGQHVALHDPDPEPGVIGLINTKMSPMTVARIASEDARAICMREYGSSPDVDIYGDPGFTFPYVTPHLHLMIFELVKNSLRAVQERYMDSDKLAPPVRIIVADGAEDVTIKISDEGGGIPRSGLSRIFTYLYSTAENPPDLDGHNEGVTMAGYGYGIPISRLYARYFGGDLQIISMEGYGTDAYLHLSRLGDSEEPLP

SEQ ID NO: 2756 - protein, 1034 aa, Zea mays
  VARIANT 100: note = Ancestral polymorphism is R, Derived polymorphism is C
  VARIANT 326..1034: note = Derived polymorphism lacks residues 326 to 1034
MGECAHTAAVATTAKTSVWWNIDKCAVPRGRCNPHRIAHNLIAALAVAGYVGPVSIAAYGDAAQVPPPVLAALSATGICLNHVPAGTVLTLPLLLSAHYRLVEFPLLIESLSRFHLTFAGCKDTSEKRMLVDMLFWAFDNPPPGSYLLISGDEDLSDLLHRLRMKRYDILLVRPPSASSQVLAAAATKVWLWENLTAGELLLPEPPPARSVLGCKLHPNSSDTLKCSNSKVRFGYGKSDCNGKEDSQIRVKPLQKYVKKASKSSATEISQDRVVPAGGVFESSTGRTLSEVDHYSVSSLSSSSSDSTQGAKANTTVPPENRTLSNLSSYRHVLSAHSQAEATIQPVRADKPGISTGCLPRNETLSFGVYNGQCNRMSQHLRYSEVQNKLHSEFTTDSNMGKAVNRHGLKPLQMYVKKTNTTFGSANKPVGSIGVPECPVGKNRIELDKASILASPTSTWSHSSAQKPIASAHLHQMRAPHESILGKKPNISVELHQVKVPHETILDEKSSISVELVRVPHESILSKKPSPSAEHASSRAHDSEVCGINYNPTCQQFKSSEAQNKLHSCSNVGDSSGRLGNEYKTNKEQPYAECINIFTTSASNEINPSTRTFDNSNGSTLRYPKQSLSASSSSKLLQSAKVNGSNLMLSDHISLLADNLHQDGATTIFGKNSTSFQCTAKSRTFVFGASSGQYHQTYQQSQSSLLSEQHNSGTSMEHGHSDSINSHRGSAASPSVEHNGVPFAQTRTFSSGSAFEGLDDICNGFTTLNISECPQGTTETRAQDPPTNGPSMCMLDNYEHPVVFRENRSTFDLDSNPSCYQNHSSDPQSGQPPFSDYIWHQPNLSSDMQSSSELSGDKPRHLPNSTEPKVGIILQALGILKTEKIFPTETNIADCICYGELNLTGFDVKKALELAIRHEAVVMKKLLNDMPLFVAKDESLWKCVNVTNTKSKNPIEELGTVYNYISSPDGRSAMMNSQSRYQAAMILKRSCMQQCALGDILQVLHIVVVRKKWLVPHSSGWQPLSLKRNSGSCNY

SEQ ID NO: 2757 - protein, 570 aa, Zea mays
  VARIANT 2: note = Ancestral polymorphism is A, Derived polymorphism is V
  VARIANT 21: note = Ancestral polymorphism is L, Derived polymorphism is F
  VARIANT 52: note = Ancestral polymorphism is F, Derived polymorphism is S
  VARIANT 183: note = Ancestral polymorphism is L, Derived polymorphism is P
  VARIANT 238: note = Ancestral polymorphism is T, Derived polymorphism is M
  VARIANT 248: note = Ancestral polymorphism is A, Derived polymorphism is V
  VARIANT 279: note = Ancestral polymorphism is P, Derived polymorphism is S
  VARIANT 319: note = Ancestral polymorphism is M, Derived polymorphism is T
  VARIANT 324: note = Ancestral polymorphism is S, Derived polymorphism is L
MAATLLLASATALLALAAAWLWDYVVVRLLWRPRAVAGMFRAQGVRGPPYSFLSGCNREMRRMKAEADDGLRLDVRDHNYLPRVMPHFLAWKQQYGEPFLYWMGPRPRVCLFDYESVRQVLFNKSGHFFKDDAHPTILAMLGKGLVLVEGTDWVRHRRVVNPAFAMDKLKMMTETMVSCAEPLIKRWEQLAASRSSEDGGRGEVQVEFSKQFQDLTADVISHTGFGSSYKEGKEVFHTQKQLLALAMATLLNVQLPGFKQVDLYFFSCLFLVTSNRSLPFLYIQTTVWLIEFFTTSRYLPTKNNRLKWALEKKMKTTLTAIIQSRVASNGRSSGYGDDLLGLMLEAWLTAERGGGERDESSLTMDEIIDECKTFFFAGHETTSHLLTWTMFLLSVYPEWQQRLRDEVLRECGQANPTADTLNKFNEMTMVLLETLRLYGPVMLMLRKPTSDIRLGSLSIPKGNGIAIPVPFLHRDREVWGDNANDFDPLRFQNGVTNAAKTPQALLSFSIGPRACIGQNFAMLEAKSVMAMILKKFSFTLSSSYVHAPVDYITLQPKFGLPIVLRPLPDV

SEQ ID NO: 2758 - protein, 546 aa, Zea mays
  VARIANT 2: note = Ancestral polymorphism is A, Derived polymorphism is V
  VARIANT 91..546: note = Derived polymorphism lacks residues 91 to 546
  VARIANT 116: note = Ancestral polymorphism is L, Derived polymorphism is S
  VARIANT 153: note = Ancestral polymorphism is W, Derived polymorphism is S
MAATLLLASATALLALAAAWFWDYVVVRLLWRPRAVAGMFRAQGVRGPPYSFLSGCNREMRRMKAEADDGLRLDVRDHNYLPRVMPHFLAWKQQYGEPFLYWMGPRPRVCLFDYESVRQVLFNKSGHFFKDDAHPTILAMMGKGLVLVEGTDWVRHRRVVNPAFAMDKLKMMTETMVSCAEPLIKRWEQLAAASRSSEDGGRGEVQVEFSKQFQDLTADVIAHTGFGSSYKEGKEVFHTQKQLLALAMATLLNVQLPGFKQVDLFLFLPLLGHQYLPTKNNRLKWALEKKMKTTLMAIIQLRVASNGRSSGYGNDLLGLMLEAWLTAERGGERDELSLTMDEIIDECKTFFFAGHETTSHLLTWTMFLLSVYPEWQQRLRDEVLRECGQANPTADTLNKFNEMTMVLLETLRLYGPVMLMLRKPTSDIRLGSLSIPKGNGIAIPVPFLHRDREVWGDNANDFDPLRFQNGVTNAAKTPQALLSFSIGPRACIGQNFAMLEAKSVMAMILKKFSFTLSSSYVHAPVDYITLQPKFGLPIVLRPLPDV

SEQ ID NO: 2759 - protein, 526 aa, Zea mays
  VARIANT 2: note = Ancestral polymorphism is V, Derived polymorphism is M
  VARIANT 263: note = Ancestral polymorphism is S, Derived polymorphism is R
MVVAVQLAALLALLLALWRLVWRPHAVARSFARQGIRGPPYTFLAGSLPEAKRLLMAGRRGTAPLDAGCHDIMPVLLPQFHRWVADYGRTLLFWIGPIPAVLSTDLQLIKQVLTDRTGLYQKDFMIPVLKFLFGNGVILINGDDWKRHRKVVLPAFNHETIKSMSAVTAEVTEQMMQQWRGQIHGSEEESAEIDMIHAFNDLTSKVNGRVAFGTSHREVEEVIVLMREMQKLATAATLDAPILWYLPTRRNLHVRRLNKQLRSKIMSIMQARLAADGADRRGGRGGAVSGGGDLLGLLLEAWTPQPQHGNGGETLTTDEVIDECKTFFAAGQETTATLLVWAMFLLAVHPEWQDKVREEVVREFCTSDDGEVPHADVLAKLKLLYMVLLETSRLYPPIVYIQRRAAWDAVLGGIKVPQGTVISIPIAMLHRDKQVWGPDADEFNPMRFEHGLTKAAKDPKALLSFSLGPRVCTGQSFGIVEVQVVMAMILRRFSFSLSPKYVHKPKYLLSLTPKLGMPLIVRNVDG

SEQ ID NO: 2760 - protein, 240 aa, Zea mays
  VARIANT 17..240: note = Derived polymorphism lacks residues 17 to 240
MAKQSCCHKKKLRRGLWSPEEDEKLMNHIAKPRQVWQELQAEVDKLPEARPQEGHILARGGGPHHTPPLLAGKQVPPPSFEGGPMLESVKLAVELDWPVAGDGVTSRPCYLQGGCFDMDALQQHCGSIPPVPVVPSASASSSTLTSMAEAEHCSTNNVAAGGNLPWLELGANAVADAGGHVVGSCYAGALDELRWSEYFDSAFQAAESQQGALQPGQCVYGGKDDVPVHFDVHGGLSNWC

SEQ ID NO: 2761 - protein, 159 aa, Zea mays
  VARIANT 63: note = Ancestral polymorphism is R, Derived polymorphism is L
  VARIANT 54: note = Ancestral polymorphism is E, Derived polymorphism is K
  VARIANT 16: note = Ancestral polymorphism is E, Derived polymorphism is K
MQSLHTLVEGCHPYAEDLWKLVKINKLTFQGVKLCGRCKVPAINEDTGIPSPTEQTETLQTYRWDSGSTVGEFDGHSKRVLSCDFNPTRPFSIVICGEDILANFYEGPPSKFKHSISICVVIAIFSLMFQVKGPYFIAISPSMFQVKGPKSIGALYVTC

SEQ ID NO: 2762 - protein, 108 aa, Zea mays
  VARIANT 65: note = Ancestral polymorphism is A, Derived polymorphism is S
  VARIANT 33: note = Ancestral polymorphism is A, Derived polymorphism is P
  VARIANT 30: note = Ancestral polymorphism is V, Derived polymorphism is L
  VARIANT 14: note = Ancestral polymorphism is S, Derived polymorphism is T
  VARIANT 11: note = Ancestral polymorphism is E, Derived polymorphism is Q
MEAAAAAAGVELGSSKPQIATQAEMAEARVPLAYRDQCAHLLIPLNKCRVAEFYLPWKCEPERHAYEKCQYELVMERMLQMQKIREAQETKVKGGASIGLIPATAKLA

SEQ ID NO: 2763 - protein, 132 aa, Zea mays
  VARIANT 52: note = Ancestral polymorphism is V, Derived polymorphism is E
  VARIANT 23: note = Ancestral polymorphism is M, Derived polymorphism is T
  VARIANT 6: note = Ancestral polymorphism is K, Derived polymorphism is T
MPDSKKIVLKVDVVGDGCKARAMSIIAKFKGVKSMAVDGEGTLTVVGEVDVVRVAKALRKAKFEPRVLSVGPEKQPEAAKKPAAGEEAKKPLPCCTGCSACRPPAPVPAHPFPGAAVVCYEEQAAGNGCVIL

SEQ ID NO: 2764 - protein, 135 aa, Zea mays
  VARIANT 6: note = Ancestral polymorphism is S, Derived polymorphism is T
  VARIANT 21: note = Ancestral polymorphism is R, Derived polymorphism is Q
  VARIANT 23: note = Ancestral polymorphism is G, Derived polymorphism is E
  VARIANT 24: note = Ancestral polymorphism is G, Derived polymorphism is V
  VARIANT 27: note = Ancestral polymorphism is S, Derived polymorphism is L
  VARIANT 32..135: note = Derived polymorphism lacks residues 32 to 135
  VARIANT 38..135: note = Derived polymorphism lacks residues 38 to 135
  VARIANT 101: note = Ancestral polymorphism is P, Derived polymorphism is L
MPRIRSGDLALAAQARKKPRRAGGRVSCSGPRRRARPQYDLPLPSPSVIVPGFPPASASDPHAEAGKLYDLRTPLRASGGLAPAAQARKKPIEPKAVRCVPALDAVLDHDTPFRFLRQVCSFLASFARVISESAT

SEQ ID NO: 2765 - protein, 275 aa, Zea mays
  VARIANT 20..275: note = Derived polymorphism lacks residues 20 to 275
  VARIANT 92: note = Ancestral polymorphism is P, Derived polymorphism is L
  VARIANT 99..275: note = Derived polymorphism lacks residues 99 to 275
  VARIANT 120..275: note = Derived polymorphism lacks residues 120 to 275
  VARIANT 132..275: note = Derived polymorphism lacks residues 132 to 275
MASCRRRRLSGSRTWRCPRRASRRRRRARCCEPRRWRRRARIRESDAGAVPYADFLRLCCDAAGPDAGPSVARALDESGSVIVLEKTVFLRPDMVEQIWKVAGSEVCDCREEPLHEVQLQHRRCHGDEHGLQRSAGRFLLAIRYSDSMQYSRSNLFGMQYSRKRYFVLEDAALRCFKSAPSSKGELSYVSSTNQKYTRGNENVFDAFFCSATRCAGGFFHGVRSLSFGVDLQEIRLMGVLQRIAITYLLTALCEIWIRGDEDVDYGYDLLKRYRY

SEQ ID NO: 2766 - protein, 164 aa, Zea mays
  VARIANT 132..164: note = Derived polymorphism lacks residues 132 to 164
  VARIANT 115..164: note = Derived polymorphism lacks residues 115 to 164
  VARIANT 53..164: note = Derived polymorphism lacks residues 53 to 164
  VARIANT 52: note = Ancestral polymorphism is H, Derived polymorphism is R
  VARIANT 46: note = Ancestral polymorphism is D, Derived polymorphism is A
  VARIANT 33: note = Ancestral polymorphism is S, Derived polymorphism is F
MHCALSYHLREPFGRFGRVKDIYLPKDYYTQQFRGFGFVEYVDLEDASNAKHYMDGQIVLGRKLRVVYAQDVRKSPSAMRLRAIERSGGGPSCVRRSRSRSPGYHDSPRGRSRSRSRSYSAAQHYSRSSSPRPRERSSPADSGSKSASPGASRSPPRQRSPSDG

SEQ ID NO: 2767 - protein, 172 aa, Zea mays
  VARIANT 73: note = Ancestral polymorphism is A, Derived polymorphism is V
  VARIANT 53: note = Ancestral polymorphism is A, Derived polymorphism is V
  VARIANT 8: note = Ancestral polymorphism is T, Derived polymorphism is I
MDVVAAQTKAIAEKISDWTNIVLAYEPVWAIGTGKVHDGLRKWLHSNVSPAVAELTRIIYGGSVNGANCKELAVQPDVDGFLVGGGSLKVNRDRYNDGSIKHSLLKQSSLDLLTIETLGLKKNDSFSRWMSKELEELDAYVVNPSFSQDQLFSILDVSPSCAYIGTNTKVQE

SEQ ID NO: 2768 - protein, 219 aa, Zea mays
  VARIANT 169..219: note = Derived polymorphism lacks residues 169 to 219
  VARIANT 159..219: note = Derived polymorphism lacks residues 159 to 219
  VARIANT 114..219: note = Derived polymorphism lacks residues 114 to 219
  VARIANT 15: note = Ancestral polymorphism is P, Derived polymorphism is T
MGYSICGCWAANSFPTLYYVTIPSLCFLNGISLFPEITNPWFVPFAYVVVAAYSCSLVESLQCGDTAVEWWNTQRMWLFRRITSYLLATIDTICRMLGVTESGFTLTAKVTDPQALERYKKGIMLFGSFSTMFVIITTVALLNLACMMLGVAKVLLCKGAVSLGAMFVQTVLCALIVAINFPVYEAMFVRKDSGRLPASVSVVSLCIVLPFCILLPTKL

SEQ ID NO: 2769 - protein, 167 aa, Zea mays
  VARIANT 146: note = Ancestral polymorphism is E, Derived polymorphism is A
  VARIANT 106: note = Ancestral polymorphism is A, Derived polymorphism is V
  VARIANT 105: note = Ancestral polymorphism is D, Derived polymorphism is V
  VARIANT 94: note = Ancestral polymorphism is R, Derived polymorphism is S
  VARIANT 91: note = Ancestral polymorphism is F, Derived polymorphism is S
  VARIANT 81: note = Ancestral polymorphism is F, Derived polymorphism is L
  VARIANT 78: note = Ancestral polymorphism is D, Derived polymorphism is N
  VARIANT 66: note = Ancestral polymorphism is S, Derived polymorphism is L
  VARIANT 56: note = Ancestral polymorphism is V, Derived polymorphism is A
  VARIANT 54: note = Ancestral polymorphism is F, Derived polymorphism is S
  VARIANT 35: note = Ancestral polymorphism is E, Derived polymorphism is G
  VARIANT 34: note = Ancestral polymorphism is S, Derived polymorphism is G
  VARIANT 31: note = Ancestral polymorphism is A, Derived polymorphism is G
  VARIANT 22: note = Ancestral polymorphism is K, Derived polymorphism is N
  VARIANT 12: note = Ancestral polymorphism is V, Derived polymorphism is L
MTIVVMLLNTDVDVSPIVYAFKNCFDNALNATVSELNFKTIVDGLGVVLYQYPFNVPAYYALILRSLTILEDLALYADPDFKVLAASYPYFAKRLLTDPNPYLRDALIELVFKDGKFRQILIDGNKRKATDVDGKVLPTLVYMAREKRPQEHHHFKPSVMCFVLYKF

SEQ ID NO: 2770 - protein, 151 aa, Zea mays
  VARIANT 132: note = Ancestral polymorphism is A, Derived polymorphism is V
  VARIANT 123: note = Ancestral polymorphism is D, Derived polymorphism is V
  VARIANT 115: note = Ancestral polymorphism is P, Derived polymorphism is L
  VARIANT 98: note = Ancestral polymorphism is A, Derived polymorphism is T
  VARIANT 85: note = Ancestral polymorphism is S, Derived polymorphism is T
  VARIANT 76: note = Ancestral polymorphism is S, Derived polymorphism is Y
  VARIANT 62: note = Ancestral polymorphism is S, Derived polymorphism is G
  VARIANT 59: note = Ancestral polymorphism is A, Derived polymorphism is V
  VARIANT 53: note = Ancestral polymorphism is G, Derived polymorphism is D
  VARIANT 49: note = Ancestral polymorphism is A, Derived polymorphism is T
  VARIANT 41: note = Ancestral polymorphism is C, Derived polymorphism is Y
  VARIANT 32: note = Ancestral polymorphism is M, Derived polymorphism is V
  VARIANT 30: note = Ancestral polymorphism is R, Derived polymorphism is W
  VARIANT 27: note = Ancestral polymorphism is A, Derived polymorphism is E
MLPCLMPINVPGTNYSKGLQARKKLVAMLRQMIADRRSSGCTRDDMLDALLSGNEGTRAKLSDDQIIDLLITLIYSGYETVSTTSMMAVKYLSDNPKALGQIRKEHLDIRKAKSPEDPLDWNDYKSMTFTKAIELPLHSTDASGSSTMYMV

SEQ ID NO: 2771 - protein, 193 aa, Zea mays
  VARIANT 119: note = Ancestral polymorphism is A, Derived polymorphism is V
  VARIANT 117: note = Ancestral polymorphism is T, Derived polymorphism is I
  VARIANT 115: note = Ancestral polymorphism is C, Derived polymorphism is Y
  VARIANT 109: note = Ancestral polymorphism is P, Derived polymorphism is S
  VARIANT 106: note = Ancestral polymorphism is V, Derived polymorphism is A
  VARIANT 101: note = Ancestral polymorphism is A, Derived polymorphism is V
  VARIANT 45: note = Ancestral polymorphism is P, Derived polymorphism is L
  VARIANT 42..193: note = Derived polymorphism lacks residues 42 to 193
MPGCREGSLHFQIWKHEHDRSCSAGLDVRRHCCFEAQLHVLQADPATFTSDLEDAEDFAAWSKEALSQAAAEMQGFSCESDKAWVAQAEMQDKELDIIEMAMYGDVIRPGKQCRCRIVAEVLGPLKDHIYLHLNHLPPEVLKERLPGISETDAIFAGVDVTKEPIPVLPTVHYNMGGIPSPNELPWGGSGYQG

SEQ ID NO: 2772 - protein, 542 aa, Zea mays
  VARIANT 264: note = Ancestral polymorphism is I, Derived polymorphism is R
MATVSLTPQAVFSTESGGALASATILRFPPNFVRQLSTKARRNCSNIGVAQIVAAAWSDCLAARPQSGGGGGRARGVASSHAAAASAAAAASAAADVSAIPNAKVAQPSAVVLAERNLLGSDASLAVHAGERLGRRIATDAITTPVVNTSAYWFNNSQELIDFKEGRHASFEYGRYGNPTTEALEKKMSALEKAESTVFVASGMYAAVAMLSALVPAGGHIVTTTDCYRKTRIYMENELPKRGISVILCYPLSSTCFWNGISARLTVFLSLCYSSAFTMTVIRPADMDALQNALDNNNVSLFFTETPTNPFLRCIDIEHVSNMCHSKGALLCIDSTFASPINQKALTLGADLVIHSATKYIAGHNDVIGGCVSGRDELVSKVRIYHHVVGGVLNPNAAYLILRGMKTLHLRVQCQNDTALRMAQFLEEHPKIARVYYPGLPSHPEHHIAKSQMTGFGGVVSFEVAGDFDATRKFIDSVKIPYHAPSFGGCESIIDQPAIMSYWDSKEQRDIYGIKDNLIRFSIGVEDFEDLKNDLVQALEKI

SEQ ID NO: 2773 - protein, 274 aa, Zea mays
  VARIANT 137..274: note = Derived polymorphism lacks residues 137 to 274
  VARIANT 140: note = Ancestral polymorphism is A, Derived polymorphism is T
  VARIANT 160..274: note = Derived polymorphism lacks residues 160 to 274
  VARIANT 189: note = Ancestral polymorphism is C, Derived polymorphism is Y
  VARIANT 215..274: note = Derived polymorphism lacks residues 215 to 274
  VARIANT 223: note = Ancestral polymorphism is E, Derived polymorphism is K
  VARIANT 234: note = Ancestral polymorphism is A, Derived polymorphism is T
  VARIANT 236: note = Ancestral polymorphism is A, Derived polymorphism is T
  VARIANT 245: note = Ancestral polymorphism is R, Derived polymorphism is L
  VARIANT 247: note = Ancestral polymorphism is Q, Derived polymorphism is K
  VARIANT 252..274: note = Derived polymorphism lacks residues 252 to 274
MKAARGRRWESRTSAPPSIPPTTKLAAYQTRQLRARSATVMPREGDGGIAARQIRLLARERKEGRSGLSRCKSVLVKNNRPCPGLPGKPVHGVAPFPASNSGSPSPDAISTLRQRFGNRADPDHQRLGWRGFLHAAQIQAIPRLGPSFELHKIYLPGNPRVHGCILLNIMRMEFFANSSSRGNVSRSLCVDFLFTNDFKAVKQFFSRLLIHTELYMCNMFAAEFFHDLHEEVMATASRGHGLLIRLQQLEAEFSMVEKAIVSQTGHSNYPHDDG

SEQ ID NO: 2774 - protein, 541 aa, Zea mays
  VARIANT 40..541: note = Derived polymorphism lacks residues 40 to 541
  VARIANT 5..541: note = Derived polymorphism lacks residues 5 to 541
MAGHRNSHGKRQSDFTENGGSKRRNPGDDTYAPGPDDTVYRYLCASRKIGSIIGRGGEIAKQLRTETQAKIRIGESVPGCDERVVTIFSTSRKTNTIDGAEDEVCPAQDALFRVHERLASDEGLGNEDSEEISPQVTVRLLVPSDQIGCIIGKGGQIIQGIRSETGAQIRVLSNDHIPACAISGDELLQISGDTVVVRKALHQVSSRLHNNPSKSQHLLASSLTQPYPGSTHLGGSSTAPVVGITPVIPPYGGYKGDVAGDWPSLYQPRRDESSAKEFSLRLLCAAANVGGVIGKGGGIIKQIRQESGALIKVASSNSDPDDDCIITVSAKEFFEDPVSPTIDAAVRLQPRCSEKSDLESAEQSYTTRLLVSTSRIGCLIGKGGSIITEIRRTSRANVRILSKENVPKVAAEDDEMVQITGGLDVARNALVQIATRLKANFFEREGSLSAFPPVIPYHPLPAGVSDEPKYLGRDTKPVGHYLYSSGFRTSDDTIPSDSYASYGGSQAPGRGYGAYSGYSARSSNSGLSGHSSLHYGKRHGY

SEQ ID NO: 2775 - protein, 381 aa, Zea mays
  VARIANT 8: note = Ancestral polymorphism is S, Derived polymorphism is Y
MYDPFLYSFQVFSAFGYVHKIATFEKAAGFQALIQYTDADTASAAREALDGRSIPSYLLPEHVTSCCLRISFSAHKDLNIKFQSNRSRDYNNPYLPINYSAMDGTLQPAVGSDGRKVEAQGNVLLASIENMQYAVSVDVLHTVFSSFGTVQKIAIFEKNGGTQALIQYPDVNTAAVAKEALEGHCIYDGGYCKLHLSYSRHTDLNVKAHGDKSRDYTIPAGVIQGAPQPPGIQATSPGWQGNLQAAGPYAPPGAPPQNHSANGQVPNWTPGNSGYSPAPGTYPGQMYSSPAQYVASGSFLNTSAATPPQYATSGGFPNTPSTAPSQYAASRGFPNTTPAAPPGAPSQTPHASQQMPHQHGNHSGGGTPGTSQPPLPASYYR

SEQ ID NO: 2776 - protein, 494 aa, Zea mays
  VARIANT 459: note = Ancestral polymorphism is G, Derived polymorphism is E
MPDPTTKLPSPRPRRRRRLFSLCLGTALLALIVSALVHVVAQPPGPAPASARFSVIIDGGSTGTRAHVFAAGPDGRPDLARSTVMRVSPGLSSFAADPARAGESLKPLLDFARDKIGGAVREAEVRLMATAGLRLLEERAQEAILASCRDVLRASGFRFEDAWAKVIPGSDEGVYAWVAANYALGRLGGDPNKTVGIIELGGASAQLTFVSDEVLPPKLSYNYTFGETTYTLYTNSFLNFGQNAAQDSFHEMLRSRGSFKNGTLADPCAPRGYSRNEGASRSTLENQYVNNGTGNFTECISSSQLLLQKGKEKCQYQQCHLGSTFVPELRGYFLGTENLYFTSKFFGLKKSSSLSDFMFAGEQFCNQHLSSLRKRHPNRSDEDFSRYCFSMAYIVALLHDSLGVPLDDKRIEYSNQVGDIQVEWALGAFITLMQNTSLKPLHTTAESTHSNRPLFAVLGMFLLCGVLFVSRWRKPKTKIIYDLEKGRYIITRIS

SEQ ID NO: 2777 - protein, 177 aa, Zea mays
  VARIANT 48..177: note = Derived polymorphism lacks residues 48 to 177
MVSPAKNGSFSSTCEQEITYNRIDNKNGSFGAMDVLLSKRHFPAVPTQVSAAVWNGSGSGCRKWEEDKTEAANGDRGRCEGFSTYPRTYDLIHSNGIFSLYQNKCQFEDILLEMDRILRPEGAVIIRDKVDVLVKVEKIANAMRWKTRLADHEGGPLVPEKILFAVKQYWTVAKTSS

SEQ ID NO: 2778 - protein, 209 aa, Zea mays
  VARIANT 12: note = Ancestral polymorphism is P, Derived polymorphism is L
  VARIANT 24..209: note = Derived polymorphism lacks residues 24 to 209
  VARIANT 64: note = Ancestral polymorphism is S, Derived polymorphism is C
MTPRAPQLRHHPPHLLLAEAVASWHPFHKKPCRSDRSTAPPSSARLPDAETPTPAPSGGASGGSFRWFGLRKRRRRGAGSRSVSGRSSDRRRSGTCSDFHFTCGADGGGGGGGATDSSGEMWASDVGEVRMRDVSMATEFGPAPVSGVGVGGGGVGAAAEAAATDSGYGSEPGYRGDVELGYRDEMDEEDEDGRQQLFWDEVIGGDKRL

SEQ ID NO: 2779 - protein, 139 aa, Zea mays
  VARIANT 12..139: note = Derived polymorphism lacks residues 12 to 139
MVHVSFYRNYGKTFKKPRRPYEKERLDAELKLVGEYGLRCKRELCRVQYALSRIRNAARELLTLDEKNPAVSLRTQLLYLVAQVGRQLVNIPSFMVKLDSEKHIDFSLTSPLGGGEPGRVKRKNQKKASGGGGDDEEEE

SEQ ID NO: 2780 - protein, 367 aa, Zea mays
  VARIANT 190: note = Ancestral polymorphism is K, Derived polymorphism is N
  VARIANT 29: note = Ancestral polymorphism is R, Derived polymorphism is M
MAGAKRGILLVLCLAVVLVALGSGGVEARKRGKQSLGFYELRRGEFSMVVTNWGATILSVRLPDKNGHIDDVVLGYKNIGSYVNDTTYFGALVGRVANRIAGGRFTIRDHAYHTYRNDGNNTLHGGHRGFNQVFWSVRERVTGEFPHITFAYRSYDGEQGFPGNLDVLVTYKIDGDCSYSVTMYARPLDKPTPVNLAQHTYWNLRGHGNGTVLRHAVQIFASAVTPVGRGLIPTGAVTPVAGTPFDFRAPAAPGAHIAEVEGGYDINYVLDGETDGQGVRKVAVVSEADSGRVMELWADQPGLQFYTGNMLKGDEGKGGAVYPKYAGMCLETQDYPDAVHEPAFPAEVYRPGQLYKHYMLYKFSISK

SEQ ID NO: 2781 - protein, 103 aa, Zea mays
  VARIANT 90..103: note = Derived polymorphism lacks residues 90 to 103
  VARIANT 83: note = Ancestral polymorphism is R, Derived polymorphism is L
  VARIANT 74: note = Ancestral polymorphism is A, Derived polymorphism is T
  VARIANT 69: note = Ancestral polymorphism is S, Derived polymorphism is N
  VARIANT 66: note = Ancestral polymorphism is A, Derived polymorphism is V
  VARIANT 48: note = Ancestral polymorphism is A, Derived polymorphism is S
  VARIANT 36: note = Ancestral polymorphism is A, Derived polymorphism is V
  VARIANT 35: note = Ancestral polymorphism is A, Derived polymorphism is E
  VARIANT 29: note = Ancestral polymorphism is P, Derived polymorphism is T
  VARIANT 5: note = Ancestral polymorphism is S, Derived polymorphism is I
MAMPSISHEGFVFFIILFSSARSTSATATAAGGGAAGQSHPFPWLDDAISEPYYFLHLLAFFSYFAARSTALSADDGGDLHDRLLRREIQAVLVFLVLFVVKV

SEQ ID NO: 2782 - protein, 469 aa, Zea mays
  VARIANT 288: note = Ancestral polymorphism is N, Derived polymorphism is I
MELLPLLTWLLLAHAMAYLAWMAAARRRQSRCYLLDYVCHKPREDRKLSTEAAGAVIQRNARLGLTDYRFLLRVIVRSGIGEETYAPRNILEGREDSPTLRDAVDEMDAFFDEAIAELFARTDVAPRDVDVLVFNVSMLSPAPSLSSRIARRYGLREDVAAYNLTGMGCSAGLIALDLARNALRTRPRALALVVSSESIAPNWYSGTDKSMMLANCLFRSGGSAVLVTNDPARRGRAKMELSCLVRANIGASDDAHTCAQQREDAEGRVGISLSKALPKAAVRAFAVNLRRLAPRVLPVAELARFAARLLARRLFPHLQQHSSSGKHKGDTAAPPKINFKAGVDHFCLHPGGTAVIEAVKQSLGLEDEDVEAARMTLHRWGNTSASSLWYVLSYMEAKRRLKVGDRVLMVTFGSGFKCNSCVWEVTGDMADDRGAWADCIHAYPPERLANPYMDKFGWINNVDGDTLMF

SEQ ID NO: 2783 - protein, 260 aa, Zea mays
  VARIANT 112: note = Ancestral polymorphism is P, Derived polymorphism is H
  VARIANT 60: note = Ancestral polymorphism is R, Derived polymorphism is G
  VARIANT 57: note = Ancestral polymorphism is R, Derived polymorphism is P
  VARIANT 46: note = Ancestral polymorphism is L, Derived polymorphism is I
MLQAHDELLHHSLCFAKSLALTVALDLRIPDAIHHHGGGATLLQIIAETGLHPSKLRALGRLMRVLTVTGTFSVQQPPAGSDDDEAVVVYRLTAASRFLVSDEVSTATTLAPFVSLALQPIAASPHALGICAWFRQEQHEPSPYGLAFRQTPTLWEHADDKTLHDWGDDECVKILKNCKQAIPPRDAGGKVIILDVVVGYKQSNIKHQETQVMFDLYMMAVNGVERDEQEWKKIFAEAGFKDYKILPVIGDVSVIIEVYP

SEQ ID NO: 2784 - protein, 375 aa, Zea mays
  VARIANT 347: note = Ancestral polymorphism is K, Derived polymorphism is N
  VARIANT 220: note = Ancestral polymorphism is G, Derived polymorphism is C
  VARIANT 207: note = Ancestral polymorphism is M, Derived polymorphism is T
  VARIANT 153: note = Ancestral polymorphism is W, Derived polymorphism is R
  VARIANT 124: note = Ancestral polymorphism is E, Derived polymorphism is D
MALIMQESSSHDLLQAHDELLHHSLCFAKSLALAVALDLRIPDAIHHHGAGGATLLQILAETALHPSKLRALRRLMRVLTVTGIFSVEQPPAGGGDNSTVHTSDDEAVVVYRLTAASRFLVSDEVSTATLAPFVSLALQPIAACPHALGISAWFRQEQHEPSPYGLAFRQTPTIWEHADDVNALLNKGMAADSRFLMPIVLRECGETFRGIDSLVDVGGGHGGAAAAIAAAFPHLKCSVLDLPHVVAGAPSDGNVHFVAGNMFESIPPATAVFLKKTLHDWGDDECVKILKNCKQAISPRDAGGKVIILDVVVGYKQSNIKHQETQVMFDLYMMAVNGVERDEQEWKKIFIEAGFKDYKILPVIGDVSVIIEVYP

SEQ ID NO: 2785 - protein, 132 aa, Zea mays
  VARIANT 124..132: note = Derived polymorphism lacks residues 124 to 132
  VARIANT 63: note = Ancestral polymorphism is E, Derived polymorphism is K
  VARIANT 57: note = Ancestral polymorphism is L, Derived polymorphism is Q
  VARIANT 27: note = Ancestral polymorphism is W, Derived polymorphism is S
MNVVPFTESGKLKIIYDRGLMGTTHDWCESFSTYPRTYDLLHAWLLFSEIEKQGCSLEDLLIKMDRILRPYGYAIIRDKVDVGTYIKKLLPALRWDDWTFEMRPKKDALTTGDETVLIVRKKLWNHSVQDLS

SEQ ID NO: 2786 - protein, 375 aa, Zea mays
  VARIANT 235: note = Ancestral polymorphism is L, Derived polymorphism is V
  VARIANT 207: note = Ancestral polymorphism is M, Derived polymorphism is T
  VARIANT 153: note = Ancestral polymorphism is W, Derived polymorphism is R
  VARIANT 124: note = Ancestral polymorphism is E, Derived polymorphism is D
  VARIANT 17: note = Ancestral polymorphism is D, Derived polymorphism is E
MALMQESSSQDLLQAHDELLHHSLCFAKSLALAVALDLRIPDAIHHHGAGGATLLQILAETALHPSKLRALRRLMRVLTVTGIFSVVEQPPAGGGDDSTVHTSDDEAVVVYRLTAASRFLVSDDVSTATLAPFVSLALQPIAACPHALGISAWFRQEQHEPSPYGLAFRQTPTIWEHADDVNALLNKGMAADSRFLMPIVLRECGETFRGIDSLVDVGGGHGGAAATIAAAFPHLKCSVLDLPHVVAGAPSDGNVQFVAGNMFESIPPATAVFLKKTLHDWGDDECVKILKNCKQAISPRDAGGKVIILDVVVGYKQSNIKHQETQVMFDLYMMAVNGVERDEQEWKKIFTEAGFKDYKILPVIGDVSVIIEVYP

SEQ ID NO: 2787 - protein, 250 aa, Zea mays
  VARIANT 167: note = Ancestral polymorphism is E, Derived polymorphism is K
  VARIANT 142: note = Ancestral polymorphism is S, Derived polymorphism is Y
  VARIANT 110..250: note = Derived polymorphism lacks residues 110 to 250
  VARIANT 107: note = Ancestral polymorphism is E, Derived polymorphism is K
  VARIANT 105: note = Ancestral polymorphism is V, Derived polymorphism is M
  VARIANT 103: note = Ancestral polymorphism is E, Derived polymorphism is K
  VARIANT 102: note = Ancestral polymorphism is P, Derived polymorphism is S
  VARIANT 87: note = Ancestral polymorphism is R, Derived polymorphism is C
  VARIANT 77: note = Ancestral polymorphism is S, Derived polymorphism is P
  VARIANT 76: note = Ancestral polymorphism is D, Derived polymorphism is G
  VARIANT 67: note = Ancestral polymorphism is L, Derived polymorphism is S
  VARIANT 44: note = Ancestral polymorphism is D, Derived polymorphism is Y
  VARIANT 29: note = Ancestral polymorphism is G, Derived polymorphism is R
  VARIANT 22: note = Ancestral polymorphism is R, Derived polymorphism is H
MASLVASTATDDKGVELDGVLRAKLLEIGIVNGMDVYEWDPSTYKYISVKYDATTVTEARALNKERLQAEDGLRVDSSIPVIVFVGCLEEQKGSYILIATIPEFVGENVQIIVLVCFNLQVVSILSHGTVHDLIVAEKKNCSSGHEKEEDGGIAKFNVPLAHMMFAEADFIIVPSRFEPCGLIQLQGMRYGVIPICSSTGGLVDTVEEGVTGFHMGSFNVESETVDPADVTAVASTVTRALKQYDTPGVP

SEQ ID NO: 2788 - protein, 84 aa, Zea mays
  VARIANT 60: note = Ancestral polymorphism is A, Derived polymorphism is T
  VARIANT 56: note = Ancestral polymorphism is A, Derived polymorphism is V
  VARIANT 46: note = Ancestral polymorphism is A, Derived polymorphism is V
MGAEEAEGTPPPLPATGEPATTARAQPISAAQFLSWKQRKDAEVAARKAEAAEKRADDIASGAAQMNGRELFQHEPWVFDNNIY

SEQ ID NO: 2789 - protein, 137 aa, Zea mays
  VARIANT 80: note = Ancestral polymorphism is G, Derived polymorphism is S
  VARIANT 69: note = Ancestral polymorphism is L, Derived polymorphism is I
  VARIANT 63: note = Ancestral polymorphism is G, Derived polymorphism is E
  VARIANT 41: note = Ancestral polymorphism is T, Derived polymorphism is I
  VARIANT 39: note = Ancestral polymorphism is K, Derived polymorphism is N
  VARIANT 8: note = Ancestral polymorphism is C, Derived polymorphism is F
MAAVHSSCRLCIHIATKIHLKEERTPKFTNHPCSCSTKKGTVYHLFIRERGWFKLESIYMRYGSFTIVITLQSKDIERSGQLTLGALESAVLGKFRSLNHVPVWKDERPPSIRGGDDLKLYRIYPVGLTQHQAFVRF

SEQ ID NO: 2790 - protein, 128 aa, Zea mays
  VARIANT 7: note = Ancestral polymorphism is A, Derived polymorphism is V
  VARIANT 16: note = Ancestral polymorphism is T, Derived polymorphism is M
  VARIANT 36: note = Ancestral polymorphism is C, Derived polymorphism is Y
  VARIANT 45: note = Ancestral polymorphism is D, Derived polymorphism is Y
MLQLLMAAAFSAAPLTLYVPPVRSLSLFVEAMEVVCRDCGPYSHDVVAHFRVGLSRVLAGLAQPISGRDLCLQATVDRSKGNKTEISKSELIQKSAYCRVSGRDMDLVELSAYGNVRRGPDSGGCKIQ

SEQ ID NO: 2791 - protein, 364 aa, Zea mays
  VARIANT 196..364: note = Derived polymorphism lacks residues 196 to 364
  VARIANT 210: note = Ancestral polymorphism is A, Derived polymorphism is T
MTKHGVVIGPEDVAAARHFSFPPPRTAAGGESCRKLAAQVDLGPAVVGSWLDSMKASSPRHRLMAPVPGAADAEHDDWMERHPSALDRFDALAAAAKGKQVAVFLDYDGTLSPIVEDPDRAVMTDEMRDAVRGVAARFPTAIVSGRCRDKVFSFVRLAELYYAGSHGMDIRGPTADANHHHGNGKAEAEAEAVLCQPASEFLPVMQEVYAALVAKVERAIPGAKVEDNKFCLSVHFRCVEEACWAALFEQVRAVLRDHPGLRLTQGRKVLEVRPMIRWDKGKALEFLLHALGFAADADRDDVFPIYVGDDRTDEDAFRVLRARGHGAGILVSRFPKDTSASFTLRDPAEVKEFLRKLVGANDDS

SEQ ID NO: 2792 - protein, 1681 aa, Zea mays
  VARIANT 791..1681: note = Derived polymorphism lacks residues 791 to 1681
  VARIANT 846..1681: note = Derived polymorphism lacks residues 846 to 1681
  VARIANT 900: note = Ancestral polymorphism is T, Derived polymorphism is M
  VARIANT 901..1681: note = Derived polymorphism lacks residues 901 to 1681
MPKVFGTGVFEFRHPRAAEYPLPADAAPATAAAPDKVPASTGGGSITLLDIQRDRLTRVATEHWGTAAAAAAFDADLVRKIYGTELRVEGRGRKTVPLQRVMILEVSQYLENYLWPHFDPVDASFEHVMSIILMVNEKFRENVAAWTCFHDRKDAFKGFLWRVLKLKEEERALNMAEKTNYLLFMINSFQSLEDELVRETILQLVSLKLWNTLSFGRLQMELCLNPELIKKWTKIRRREAKEAKKADQPINPSEMLENKFLRNLIEEFVEILNSKVILSNQDGAEESVLNESFSGQIDDSCVLYCERFMEFLIDMLSQLPTRRFLRPLVADVAVVAKCHLSALYTHEKGRLFAQLVDLLQFYEGFEINDHSGTQLGDDDVLQAHYSRFQAFQLLAFKQVPKLRDFALSSIGSLHKRADLTKKLLVLSDVELQDLVCNKLKLISEKDPCSERRDFLIEVLVAFFEKRQSQKDAVNALPLYPNEQIMWDESLVPSINYSGEGCLALPKLNLQFLTLHDYLLRNFNLFRLESTYEIREDIQEAVPHLHAYINNEGETAFRGWSRMAVPIKGFKITEVKQPNIGEVKPSAVTADVTFSISSYRYQIKSEWDALKEHDVLFLLSIRPSFEPLSPEEAEKSTVPERLGLQYVRGCEVIEIRDEEGALMNDFTGRIKREEWKPPKGEIRTVRVALDTAQYHIDVTETAEKGTENVYGTFNILMRRKPKENNFKAILESIRDLMNETCVVPEWLHNIFLGYGNPSAAQWMNMPDLLEVIDFKDTFLDANHVQQSFPDYQVTFINSDGTKNLHPSPPFKIRLSKKMRESSHALPGNMNSNLTVKSRNNMADGEPQKEKLIVETYIPADPGPYPQDKPKQNSVRFTPTQIGAIISGIQPGLTMVVGPPGTGKTDTAVQILNVLYHNCPSQRTLIITHSNQALNDLFEKIMQNPKVERTFLNFNTTICCMLVCYMTSDTSFFCKRDVPARYLLRLGQGEQELATDLDFSRQGRVNAMLVRRLELLGEVSKLARSLRLPEDVGYTCETAAYFWLLHVYARWEQFLAACAQNQDKPSFVKDRFPFSEFFSDTPQPIFTGESFEMDMHAAKGCFKHLSTIFQELEECRAFELLKSTVERANYLMTKQAKIVAMTCTHAALKRRDFLQLGFKFDNLLMEESAQILEIETFIPMLLQRQEDGHARLKRCILIGDHHQLPPVVKNMAFQKYSHMDQSLFTRFVRLGVPYIELNAQGRARPSIAELYNWRYRELGDLPYVREQAIFHKANAGFSFEYQLVDVPDYKGKGESAPSPWFYQNEGEAEYIVSVYIYMRLIGYPANKISILTTYNGQKLLIRDVINKRCKPWNIEPPNKVTTVDKFQGQQNDFILLSLVRTRFVGHLRDVRRLIVAMSRARLGLYVFCRRSLFEQCYELQPTFQLLLQRSDKLALNLEECTPFTERPLEETGNIHYITGIEDINHLVKFRLEHLRQVQYMQYYAPPANELPQAAPENIADAIPSENGNAGRALNDGNEDMTREENGGATDTVISNRIEEDSVEAKDDMTQEGDKGEVSGKGHMATEDRKGEAQGGADGKLEEANVMSADKMMEEANATSADKMEEANATSADKMEEADATSSDKMEEADATLPDKMEEADATLPDKMEEADATLPDKMEEANAMSPDRMEEKNSDPKDKMDEE

SEQ ID NO: 2793 - protein, 144 aa, Zea mays
  VARIANT 129: note = Ancestral polymorphism is A, Derived polymorphism is T
  VARIANT 128: note = Ancestral polymorphism is T, Derived polymorphism is A
  VARIANT 126: note = Ancestral polymorphism is I, Derived polymorphism is T
  VARIANT 113: note = Ancestral polymorphism is G, Derived polymorphism is R
  VARIANT 99: note = Ancestral polymorphism is R, Derived polymorphism is C
  VARIANT 70..144: note = Derived polymorphism lacks residues 70 to 144
  VARIANT 51: note = Ancestral polymorphism is F, Derived polymorphism is S
  VARIANT 44: note = Ancestral polymorphism is R, Derived polymorphism is L
  VARIANT 43: note = Ancestral polymorphism is A, Derived polymorphism is V
  VARIANT 22: note = Ancestral polymorphism is G, Derived polymorphism is R
MRIREPKTTTLIFASGKMVCTGAKSEADSRLAALRIYPPLQFARIVQKLGSPARFKDFKVQNIVGSCDLKFPIRLEGLALASGLSATYEPEIFPGLVYRMVDPKVVILVFVSGKIVLTGAKVREEICAAFEKIHPMLVQFRKRS

SEQ ID NO: 2794 - protein, 348 aa, Zea mays
  VARIANT 134: note = Ancestral polymorphism is T, Derived polymorphism is K
MERAAPVRSSHTSTADLLAWPQPQGPAPATPSPPRRPGQPSEAIRKVVFGGQVTEEEADSLTKRKPCSAPKWKEMTGSGIFAAGSNGDAGEAAAAAKPARTSSRQVLRLAKPLGTTVLSDSGWASVFCIVMWPTCTVVASSTVSHISFAEDGTDPPKKPTSVAEVAKQRELSGTLQSETDSKTKKQISNAKSKELSGHDIFADTLDSRSNRARNPSNGSTASHAPAKNTNVFAAATNLVPLFPFCCPECYSTNVRLKQQASTFSFGDANTDSTPKTARKITGKKVNDLTGNDIFKGDVPPASAEKHLSTAKLKEITGSNIFADGKEPIRERVGGNRKPPGGESSIALI

SEQ ID NO: 2795 - protein, 274 aa, Zea mays
  VARIANT 116..274: note = Derived polymorphism lacks residues 116 to 274
  VARIANT 123..274: note = Derived polymorphism lacks residues 123 to 274
MERAAPVRSSHTSTAGLLAWPQPDGAASQAPRRPNQPTEEFRKVVFGGQVTEEADGLNKTKMRTTASAPKSKETTGIGMFKAESAAAAVTTASRDRQASQITFSQDGTIPPRKPTSVAGVARQRELSHTVESSGDGKMKRQVSNAKSKELSGHNIFADHEDPSPNRSSSSAAALAHVKNANQVSSFSFGKADMDSTVKTAKKKGSSNKSTDLMNGKAISERDSAPAGKQPLNRAKPKGLSGSSIFADGKASTTGDHAGRRTRQPPGGDSSILLG

SEQ ID NO: 2796 - protein, 316 aa, Zea mays
  VARIANT 110: note = Ancestral polymorphism is T, Derived polymorphism is I
  VARIANT 114: note = Ancestral polymorphism is P, Derived polymorphism is L
MAAVQRLLRAVAPGGSAAAAVRRRMTSLAPEQAPSAAAGFPFAAEQRARRPVAAERNVQWVFLGCPGVGKGTYASRLSRLLGVPHIATGDLVRDELASTGPLATQLNLVIEFDPKFCLGITVYSENHVWLLLAEIVNQGKLVSDEIIINLLSKRLKKGEDQGESGFILDGFPRTVKQAEILDGVTDIDMVVNLKLREDVIVEKCLGRRICGQCGKNFNLACIDVKGENGLPPIYMAPLLPPNNCMSKLITRADDTEEVVRNRLQIYNDMSQPVEGFYREQGKLLEFDLPGGIPESWPKLLQVLNLEDQEELRLAAA

SEQ ID NO: 2797 - protein, 432 aa, Zea mays
  VARIANT 395: note = Ancestral polymorphism is P, Derived polymorphism is L
  VARIANT 254: note = Ancestral polymorphism is L, Derived polymorphism is S
  VARIANT 59: note = Ancestral polymorphism is F, Derived polymorphism is V
  VARIANT 55: note = Ancestral polymorphism is D, Derived polymorphism is Y
  VARIANT 54: note = Ancestral polymorphism is G, Derived polymorphism is R
MSRFGRSGQPENRESFSLLVLNVSFRTTADDLFPLFDRYGKVLDIYIPRDHRTGDPRGFAFVRYNYEDEAQDAIDGLDGMRFDGRALMVQFAKYGPNAEKMWLAAATAAAAVVLRYYRTCLNHGDCARGQNLPHVGLERGGCHAARRQAATAGSAGVHDVEHLDADYRGLRDHTELLGRSVIKSELLVSSDAHRDVDAVQLEAIVVYKQVLRGCLDTTTLAGTCRTPWQGAAEMVQCGRVAPDDGMSTLIGVELQKKIQSQGVVAEAAVQDRAYSIQGPCKTVFYFIASLLECPNVLAICEGIERIIGIETIEGEARAEVGSDMNRPGTEMVIIVAIGLTVLVLIMTGNVTDTVALLYLKAPVIAEVVLLVGHLMKEYLASPEMAALHVLEALDPELWLNITQLLLDSLRHLSSSHHLYFLTKMAFVLVQVE

SEQ ID NO: 2798 - protein, 156 aa, Zea mays
  VARIANT 22..156: note = Derived polymorphism lacks residues 22 to 156
  VARIANT 29: note = Ancestral polymorphism is R, Derived polymorphism is H
  VARIANT 85..156: note = Derived polymorphism lacks residues 85 to 156
  VARIANT 96: note = Ancestral polymorphism is D, Derived polymorphism is N
  VARIANT 109: note = Ancestral polymorphism is G, Derived polymorphism is D
  VARIANT 118: note = Ancestral polymorphism is P, Derived polymorphism is L
MAATLLLASATVLLALAAVWLWDYVVGVHGPPYSFLSGCNHEMRKMKAEADDGLRLDVRDHNYLLRVMPHFLAWKQQYGEPFLYWMGPRPRVCLFDYESVRQVLFNKSGHFFKDDAHPTILAMLGKGLVLVEGTDWVRHRRVVKPSLRHGQAQGDN

SEQ ID NO: 2799 - protein, 191 aa, Zea mays
  VARIANT 109: note = Ancestral polymorphism is E, Derived polymorphism is K
MLAKAVATEAGANFINISMSSITSKANQWFGEGEKYVKAVFSLASKIAPSVIFIDEVDSMLGRRENPGEHEAMHKMKNEFMVNWDGLRTKDKERVLVLGATNRPFDLDEAVIRRFPRRLMVNLPDASNREKILKVILAKEELGSDVDMDSLANMTDGYSGSDLKVWHVLFNDETMQIVAYIEVCMILMVAM

SEQ ID NO: 2800 - protein, 349 aa, Zea mays
  VARIANT 219: note = Ancestral polymorphism is L, Derived polymorphism is Q
  VARIANT 77: note = Ancestral polymorphism is T, Derived polymorphism is A
  VARIANT 75: note = Ancestral polymorphism is A, Derived polymorphism is G
MNFGGNGNATIRCKYCRASLSVIPGERAIQCAQCNCVTRIRRADRIPLARPAHVPPAFQRARGKKRAVLVGITYAGARRGCGDLRGPVNDVKCMRNLLCQRFGFPGECIIMLTDDQRDPFRLPTKENIRMAMHWLVQGCSYGDSLVFHFSGIGAQVADDDGDEADGYDEAICPLDAFQSGPILDDEINEVIVRPLVHGARLHAVVDACYSATVLDLPYQCRMSRNGFWQWEDESPPSGAWKGTSGGHAVLISGYSEGKGNFAMMPDAHASVVGAMTHSFVRTLECQPRGVTYGHLLSSMRAIMKNRGGGCDLQGAIGAPIRTVANFSGVQEPNLSSSETFDIYRKQFVL

SEQ ID NO: 2801 - protein, 378 aa, Zea mays
  VARIANT 236: note = Ancestral polymorphism is S, Derived polymorphism is N
  VARIANT 222: note = Ancestral polymorphism is G, Derived polymorphism is S
MASARPPQAQRTAWCGRCGARLSVAPGARSVRCALCHAVTRVERRPHGLHRAAVGFIRGLIGGLTPPQRPAAALQELPPSSFPRVRGCKKRALLVGISYAGTRYELGGAVNDVNCMSYLLRERFGFPAECILVLTQEDMEPGRVPTRANLMRALRWLVDGASAGDSLVFHFSGHGVQKLDRDGDEADGYDEALCPVDFEDPRGGGGVILDDEINATIVRPLGKGVKLHAIVDTCHSGTILDLPYLCRLSRTGYWQWENQQTARLAASGETKCTSGGLAISISGCGDSQTSQDTTALSGSASTGAMTYSFIKAVESEPGTTYGRLLTAMRATIRDNGGEFGIPGPIGTFFRRVITFSCAQEPQLCASETFDIYRKPFLL

SEQ ID NO: 2802 - protein, 471 aa, Zea mays
  VARIANT 404..471: note = Derived polymorphism lacks residues 404 to 471
  VARIANT 265..471: note = Derived polymorphism lacks residues 265 to 471
  VARIANT 202: note = Ancestral polymorphism is Q, Derived polymorphism is H
  VARIANT 149: note = Ancestral polymorphism is T, Derived polymorphism is M
  VARIANT 140: note = Ancestral polymorphism is G, Derived polymorphism is E
MCSACAGVFYVLRGAGEQVGGGVPWLRQLVRAGRLAGAAEPDGRRHFSHRVQQQLQRREKDLPATGRASFACHDQHSEDHDPRLHEDAQEQQGGGVNPARDNREEDPGKVGLLLETNMRDDMGMTIEDVIEECKVFYFAGMETTSVLLTWTMVVLSMDPEWQDRAREEVTALFGRDGKPEYDGLSRLKVVSTADYFFRPFIQITLVPFVSSSVTMVLYEVLRLYPPATSVVRQTPDRFSEGVSRASKDPGAFLPFGWGPRICIGQNFALLEAKMALCMILQRFEFGLAPSYAHAPHTVITLHPMHDCKNGIAKQAKISMAYSFIHRPLSDEAHRVSTPVVVTCNDQRREVFVAQNIANKKIDRTVAFDKVLGPKSQQQDVFNHAVVPLVSEVDGYNCTIFAYGQTGTGKTYTMEGGGDKALNADLPTDAGVIPSVVKRIFDILEAQSAEYNMKVSFLELYNAELTDLLALQ

SEQ ID NO: 2803 - protein, 172 aa, Zea mays
  VARIANT 42..172: note = Derived polymorphism lacks residues 42 to 172
  VARIANT 104: note = Ancestral polymorphism is A, Derived polymorphism is P
  VARIANT 119: note = Ancestral polymorphism is C, Derived polymorphism is Y
MAAEGKTPSLAEEYSLPPQEVPVEKAAEEKPSSGTESEAAPSTNDETPPSVEDKNGTSEVQDAAENPEAEETNTAAEETPAVEEASETTEEEEAEKPEIKIETAPADFRFPTTNQTRHCFTRYVEYHRCVAAKGEDAPECDKFAKYYRSLCPGEWVDRWNEQRENGTFPGPL

SEQ ID NO: 2804 - protein, 136 aa, Zea mays
  VARIANT 9: note = Ancestral polymorphism is R, Derived polymorphism is S
MARTKQTARKSTGGKAPRKQLATKAARKSAPTTGGVKKPHRYRPGTVALREIRKYQKSTELLIRKLPFQRLVREIAQDFKTDLRFQSHAVLALQEAAEAYLVGLFEDTNLCAIHAKRVTIMPKDIQLARRIRGERA

SEQ ID NO: 2805 - protein, 187 aa, Zea mays
  VARIANT 53: note = Ancestral polymorphism is G, Derived polymorphism is D
MAAPTSPAIPTARPTAPLPTMEDIMASSRAQSMRVCLRTAGPFFRVTATRGEGGEAVELGRAQGGIRPWPGGAVLHLDSMRMTRATLSVPDRPLFGLGMFLGAVAVRHGFDAGCKRAELLAINDTPLYHDKLVRFYMRMGFKAVHEVDGSSISDLGHMLVWGGRGTRMDADIEELLIKWGNRFRLQD

SEQ ID NO: 2806 - protein, 857 aa, Zea mays
  VARIANT 464..857: note = Derived polymorphism lacks residues 464 to 857
MWSSEMGRRSRRTNGMVAEPQTTQLLLHGVIEATILEADLSVTTDGKLQPTKKTLMKKKVFSWIRKLTFCRNQQQLENAIGLGTDGKLYATVDIDKARVGRTRMVPPVHSPMWDESFHLYCAHDASNIIFTVKADNAIGATLIGRAYLPTEGVVAGRKVDLWLPIRDEKRQPLEGGDQIHVQVQFTDVAADPTAGWGAGIGSAAYGGVPYTFFKQRRGCRVRLYEDAHVAGDFAPRVRLADGSFYEPRRCWVDVFDAINRARRMVYIAGWSVNTDVVLVRDPREPSASSESLGELLIRKADEGVAVLMLVWDDRTSVGLGPIKRDGLMATHDQDTASFFRDTRVQCVLCPRNPDKDRSYVQDIETATMFTHHQKTVIVDGGGAPAPETPPGLVSFLGGIDLCDGRYDTQDHPLFRTLGTTHSKDFHQPNFPGASISKGGPREPWHDIHCRVEGPAAWDVLENFEQRWKKQGKGDNLLVALNKAWAEREAAPRGDAESWNVQVFRSIDGGAAAGFPEGSANAPREAAALGLVSGKDHVIERSIQDAYIHAIRRARDFIYIENQYFLGSSYAWRQNDGVTVEDINALHLIPKELSLKIVSKIEAGERFVVYVVVPLWPEGVPESGSVQAILDWQRRTMEMMYKDVTLAIRARGLRADPRDYLTFFCLGNREAPSPGEYVPPEHPDPNTDYERAQQARRFMIYVHAKTMIVDDEYIIVGSANINQRSMDGGRDTEIAMGAYQPGYLATRNRPAKGQVHGFRVSLWQEHLGEAAAAGMGDDLFRPSSLACVRRMNQVAKQHWDMFASDAFQGDLPGHLMAYPVSVLDDDDGRVVATTETFPDTNAKVLGNKSDILPPILTT

SEQ ID NO: 2807 - protein, 214 aa, Zea mays
  VARIANT 186..214: note = Derived polymorphism lacks residues 186 to 214
  VARIANT 173..214: note = Derived polymorphism lacks residues 173 to 214
  VARIANT 152: note = Ancestral polymorphism is R, Derived polymorphism is M
  VARIANT 119..214: note = Derived polymorphism lacks residues 119 to 214
  VARIANT 99..214: note = Derived polymorphism lacks residues 99 to 214
  VARIANT 85..214: note = Derived polymorphism lacks residues 85 to 214
  VARIANT 65: note = Ancestral polymorphism is K, Derived polymorphism is I
  VARIANT 63..214: note = Derived polymorphism lacks residues 63 to 214
  VARIANT 61: note = Ancestral polymorphism is P, Derived polymorphism is L
  VARIANT 54: note = Ancestral polymorphism is V, Derived polymorphism is A
  VARIANT 49: note = Ancestral polymorphism is G, Derived polymorphism is R
  VARIANT 48: note = Ancestral polymorphism is A, Derived polymorphism is V
  VARIANT 47: note = Ancestral polymorphism is A, Derived polymorphism is P
  VARIANT 46..214: note = Derived polymorphism lacks residues 46 to 214
  VARIANT 44: note = Ancestral polymorphism is D, Derived polymorphism is Y
  VARIANT 33: note = Ancestral polymorphism is E, Derived polymorphism is K
  VARIANT 29: note = Ancestral polymorphism is Y, Derived polymorphism is C
  VARIANT 28: note = Ancestral polymorphism is A, Derived polymorphism is T
  VARIANT 24: note = Ancestral polymorphism is A, Derived polymorphism is V
  VARIANT 3: note = Ancestral polymorphism is R, Derived polymorphism is M
MLRENPFSGAVPNVALGQQLTGVAGSLAYLAPEVLLGNYSQKVDVWAAGVLLHVLLMGTLPFQGKSIEAIFDVIKTAELDFHNSQWASVSLLAYDLIGRMLNREVSSRPDAEDVLRHPWVLFYTDCLQKAEFSNLWDTNKTAAPMIHREIVRFGYCESSSSKSSSDNSEERDECGIVDALATTITQVRISEPKRSRLFSLPNGLLPPSRNSLRT

SEQ ID NO: 2808 - protein, 150 aa, Zea mays
  VARIANT 114: note = Ancestral polymorphism is D, Derived polymorphism is V
  VARIANT 45: note = Ancestral polymorphism is V, Derived polymorphism is I
  VARIANT 22: note = Ancestral polymorphism is L, Derived polymorphism is P
MLIILKCSKKSKHVNDNNIVALSNMTMAHFDELEDKTTDYVDLSVQEFALKQPQCGMAYNYYGNLRLYVVANKAELASSIFEIDKIQKMDLEARSLQPSIKASLLAKLREYKSDLNNVKSELKRISAPNARQATREELLESGMADTLAVS

SEQ ID NO: 2809 - protein, 315 aa, Zea mays
  VARIANT 4: note = Ancestral polymorphism is L, Derived polymorphism is S
MEESLRPSFLPSFLPYNQENSSRTWFYRFAQVVVSMGDKVNPWCHCHWHNPAWKSDTESCAGDLHPPDAGHLTADSVALAPILEFPPPYPSRKRPLVLYQKEKRAPVLPAPLPSKGPPPLDPVPELQGSNETDVTDAGAGEETEEGMHENRDEINALLDTDRQSGGAALSVESVASAGAGAGAAPPPAAKKRRLSSCTDKSVVDTASSAARPPERSMEQEQRVELANDRDAQSCCVGEVESGRRFALGEAEAEAAEGDSPDEQRRRRERIQETVAALRNMVPGGIAKDAAAVLDEAICYLQYLKLKVKTLGAVSL

SEQ ID NO: 2810 - protein, 248 aa, Zea mays
  VARIANT 87..248: note = Derived polymorphism lacks residues 87 to 248
  VARIANT 93..248: note = Derived polymorphism lacks residues 93 to 248
  VARIANT 101..248: note = Derived polymorphism lacks residues 101 to 248
  VARIANT 170: note = Ancestral polymorphism is Q, Derived polymorphism is R
  VARIANT 172: note = Ancestral polymorphism is D, Derived polymorphism is H
MAVVEACDPARIDISSKTAAPSERTTQLISGGRHVATPPLPPRAPADACLALLVDRLSLSSVVASRLSRTHKDAPNVLNLSYRVRTQLSGKWQAPPVTLRQLIAACFDRLYTRWLKNSECCYATRVFMCILTSRTQGPFINCLMWKEGVMIFCCFCSEKLKEGEDIYIYQGDKSFCSMECRENFMVDEMEGKGGWKHLFCMGAAWRELIGRKQTLTRFLNVPREKGINWDLLFIQGKKERFVQGGNDF

SEQ ID NO: 2811 - protein, 169 aa, Zea mays
  VARIANT 5: note = Ancestral polymorphism is G, Derived polymorphism is E
  VARIANT 50: note = Ancestral polymorphism is P, Derived polymorphism is L
  VARIANT 58: note = Ancestral polymorphism is H, Derived polymorphism is Y
  VARIANT 63: note = Ancestral polymorphism is P, Derived polymorphism is L
  VARIANT 137: note = Ancestral polymorphism is R, Derived polymorphism is Q
  VARIANT 138: note = Ancestral polymorphism is R, Derived polymorphism is Q
  VARIANT 141: note = Ancestral polymorphism is R, Derived polymorphism is H
MEDVGRDLMLGLGMGVGVRREEEAQRGRRDREVRRELEFTTRSARSSPEPAVGLTLLHGLGLPWPPPPSSETNRHLEASARGFDVNRASSLSAAGAAAEEDEEQDEAGAAAAASSSPNNSASSFPTDFSAQGQRRGRRRLHAKKLRLSKEQSVFLEDSFKEHATLNPSV

SEQ ID NO: 2812 - protein, 202 aa, Zea mays
  VARIANT 45: note = Ancestral polymorphism is E, Derived polymorphism is K
MFSLFYGLWKYVFAKDEFRVLILGVDRAGKTTLLEKLKSIYLKGEGLPPDRVVPTVGLNIGRIEDAKAKLVFWDLGGQVSLRTIWEKYYEEAHAIMYVIDAATASSFEDSKSALEKVIRHEHLRGAPLLIVANKQDLPGAIDEEELAKFLHKELDERPYTFQAVSAYDGRGIKSGIDWLVEQMEKSKRTETLQARAGVAGQI

SEQ ID NO: 2813 - protein, 396 aa, Zea mays
  VARIANT 77: note = Ancestral polymorphism is P, Derived polymorphism is T
  VARIANT 35: note = Ancestral polymorphism is A, Derived polymorphism is S
MDFSTGGSVSGGGGGASDGPAQAERWLEIAEKLLAARDLVGCKRFAERSVEANPLLAGVDELLAVADVLLASQFMGTSGQPDPLAILQLPPGVSPDQAAVSRAFRRLALLLGPSNPHPGAEMALRLVNDAYAFLSDPSRRPPPPADPATGTPYSSQYPAAAAPASDTPEFWTACPFCCYVHQYPRSLIGRALKCPNAGCRRGFVASELPTPPTVVPGTEMYHCAWGFFPLGFPNAADLGANWKPFYKMFPWNTAPSGQGGGGRSHGNHGGRQPQNDSARGGSSRGRIKKTTARKKVGVGLRRRSLGVESGIDSSMLGQEGWAGDENAGDGRAEEVRRININEAAHATDGTGRVNVSGAGGVEDIGNFHIDVDASEDILGNLHNMHFLRVDNLGRMI

SEQ ID NO: 2814 - protein, 428 aa, Zea mays
  VARIANT 259: note = Ancestral polymorphism is K, Derived polymorphism is N
  VARIANT 326: note = Ancestral polymorphism is S, Derived polymorphism is L
MASYSSRRPCNTCSTKAMAGSVVGEPVVLGQRVTVLTVDGGGVRGLIPGTILAFLEARLQELDGPEARLADYFDYIAGTSTGGLITAMLTAPGKDKRPLYAAKDINHFYMQNCPRIFPQKSRLAAAMSALRKPKYNGKCMRSLIRSILGETRVSETLTNVIIPAFDIRLLQPIIFSTYDAKSTPLKNALLSDVCIGTSAAPTYLPAHYFQTEDANGKEREYNLIDGGVAANNPTMVAMTQITKKMLASKDKAEELYPVKPSNCRRFLVLSIGTGSTSEQGLYTARQCSRWGICRWLRNNGMAPIIDIFMAASSDLVDIHVAAMFQSLHSDGDYLRIQDNSLRGAAATVDAATPENMRTLVGIGERMLAQRVSRVNVETGRYEPVTGEGSNADALGGLARQLSEERRTRLARRVSAINPRGSRCASYDI

SEQ ID NO: 2815 - protein, 225 aa, Zea mays
  VARIANT 151..225: note = Derived polymorphism lacks residues 151 to 225
  VARIANT 152: note = Ancestral polymorphism is R, Derived polymorphism is C
MAGAISHHALAFSQSHWCSAKNSRFGKRTGNARLVYLKGRCGSGSRKLGLMWASSSQSSVMEPTHLPSDGNSSHTPKKSSESALILIWHGESLWNEKNLFPGCIDVPLTPKGVEEAIEAGKRICNIPIDVIYTSSLICAQMTAMLAMMQHRRKKVCVFPLKFQYGELQGLNKQETVDRFGKEQVHEWRRSYDIPPPNGESLEKCAERAVAYFKDQAHLARPLYTN

SEQ ID NO: 2816 - protein, 233 aa, Zea mays
  VARIANT 140..233: note = Derived polymorphism lacks residues 140 to 233
  VARIANT 121..233: note = Derived polymorphism lacks residues 121 to 233
  VARIANT 106: note = Ancestral polymorphism is E, Derived polymorphism is K
  VARIANT 79: note = Ancestral polymorphism is G, Derived polymorphism is R
  VARIANT 65..233: note = Derived polymorphism lacks residues 65 to 233
  VARIANT 17..233: note = Derived polymorphism lacks residues 17 to 233
MTSKGHAASLLRPLRSRPERRRRPSHLPLSRRTPRWPTRAALLQLCPLVRADVEFRPEDADMSNREFLYHILEEVIKVGATTLNIPDTVEYTLPYEFGKLISDIKENTLRIENAIISTHCQNGLGLATANTLAGAHTGARLLEVTINGIGERAGNASLEEVVMAIKCRQELLDGLYTGINSQHITLTSKMVQEHNGLHVQPHEAIVGANAFAHESGIHQDGMLKYKGTYEIIS

SEQ ID NO: 2817 - protein, 443 aa, Zea mays
  VARIANT 35: note = Ancestral polymorphism is R, Derived polymorphism is I
  VARIANT 38..443: note = Ancestral polymorphism lacks residues 38 to 443
  VARIANT 287..443: note = Derived polymorphism lacks residues 287 to 443
MASDGIGPREGTAIIVVLAPFGTSDSLIYCEVHTRWFCFVLQSVTFSSLLTDVCVVGVARTPMGGFLGALSPLPATKLGSIVIQAALERANVDPALVQEVYFGNVLSANLGQAPARQAALGAGIPNSVVCTTVNKVCASGMKATMFAAQSIQLGINDIVVAGGMESMSNAPKYIAEARKGSRFGHDTLVDAMLKDGLWDVYNDCAMGMCAELCADNHALTREDQDAFAIQSNERGIAARDSGAFAWEIIPVQVPVGRGKPPTLIERDESLDKFDPVKLKKLRPSFKENGGTVTAGNASSISDGAAALVLVSGQKAQELGLQVLARIKGYADAAQAPELFTTTPALAIPKAIANAGLESSRVDFYEINEAFSAVALANQKLLGIPSEKINVHGGAVSLGHPLGCSGARILVTLIGVLRAKSGKIGVAGVCNGGGGASALVLELA

SEQ ID NO: 2818 - protein, 134 aa, Zea mays
  VARIANT 34: note = Ancestral polymorphism is C, Derived polymorphism is Y
MGKGTGSFGKRRNKTHTLCIRCGRRSFHLQKSTCSSCGYPAARIRKCKIRLPAFFLSLSLRPSAPLLDLVNFSVYPLQFVISCSVAYNWSVKAIRRKTTGTGRMRYMRHVPRRFKSNFREGTEAAPKKSAAAAN

SEQ ID NO: 2819 - protein, 482 aa, Zea mays
  VARIANT 114: note = Ancestral polymorphism is F, Derived polymorphism is S
  VARIANT 248: note = Ancestral polymorphism is G, Derived polymorphism is R
MEMHADVDGCSVPLAVLLKRELCNQKVERPDILFGEANKSKKGEDFTLLVPRCHRTPGGSGGGENAGDDDTISVFASSSMMGRPGFAVCWHRGTWGHMSASILLLLIVLTLYHFGGQKTTAAIYTRENLISSVLAAIPPNLTSEEWKAALPRALVAGFVKTDKDFQGKGIINGMPAARSGTTVTFVIIDGWVVTVASVGDSRCILESAEGSIYFLSADHRLDANEEEVERVTASGGEVGRINIAGGAGIGPLRCWPGGLCLSRSIGDIDVGEFIVPVPHVKQVKLSNAGGRLVIASDGVWDALHFQEALNYTRGLPAEAAANRIVKEAVTSKGLRDDTTCIVVDILPPEKLSPPLKRPGKGVIKALFRRRPSDEMSEDQMDRGCLETDVVEEIYEEGSAMLARRLNINYPEGNMFKLHDCAVCQLEMKPGEGTSVHGNMPKHSRVDPWGGPFLCSSCQLKKEAMEGKLHSRNSQSAVQPVPK

SEQ ID NO: 2820 - protein, 213 aa, Zea mays
  VARIANT 136: note = Ancestral polymorphism is A, Derived polymorphism is T
  VARIANT 106: note = Ancestral polymorphism is M, Derived polymorphism is I
  VARIANT 96: note = Ancestral polymorphism is M, Derived polymorphism is T
  VARIANT 67: note = Ancestral polymorphism is R, Derived polymorphism is S
MLYITFLEESFVNQLYSSKGEMNSAESFYATPGAWQKSSYSGNGRNTKYDEVVPTSSRYSININLSRFFFLCMKLFFLYFKQNIRDMDIGGLSRLTEMELIIWMMMHQLMVQDKREILVTMQGKGIPGGQLLSVCASMGIRFLGENHQTRTSWMGRLKVARNKEEGLAKTSKSMLIRPRRSVILMGKLRGQWDWFMQANKFVRIAVMEVGRCI

SEQ ID NO: 2821 - protein, 1821 aa, Zea mays
  VARIANT 1077..1821: note = Derived polymorphism lacks residues 1077 to 1821
  VARIANT 1033..1821: note = Derived polymorphism lacks residues 1033 to 1821
  VARIANT 916..1821: note = Derived polymorphism lacks residues 916 to 1821
  VARIANT 843..1821: note = Derived polymorphism lacks residues 843 to 1821
MASPPEREVAALESCFRALSAADAVPAVVDCVLASSASSSPSQLFHALLRSFPPSQREQGLQAQSDRHAAICHAAALRHLLAQLDSPPKVREALRLLLWRVFLPLLQDIIEPTHPAHFDLVIEMMCNAVSDTGCWDLLGATIVSFCIRSSVVAMGLSAADANSILYQSIMEADFPAETLSCLLPLSNSSSVLASLLVDMLERRRTIPTSQEGAADLAALVQNLTWDLAKLVLKMFTHAQEYRSCATRVLLQPVLISLTDVSSVTVSFGAVQHKLSRFGFLECIWNSCISLFPLGPGERLDAYRILSVYFSTLKSGHQAAVLGVGIVQEFDLKNVSEFWDELRRGLVDKDSLVRKQAFYVLTISLSIFTSSSGNDSCQHFSSRSPAALPAQIKANAGETKRERWANKEAKSLGVGEMDQSGENCSNGQDRWKVFLLLYEMLQEYGTHLVEAAWTHHVVRLFECTLQNDYLNHTSCGAFHAQMESWERILYWMAVLWERGFSHENPQVRCLVMQSFLDIAWERYKVCTHIIPRGFVLGPLIRGLNDVVHHKDFGIGGAYSSKTIKDAQRFFRTYTHNLARCDRIHLVWSLASAAKQDSFGRAGLMTLASCVASCTRQSETNDVPCAISGKAVTKCDGCVPTEVRPTDLLDVLWILSERSKQHFNPKYRLKVCEQVIQVATSLINATEIPLNQLLHFIATIPREFTDYIGPLRVVVQKWFFQKEECSPGDTLLSKLIDFSATFVSQKRNEGSNVFDDEDVDAWEAEARRWARTLLLVTEEEEHLKRIFRFLEAYGYKLSEQCPSGDFIPIKFFIIVLSFIEELELRQRKLVCRSNTILRGSDTLNGLVLDDLNKMFTESLLLILENMVAFSKLSCSIFWLDVDNKDLPPSIKGKLGGPSQRRLATSITSSVLQGIWSMRCVSSVASWCNPYNSDDSVSSAFSVLWDFYLNVTHHSTIANESFSFFPLYKIGAELHLAAYEALAYVLAVLSTASSTQFLDFVEAKQTDQAHKFSLDILVTTFLDNINHLLTEGTLTRSRRAVLMTWKWLCMDSLLSISSCYSDNESQMKRLEPLFSDSTLRCIFLDIIESLENTGENSVLSILRCVRSVLRLLHLNEGNTIFSSLGISYEKMHQNVNIISVSIDSPIIAIQYLFISVQMMMQLAKSSWILHLNCNKRRVAPIAALLSAVLHPAIFCNLEMHQTNEKGPGPLKWFVENLLNEGSKSPRTIRLAALHLSGLWLMYPKTLRFYMEELKLLSLYGSVAFDEDFEAELSENHEARFEVSMLAQSPDREFTEVFINTELYARVSVAVLFHQLWKQIKEHSILETEEALECGKLFLLELLDSAVNSKDLSKELYKKYSSVHRRKVRVWQMICVLSHYVEDDIVGEVTSSIHICLYRNNLPAVRQYLETFAILLYLKFPTLAEEQLIPIFHDKGMRQQALSSYVFIAANVILHSRQSVQIYHLNQLLPPILPFLTSHHHSLRGFTQLLVHSVLSRLWPTLHPETSEDAVFERRCFQELKDYLAENSDCVRLRVSIEGFLDVFDPNASGTPPGIFSARPEDVREDLRQAIANDTVTIKNEDLAVGEHHKSDESVSEMVKTGQEVLDFQKKITPHRGDSEQALNLNTRGHSGVGDEYISRIISEMEEDDQVFDLALEARLHAAETIKQSRQELIVVASLVERIPNLAGLTRTCEVFRAAGLVVADKSVLQDKQFRLISVTAEKWLPVTEVPVDSVKAYLERKRGDGYSVIGLEQTANSMPLDRFGFPDRTVLVLGREKEGIPVDIIHILDACVEIPQLGVVRSLNVHVSGAIAVWEYTRQQRNQR

SEQ ID NO: 2822 - protein, 589 aa, Zea mays
  VARIANT 170: note = Ancestral polymorphism is F, Derived polymorphism is S
MWHEARRSERKVHDLMDAARRRAQRRAVYLARRRGDPQQALQVSGTRCRVHRDDALYQATEDQQGLCVPNPLSPSLLSVRIQWNGKQDVLIDRFDGRALLDFIRDSSSRPFRVQGKSEEEEELEEFVNFERYRDLIKHRRRGCRGKSGLNDVVNSVMHTWNTYFNRLLLFVLVSGRPQSSQPPASKGAYSQVGYSYKGDGNEESEDLDSDDDDEEEEVDDDDKDFSSDDSSDERMESIAKEFGIKRYNWLVYMDKKNKEQEKRQKEIVKGDPSIKKMSRRERRKASQIEREKEREAARSVGRVSYRDPYREQRRSPSYEAYSRGRRSRSRSRSRSPSHSRRHGRGIHAESNYWSKQKAPRVEYITEFGGSDDTSEPKVSGISPPSSPIRIDIPNRSGNSTFNICKYTLGELFSDGAYYLNPGVLKMTMLSGGQILEALHSDPASSLSVEQERTAKLLKPSPSTSSALAKLSKVASGGTGKTPQTEKKETPQERLKRIMSKQLNKQIKKDTAAEIAKKREQERQRQEKLAEVGRYKRRSRSRSLSRSPPRRRRYSRSRSRSRSPRRYRSRSLSSSRSPSRSPRYRSRSRH

SEQ ID NO: 2823 - protein, 378 aa, Zea mays
  VARIANT 249: note = Ancestral polymorphism is P, Derived polymorphism is L
MVDVDRRPSHPHGLPRPPSHAAGLRRLSTRASAPSSPAPPSPSASAPSPTALLAHLAAAGVAVLPGLSATEFALAEAALGGVQLPPDLRELLALGLPSGDGFPDYRTPAGLRLLRFAAQEVPAAVAATLPLAPGRRAGRAAPPPLVPLCGRHYVPATPCLAGNPVFYVSDSGVTFAGANAADFLLRAFAAEPPPGAPLRRQLSAPVPPPSGAPPSTARRSLDSVTGRAPRWIEFWTDAAAAGDRFLEVPTGATSAAASSAAPEWLRPSLEEAASMLRRGGWGLCEVEEMVTGEGPSGAGEVNVVALALTVDRCCRDLKSGGWGAEEVVEMLGALLGPRKPRRAVAALPPDVAARMGRLAEAVSRAVGSHAKAKPPRPS

SEQ ID NO: 2824 - protein, 680 aa, Zea mays
  VARIANT 11: note = Ancestral polymorphism is I, Derived polymorphism is T
  VARIANT 146..680: note = Derived polymorphism lacks residues 146 to 680
  VARIANT 222..680: note = Derived polymorphism lacks residues 222 to 680
  VARIANT 268..680: note = Derived polymorphism lacks residues 268 to 680
MPSTAEDFPAIRKLGKLFRLTEVYLWDDSYGAGPHDGQKNGRSAEAALVDSHTDKTCNEASNSTDKGHFFVEDLELVNLMGSLGLPVSFSTSKVNKNTCNKGKKKGRQAPLKAANTQINDAVRICINTEDRENSVESLDAMEQTHSCNLFVTPLGQNEPSRDDTDKRLREDSSCVEEQEESGCSTIYSAGKAPGCDAKNHLTELGAFELSDNLANSAKEEYSIQENQAYESVLLDSEEMSRNDCVDDESTHSCVGIYQDERVSTRGDQTSEETLSVPHDYNDVGREASLSLAEPSSIDEHAQSSANNFYYDYGEWRVIWDPFYNRYYFYNIQTQESTWCPPEGLEDFASYCSPDTTKELAELGSQCSSMAPQENNLATHVNHLEAQEQDHCIHDLSDIPVEKPIYQSMITTSDKAQHTENKYSDSTTTVLEMNQEVASTKTKKRVRRSRSCNFSLQTAKLCLDHSCQDMAGNVSNDIIKYWAQRYSLFSLFDSGIKMDEVGWFSVTPEPIAKHHASRVGAGVMIDCFTGVGGNAIQFAKKCKHVIAVDIDPQKIDCAHHNASIYGVNDHIDFIVGDFIHIAPHLKGETAFMSPPWGGPDYAKVDVYDMKSMLIPCDGYSLFKLGTMIASRVVMFLPRNIDLNQLADMSLSVDPPWAVEVEKNFLNGKLKAITAYFEEQDR

SEQ ID NO: 2825 - protein, 250 aa, Zea mays
  VARIANT 86: note = Ancestral polymorphism is C, Derived polymorphism is Y
MAVTGTSVAAAATMLAAAAAIFITFVICFYLFLCAKRYRGAAPTIGGDRARPRFVFAGGAGCHGGLDEAAIAALPREEAAAAGGDCAVCIGELAAGEAARVLPRCGHAFHVECVDMWLRSHSTCPLCRRRAVAGDDAAPRAPEADPDSPNFPTNVLFFGSQDGAVSTRGAGAAPSQPVAAAGPIAGVAAVVEAASVAALRRLLGCGGATAAPPPAQQQQQQQPQNEDGDLESGLGGGGGETSGSPPAKPQ

SEQ ID NO: 2826 - protein, 376 aa, Zea mays
  VARIANT 64: note = Ancestral polymorphism is E, Derived polymorphism is D
  VARIANT 65: note = Ancestral polymorphism is G, Derived polymorphism is S
  VARIANT 120..376: note = Derived polymorphism lacks residues 120 to 376
MGCFGCFAPEVDEDLRPSKHDDSSGADARRKVAPDVASGYAHSFTFKDLLVATGYFNEANFIGEGGFGKVYKGKINGQMVAVKQLARDGVQGRNEFLVEVLMLTVLNHRNLVSLVGFCAQGDERLLVYEYMPFGSLESHLFDVPLGKKPLDWNTRVRIAVGVAEGVSYLHNVADPPVIYRDMKAANILLGEDFSPRLSDFGLAKVGPVGDRTHVSTRVMGTYGYCAPDYVVSGKLTMKSDIYSFGVLLLELITGRRIYDASRPKPEQSLLTWSRPFLHDKRKFYRLADPALLGCYPSSALNQLVVISIMCLQDQPHVRPIISDVVIGLNHVASQPYTAERPPPASVSSPVGSGSPQLVRTPSRRRGGTGRRSAQCA

SEQ ID NO: 2827 - protein, 375 aa, Zea mays
  VARIANT 67..375: note = Derived polymorphism lacks residues 67 to 375
  VARIANT 173: note = Ancestral polymorphism is G, Derived polymorphism is S
  VARIANT 250: note = Ancestral polymorphism is D, Derived polymorphism is Y
MRNCCGSADADVNPPSRPPTEGPLPPPKPSDGGGAKQEKGGGDGPDQCPGLGRVLEAPRLREFTLAELRVATRGLKPEMVLGEGGFGPVYKGWVDERTLNPAKSNAGVIVAVKKLNPESFRGLQEWQDRELLLVVYEFMSNGSLENHLFRRGGNLEALSWSRRLKIATGAARGLAFLHSSEKQVIHRDFKASNILLDSTCQDFTAKLSDFGLAKNGPSAGTSHVTTRVMVAYGYAAPEYVATGQLYVKSDVYGFGVVLLELLTGLRAHDLNRPTHQHSLVEWARPYLSAGAGKLKSLMDERMDGQYHTKAALSGSPGSPASASTATARAALPWTTSSPRSRTSRPCSRGAVGQRDLPPRPGARRSSPHHDFSRPC

SEQ ID NO: 2828 - protein, 942 aa, Zea mays
  VARIANT 854: note = Ancestral polymorphism is R, Derived polymorphism is W
  VARIANT 744..942: note = Derived polymorphism lacks residues 744 to 942
MEQAPQTHGGGGLLACGVMEDVAVGDLDLMEELFMAAPGFDFSDFSQPGAGGESPGVCFSPLFDICSTTTTATPPPPPPSGDDNRDQPTPPRRGWVFQPRLEVDATVKERLRRALERIASLSQTQPGELLAQVWVPTVIGDRQVLTTCGQPFWLDCRNERLANYRTVSMKYQFSADETARTDLGMPGRVFVGRVPEWTPDVRYFSTEEYPRVHHAQYFDIRGSVALPIFEPRSRVCLGVVELVMTTEKVNYNAEIQNICSALKEVDLRSSDVSSDSRAKVTDTSYRAIIPEIVDVLRTVCETHKLPLAQTWIPCICQAKRGSRHTDEKLKYCVSTLDEACYVRDLNVNGFHEACSEHHLFRGEGVVGRAFATNEPCFSEDITASSKIQYPLSHHAKLFSLRAAVAIRLRSISTGSLDYVLEFFLPVDCIEIEEQRAMLNSLSITIQQTCYTLRVVSLKELVDEGSIETSALTPPEYDKSMHENIDEVCSGIGVPARTASLETSEEVSSWIASLVCAQNKGVKEMDGDLPFGFSKQEDEGFSVTAGWHTSPVIEPEGSIFSGFKQHEEYKVKEVTCLRDPSSSNLEKTVEKRRTKMEKTVSLEELRKHFAGSLKEAAKNLGVCPTTLKRICRQHGINRWPSRKIKKVGHSLKKLQMVIDSVHGSEGTVQLSSLYENFTKTTWSERELQGDATYPLSEEKGPLEPSVPDRYCEGRFTSHTSGSNSLSPSCSQSSNSSHGCSSGSKSQQHVSAPQLAVKKEVFMEENQSSTLLKAASHAELQMLPEERLVTLPRSHSQVLLSEQKPVENITGMQMSKPDSLKIKAMYGEERCIFRLQPSWGFEKLKEEILKRFGIAREVYVDLKYLDDESEWVLLTCNADLLECIDVYKSSSTQTVRILVHSSDHKLHTVFDITEDGTSVPLVQFVNSTGRRVESVGICRYEALD

SEQ ID NO: 2829 - protein, 73 aa, Zea mays
  VARIANT 26: note = Ancestral polymorphism is S, Derived polymorphism is L
MAVNAQASAAAAAATKAGVVAAADASGATNNKTKQDKFWMRDPKTGCWIPENRFEEVDVVDLRNRLIHVHHHN

SEQ ID NO: 2830 - protein, 197 aa, Zea mays
  VARIANT 147: note = Ancestral polymorphism is S, Derived polymorphism is C
MARKLEIPQWKHDGLPSPTSPLDRASPRGWRHRDAVGGVGLGILAALEAEGPLPGAGAAAAPRVSIPRRAARLEVSELACSGRCATSLCGGPVSGRAGGGGGAAFRVAEFLSCCDMCRRALDGKDVFMYRGERAFCSMECRYHAIVSDEFREAEEEKERKRRAAAADVPRKSAAEMVAGSPCSGGGQIFFTTGIVVA

SEQ ID NO: 2831 - protein, 174 aa, Zea mays
  VARIANT 31: note = Ancestral polymorphism is G, Derived polymorphism is R
  VARIANT 47: note = Ancestral polymorphism is W, Derived polymorphism is R
  VARIANT 62: note = Ancestral polymorphism is P, Derived polymorphism is H
MVGSQYDDDDDDNVVVGRRQTRWYAVTGGRGFMARHLVAALLRSGEWRVRVTDLAPTLALGHGETEGILSDALRDGRAVYASVDVCNLDQLTKAFEGVDVVFHTAAADPSKNNLQLHYKRLTWRVRTKNVIDACKICKVKRLIHTSTSAVVFDGVHGLFDADESLPYPDKVILP

SEQ ID NO: 2832 - protein, 221 aa, Zea mays
  VARIANT 55: note = Ancestral polymorphism is T, Derived polymorphism is I
  VARIANT 151: note = Ancestral polymorphism is W, Derived polymorphism is L
MDQVSNHKRQFPDAYAQTKAEAEKLVIKANGINGLLTCCIRPGSMFGPGDIMMPTLDRYGWSNVTIGEGKNYDDFVYVENVVHGHLCADKTLSTIEGARTSGGKAYFITNMEPMNMWDFLYLVQEELGYKRIFKIRVPIIVIKPASYLIELAYRAVFSHFGTCQPQILTPARIRYVTLNRTFSCNKAVEELGYKPIVTLQDGLKKAVKSYIQLRDKDLPKI

SEQ ID NO: 2833 - protein, 552 aa, Zea mays
  VARIANT 302..552: note = Derived polymorphism lacks residues 302 to 552
MEAVRGDGRWCVVTGGRGFAARHLVTMLLRSGEWRVRVADLGPAITLDRDEEEGFLGAALREGQAVYVSADLRDKAQVARAFEGAEVVFHMAAPDSSINNFHLHYGVNVDGTKNVIDTCIRCKVKRLIYTSSPSVVFDGVHGIFNADESMPYPDKFNDSYSETKADAEKLVMRANGREGLLTCCIRPSSIFGPGDKLMVPSLVAAARAGKSKYIIGDGNNYYDFTYVENVAYGHVCAEKTLSSEDGAKIAAGKTYFITNMEPIKFWEFMSLILEGLGYERPSVKIPVSVMMPVAHVVEWTYQKFAKYGMKVPQLTPSRIRLLSCNRTFSCSRAKEQLGYEPLVSLKDGVKRTVESYSHLQAQNHRSISKASIFLGNGNLAKTVLWEDAKQTVTVLLLLAVIYYHLFTCGYTFITAMAKLLSLTALFLFIHGMLPSNLFGHKVEKLEASNFHITQAQAHHIANSISSNWNSLVSALRSLCRGNDWLLFLKVSLSLLVVSILSSMSSQAAFKIGTALVFTGFKAYEKWEDSIDSMVGDACTILLHFGSAKESSS

SEQ ID NO: 2834 - protein, 493 aa, Zea mays
  VARIANT 187: note = Ancestral polymorphism is T, Derived polymorphism is S
  VARIANT 51: note = Ancestral polymorphism is L, Derived polymorphism is I
MDPYKHRPSSAFNAPYWTTNSGAPVWNNDSSLTVGARGPILLEDYHLVEKLANFDRERIPERVVHARGASAKGFFEVTHDITHLTCADFLRAPGVQTPVIVRFSTVIHERGSPETLRDPRGFAVKFYTREGNWDLVGNNFPVFFIRDGIKFPDMVHALKPNPRTHIQDNWRILDFFSHHPESLHMFSFLFDDVGIPADYRHMDGSGVHTYTLVSRAGTVTYVKFHWRPTCGVRSLMDDEAVAVGGANHSHATKDLTDAIAAGNFPEWTLYIQTMDPEMEDRLDDLDPLDVTKTWPEDAFPLQPVGRLVLNRNIDNFFAENEQLAFCPGLIVPGIYYSDDKLLQTRIFSYSDTQRHRLGPNYLLLPANAPKCAHHNNHYDGSMNFMHRHEEVDYFPSRYDAVRNAPRYPIPTAHIAGRREKTVISKENNFKQPGERYRAMDPARQERFITRWVDALSDPRLTHEIRTIWLSNWSQADRSLGQKLASRLSAKPSM

SEQ ID NO: 2835 - protein, 301 aa, Zea mays
  VARIANT 82: note = Ancestral polymorphism is H, Derived polymorphism is R
  VARIANT 20: note = Ancestral polymorphism is K, Derived polymorphism is M
MGGFVKTQKTNAYFKRFQVKFKRRRAGKTDYRARIRLINQDKNKYNTPKYRFIVRFTNKDIIAQIVSASITGDIILAAAYSRELPRYGLEVGLTNYAAAYCTGLLLARRVLKIRDLDQEYEGNVEATGEDFSVEPAEERRPFRALLDVGLIRTTTGNRVFGALKGALDGGLDIPHSDKRFAGFKKDDKQLDADIHRKYIYGLHVAEYMKNLADEEPEKYQAHFSEYIKKGIEADDMEALYKKVHAAIRADPSMAKSTKAQPKEHKRYNPKKLTYEQRKARLVERLNALNSSGGVDDDEDDE

SEQ ID NO: 2836 - protein, 304 aa, Zea mays
  VARIANT 276: note = Ancestral polymorphism is P, Derived polymorphism is L
  VARIANT 204: note = Ancestral polymorphism is R, Derived polymorphism is C
  VARIANT 202: note = Ancestral polymorphism is R, Derived polymorphism is C
  VARIANT 199: note = Ancestral polymorphism is R, Derived polymorphism is L
  VARIANT 180..304: note = Derived polymorphism lacks residues 180 to 304
  VARIANT 177..304: note = Derived polymorphism lacks residues 177 to 304
  VARIANT 172: note = Ancestral polymorphism is A, Derived polymorphism is T
  VARIANT 169: note = Ancestral polymorphism is R, Derived polymorphism is M
  VARIANT 159..304: note = Derived polymorphism lacks residues 159 to 304
  VARIANT 149: note = Ancestral polymorphism is V, Derived polymorphism is M
  VARIANT 146..304: note = Derived polymorphism lacks residues 146 to 304
  VARIANT 145: note = Ancestral polymorphism is Y, Derived polymorphism is N
  VARIANT 143: note = Ancestral polymorphism is D, Derived polymorphism is H
  VARIANT 141: note = Ancestral polymorphism is N, Derived polymorphism is S
  VARIANT 133: note = Ancestral polymorphism is P, Derived polymorphism is L
  VARIANT 118: note = Ancestral polymorphism is A, Derived polymorphism is V
  VARIANT 110: note = Ancestral polymorphism is V, Derived polymorphism is I
  VARIANT 109: note = Ancestral polymorphism is A, Derived polymorphism is V
  VARIANT 99: note = Ancestral polymorphism is P, Derived polymorphism is L
  VARIANT 98: note = Ancestral polymorphism is A, Derived polymorphism is S
  VARIANT 96: note = Ancestral polymorphism is A, Derived polymorphism is T
  VARIANT 91: note = Ancestral polymorphism is P, Derived polymorphism is S
  VARIANT 25..304: note = Derived polymorphism lacks residues 25 to 304
  VARIANT 24..304: note = Derived polymorphism lacks residues 24 to 304
MEDKGSSDPSLGPDREATPPSSPQQRSEWPVASVVQRRPNTANRPGGSDARAFCLAMTNWRDDSVVALRRRRRTQCPAMDPVAGTAEHRGPLEVRARAPVKIILAGEHAVIHGSAAIAAAIDLYTNSSLLLRPAGPGTPTNLDFYWFFVSSRSLVLFSQLLSLVATQERVAALAPAWWSWMRMESLPWHVAVVMDGNSRWVRARRLPSTAGHEAGRRALEEVVRLSRAWGVRTLTAFAFSHENWSRPKVEVEFLMGQFERAIRESVAEFLRYAFAPSVNSLTPHTWSGTRASPSRGRSRASAGR

SEQ ID NO: 2837 - protein, 580 aa, Zea mays
  VARIANT 59: note = Ancestral polymorphism is P, Derived polymorphism is L
MAKAAPAAGGGIADILVTRDRDFLVRNSGEQVKISSIEASPVAIYFSNSWFPPSRWFTPKLIQVYKQLASEGKSFEVIFAWGDLKEKTFNEYFAKMPWLALPFSDIERREALDIRFKVTDTPHLVILDAKTGEVYTKDGVRIVSEYGVDAYPFTPDRINELKELEKEEKENQTIQIVLGTSTRDYLISNKGDKVPISELEGKYVGLFFVGVGYPPFIEFIDLLAKIYEKLKEVGEKFEVVAVSIYSEESSFNESFAKMPWLAIPHGDNKCLTLTRYFGFMSLPTLVLIGPDGKTLNNNVAEIIIDHGFDVWEGFPFSAEKLDFLAEKVKVKAATQTLESLLISGHLDFVIGKDGVKVPVSELVGKTVLLYFSSKWCGPSRGFLPTLVEAYSKIKEKNSDFEVVFISHDRDQRSFDEYFSEMPWLAVPWEDERTAPLKTTFKARGFPILVVIGPNGKTVSWDATELLVVHGADAFPFTEERLEELQKKVDEMAKAMGWPKKLKHELHGEHELVLQYRGTDTYACDRCVQMGSSWVYTCDCEECDFDLHPKCALRKKGEEEETKSSTAGCYVCKGSDVCIKA

SEQ ID NO: 2838 - protein, 250 aa, Zea mays
  VARIANT 28: note = Ancestral polymorphism is L, Derived polymorphism is M
MKFGKRLKKQIEESLPEWRSQFLNYKELKRRVNAVSSRGSAADPSSSSAAEADFLTLLDAEIDKFNAFFLEREEEFVIRQRELQERIGRAGGPEATLARVRREVVDLHGEMVLLLNYSSVNYTGLAKILKKFDKRTGGVLRLPVIARVLRQPFFTTDLISELVRDCEAAMEAVFPPAASRDLHGRQALAVAGQGIFRNTVAALLTMQEVRSGSSTVGHFSLPPMQPLPESDWLVQSVDSTPTASPLIPTQ

SEQ ID NO: 2839 - protein, 74 aa, Zea mays
  VARIANT 25: note = Ancestral polymorphism is R, Derived polymorphism is W
  VARIANT 42: note = Ancestral polymorphism is D, Derived polymorphism is A
  VARIANT 57: note = Ancestral polymorphism is A, Derived polymorphism is V
  VARIANT 60: note = Ancestral polymorphism is A, Derived polymorphism is T
  VARIANT 64: note = Ancestral polymorphism is A, Derived polymorphism is T
MGSSSHVPPLSAPLHLPPPLRCARWCQLQPHRLVASYSAGLDSPSHFSVALRFLAQAVGTVGGALAISELMLAR

SEQ ID NO: 2840 - protein, 191 aa, Zea mays
  VARIANT 1: note = Ancestral polymorphism is M, Derived polymorphism is L
  VARIANT 100: note = Ancestral polymorphism is A, Derived polymorphism is S
  VARIANT 122: note = Ancestral polymorphism is G, Derived polymorphism is R
MLSLLACSPFRLPPTRCGARRKSMTTATIMIRSGARIGSRRSKGGISALRSSRLSSSSSVSPPPPPPAASVDAAVEPKLRCLLKADMVAVFCELAAQGEALQVHAAIFVLAAPQIAHMKLLGMALVAILALQGKFLTYSVDELPNFQHAVGFWGAMTSNVTFQSRNVLSKKFMVKKEVYPYMPSIFEMKLN

SEQ ID NO: 2841 - protein, 225 aa, Zea mays
  VARIANT 64: note = Ancestral polymorphism is G, Derived polymorphism is R
  VARIANT 65: note = Ancestral polymorphism is D, Derived polymorphism is Y
  VARIANT 74: note = Ancestral polymorphism is A, Derived polymorphism is V
  VARIANT 92..225: note = Derived polymorphism lacks residues 92 to 225
  VARIANT 203..225: note = Derived polymorphism lacks residues 203 to 225
MDAAGARPSAPSAAAAAVAGASVADEPRDARVVRELLRSMGLGEGEYEPRVVHQFLDLAYRYVGDVLGDAQVYADHAGKAQIDADDVRLAIQAKVNFSFSQPPPREVLLELARSRNRMPLPKSIAPPGSIPLPPEQDTLLAQNYQLLPPLKPPPQYEENEDENEESNPSLTPNPANSNPTFSQDQRSNEQQHTPQHGQRVSFQLNAVAAAAAKRPRMTVDQLNIG

SEQ ID NO: 2842 - protein, 526 aa, Zea mays
  VARIANT 464: note = Ancestral polymorphism is R, Derived polymorphism is S
MKPMSCHEQEHPELAATTTNSGFDWLEDPISFLTADVDIAGGGYGWWSDPAAAQQDGIGSVVAQTLSPPAPLLAHTSPSIASPVVSEPSSKKRKSPAHRASASTGSNQRRRADQDRPGAGSSSGGSKRSGSKGGGAGSDRDTRWAEQLLNPCATAVEAGNLSRVQHLFYVLGELASFSGDANHRLAAHGLHALARMLPAAVGPAAAATVRVPPCECPTPGFAGAEPRLFRASLIKFHEVSPWFALPNALANAAIAQAAASGSGGRGGSEPRSLHVVDLGVSHGVQWPTLLESLTRLPGGRAPPSVRLTVAGAPPAPFSASPPGYDFSPHLLRYAKSIDLRLAISRAASLDSVHGLASSPSGEALVVCLQFRLGHAGADERTEILRKVRGLNPELVVVSELDGGGDGTAAGEFTARLELLWRFLESTSAAFKGRDGEERRLLEAEAGTSVASEAAGAGREAWRERMVVAGFEAAAFGDEAVESAKSLLRKYDGGWEMSASGTAGAVALRWKGQPVSFCSLWRPACSG

SEQ ID NO: 2843 - protein, 308 aa, Zea mays
  VARIANT 162: note = Ancestral polymorphism is G, Derived polymorphism is S
MALKTPHLPSNFARRPSSHHSFSQWHSPPHHPKLPPRPDPQTRVAIATKPPPPPHVVRKRSTTSTLMRCRDGLGLHGFTDDEAVHQTPEPEDHQTTELPVVTHPSVVFPGATLQLHAFEFRSRIMAHTLLQQGLSFGVVCRGGVADVGCVVHVVECERLTDGRFFLTCVGRDRFRVVETVRTKPYAVARVQVFRDRDHSHHHHHHDLMQQVERHLGNVAALADKLGQKPPPPLPYRQGDRRLHTAASLSFLVARLFVDDRREQQALLRMDDAAQRLAREGEYLERRSKYLAALAAIKDAFQHSSCNEK

SEQ ID NO: 2844 - protein, 61 aa, Zea mays
  VARIANT 17..61: note = Derived polymorphism lacks residues 17 to 61
MHEDEDDKRYSPESIPQQTDNQFQEEDGSFSPHLMHGNKDEDAIDPEEDKAELVEFYVSIF

SEQ ID NO: 2845 - protein, 206 aa, Zea mays
  VARIANT 177..206: note = Derived polymorphism lacks residues 177 to 206
  VARIANT 133: note = Ancestral polymorphism is A, Derived polymorphism is V
  VARIANT 97: note = Ancestral polymorphism is V, Derived polymorphism is A
  VARIANT 91: note = Ancestral polymorphism is W, Derived polymorphism is L
  VARIANT 65: note = Ancestral polymorphism is R, Derived polymorphism is G
  VARIANT 52: note = Ancestral polymorphism is A, Derived polymorphism is V
  VARIANT 42: note = Ancestral polymorphism is F, Derived polymorphism is C
  VARIANT 36: note = Ancestral polymorphism is R, Derived polymorphism is K
  VARIANT 23: note = Ancestral polymorphism is A, Derived polymorphism is T
  VARIANT 17: note = Ancestral polymorphism is A, Derived polymorphism is T
MPSSVLSSDSMHIGLLAAAAHAAATNSRFTIFFNPKASKTEFVIPLSKYIKAVFHTRISVGMRFRMLFETEESSVRSHVDEGDQGVNATQLLHNEPVLVTVSGDGSVGMWDVTLGQPCVRHIVAHTRRANAVVVALNDKYLCTGGSDQKVVSCLFVLLVSYVAYVMSYWKRFYIITEVGVHILIGIFHILSKEMIDMLPEIIELFR

SEQ ID NO: 2846 - protein, 344 aa, Zea mays
  VARIANT 217: note = Ancestral polymorphism is V, Derived polymorphism is A
  VARIANT 129..344: note = Ancestral polymorphism lacks residues 129 to 344
MPLPPLLPRLYPTPPPLRAGDRGNAVPLSPGRRRPALLAVVRAKRKDEASFTDRILDYIEGGPKLRRWYGAPDLLPKDGAAEDEEDESQDIEESRDAVLVTNGDSEIGQRNRYHNHTSIKTEICMLRIEGPMVILALILKRARTKALVKDKRTTEEAFGTYVECMVGDIGDKSFTKRALRGVRAIICPADDGFFSEPIDLKGVQHIVLLSQLALASVIYPYEILMRLQLAVYRNSGGLQAIMNSKLKTLAEKDEEVVLASGIPCTIIRTGSLQSTPGRERGFDFTEGIASKGRISKEDAATICVEALNSIPLKTHIFEVANGKEKVIDWKAWFEEQTKREEEIQ

SEQ ID NO: 2847 - protein, 80 aa, Zea mays
  VARIANT 39: note = Ancestral polymorphism is M, Derived polymorphism is I
  VARIANT 46: note = Ancestral polymorphism is T, Derived polymorphism is I
MSRSGQPPDLKKYMDKKLQIKMNANRVVIGTLRGFDQFMNLVVDNTVEVNGNDKTDIGMVVIRGNSVVMIEALEPVARSQ

SEQ ID NO: 2848 - protein, 201 aa, Zea mays
  VARIANT 3..201: note = Derived polymorphism lacks residues 3 to 201
  VARIANT 5: note = Ancestral polymorphism is L, Derived polymorphism is F
  VARIANT 19: note = Ancestral polymorphism is A, Derived polymorphism is T
  VARIANT 66: note = Ancestral polymorphism is H, Derived polymorphism is D
  VARIANT 70: note = Ancestral polymorphism is W, Derived polymorphism is S
  VARIANT 72: note = Ancestral polymorphism is I, Derived polymorphism is T
  VARIANT 82..201: note = Derived polymorphism lacks residues 82 to 201
  VARIANT 108: note = Ancestral polymorphism is T, Derived polymorphism is I
  VARIANT 118: note = Ancestral polymorphism is H, Derived polymorphism is R
  VARIANT 138..201: note = Derived polymorphism lacks residues 138 to 201
MVQSFKGILADRSEGEIYATLCDCGMDPDIAVDRLISQENEVLDLNVQIASFYDEDSVFVTSCYIHLHLWTIESFNPCKFDLIPLSFLILGTDLFEVVEPSKKGRYLTKKRLKLQRKRIKNERKEANKNDQQSIMRKGKKIKQKFLKAKARLKYKIEKVINGINKRPNCGYEMFHSSVITAARKALVYVIPSIAISLNWYM

SEQ ID NO: 2849 - protein, 70 aa, Zea mays
  VARIANT 10: note = Ancestral polymorphism is P, Derived polymorphism is S
  VARIANT 14: note = Ancestral polymorphism is M, Derived polymorphism is I
  VARIANT 28: note = Ancestral polymorphism is K, Derived polymorphism is Q
  VARIANT 36: note = Ancestral polymorphism is D, Derived polymorphism is G
MLLREMDGDPFHPMPSYDFLSGNGYSLKQLVRSNSDIDSSSSKSKQSWQDLSDSSLSGQHTPTQSGKTFP

SEQ ID NO: 2850 - protein, 90 aa, Zea mays
  VARIANT 14: note = Ancestral polymorphism is R, Derived polymorphism is S
MQVHPQISGAANTRVPLPVGPAAEEPIFVNAKQYNAILRRRQKRAKLEAQNKLVKGRKPYLHESRHRHAMKRVRGPGGVSSTKRSSRSSS

SEQ ID NO: 2851 - protein, 174 aa, Zea mays
  VARIANT 49: note = Ancestral polymorphism is N, Derived polymorphism is S
  VARIANT 50: note = Ancestral polymorphism is G, Derived polymorphism is D
  VARIANT 58: note = Ancestral polymorphism is S, Derived polymorphism is R
  VARIANT 99: note = Ancestral polymorphism is E, Derived polymorphism is Q
MENAVVLREWFDRVDAGRTGNITAAQLQGALAVGNLNFPISVVQQMISNDNGLLVQDSFWLLTNSYRRYVFPVSNLQVQNVFSTLDRGRGFLSLEEVYQALIKLGFSLDSPAFYTVCESFDKSKKGMIQLDEFISLCIFVQSARNLFNSFDTSKQGRVTLDFNQFVYCTANCRI

SEQ ID NO: 2852 - protein, 373 aa, Zea mays
  VARIANT 17: note = Ancestral polymorphism is R, Derived polymorphism is C
  VARIANT 89: note = Ancestral polymorphism is T, Derived polymorphism is P
  VARIANT 287..373: note = Derived polymorphism lacks residues 287 to 373
  VARIANT 296..373: note = Derived polymorphism lacks residues 296 to 373
MATMSAALAISLPSLTRVAVASTPSASSRIKRATQFRCCADSSSQEQEISGAPPAPPLDKSARSPPSSLLGISTSTWSAGVAGLGFLETGYLTYLKLTGSEAFCPITGAGCGDVLDSDYSVVFGIPLPIVGLVAYGLVTALSLQKNGKDLLQGSDDLDVRLILLLVATSMATASVYFLYILSTKFIGVSCSYCLLSAFLSFTLLFIRVKDIGFERIQKFAGIQLAVAVIIALALTNSYSSATTQLKGTDDFVLQPYETEISTESSPFAIALAKHLHSIGAKMYGAFWCSHCNEQKQMFGHEATKILDYVECFPNGAGKGKKMTAECAAAGLEGFPTWFINGKILSGDQELEVLAEASGFVGEGTEQPKGISQN

SEQ ID NO: 2853 - protein, 382 aa, Zea mays
  VARIANT 304: note = Ancestral polymorphism is A, Derived polymorphism is P
  VARIANT 271: note = Ancestral polymorphism is A, Derived polymorphism is G
  VARIANT 255: note = Ancestral polymorphism is G, Derived polymorphism is A
  VARIANT 252: note = Ancestral polymorphism is L, Derived polymorphism is R
MEAVLRHPSLSRTRPPNLNPPTTPSPSLHAPSLLRLRARRLIAAAVFQDQKPKEPASKGGDDEEEAYGEVDRIVSSRTVSSPVFAEDGSATAAVATEFLVEWKDGHEPSWVPAEAIAADVVAEYETPWWTAAKKADSEALAALLADETLRRDPDAEDAQGRTAAHFAAGLGSEECLRALGAAGADVGRRERAGGGLTPLHMAVGYGRAGAVRALLELGADPEAPDGQGRTPLELVQEVLARAPKGNPATFQLRQGLEAAQKELEKAVYEWAEVEKVIDGRGEGKWREYLVEWRDGGEREWVKAAWVAEDLVSDFEAGLEYAVAEAVLDKRQAATATAEEEDSWEYLVKWVDIEEATWEPAENVDTELVQKFEQQQSGSAGGD

SEQ ID NO: 2854 - protein, 362 aa, Zea mays
  VARIANT 78: note = Ancestral polymorphism is S, Derived polymorphism is P
MARATNAQHHHRLRLLLCLSLAAAAWAHGGGGDSDADADADADGGAAARPDLRARSLVEAKLWCLAVVFVGTLLGGVSPYFMRWNEAFLALGTQFAGGVFLGTALMHFLSDANETFGDLLPDSGYPWAFMLACAGYVVTMLADVAISYVVSRSQGRSTGTAATGGSDAGLEEGKMRTANGTRSEPTPADAHGSDHSAASILRNASTIGDSVLLIVALCFHSVFEGIAIGIAETKADAWKALWTISLHKIFAAIAMGIALLRMLPNRPLLSCFAYAFAFAISSPVGVGIGIIIDATTQGRVADWIFAVSMGLATGIFVYVSINHLLSKGYRPQRPVAVDTPVGRWLAVVFGVAVIAVVMIWDT

SEQ ID NO: 2855 - protein, 315 aa, Zea mays
  VARIANT 7: note = Ancestral polymorphism is G, Derived polymorphism is V
  VARIANT 91: note = Ancestral polymorphism is Q, Derived polymorphism is R
MSTVVMGVDLECHKCYKKIRKVLCKVQDKVSIRTISYDEKNNTVTVSGPFDAEEVADRLTADAGKVITDIHVVGGFGFGLGGGGGGGGGKQQKHGAVAPGKAPKPGKASGNGHGQGGHGGGGHGGGGGGNGHGHGQAGGHGGGGHGGHGGGGKPGKNKHVKFDDMDMDDDFDDLDMDEPAGRHAHAHAHGHGHGDGKPKIVRTTNTPIAARLEAPRTGPAMSMAAAAPVRMPMPAMAPMPQQQGMGGAPSIWPPAPEWGYSAQPYGSYSGPPTGGYYGGGGGPAGHWPYGGGYGRNPYGQQYYEDEEPSAACSVM

SEQ ID NO: 2856 - protein, 551 aa, Zea mays
  VARIANT 78: note = Ancestral polymorphism is P, Derived polymorphism is T
MAARPDARSGYCAATRTFRSKRADVPLPADADLDVVRFLASRRHAGVVALVDAATGHRVTFQELWRAVEGAATALAAPPLSLRKGQVALILSPNSVHFPVAALAAMSLGAVLTTANPLNTPAEIAKQVADARPVVAFTTRDLLPKLPRAGAGAGIRVVLLEPDRLPSDPSPVVATIGEISATPPDPTRRRDRVTQDDPATLLYSSGTTGPSKGVVATHRSLISMVQIIMSRFRLEASNRTETFLCTVPMFHVYGLVAFATGLLGCGATIVVLSKYELPEMLRAINEYGVTYLPLVPPILVAMLAHPNRLPLGGLRKVLSGGAPLSKELIEGFKEKYPQVEILQGYGLTESTAIGASTDSAEESSRYGTAGLLSPSTEAKIVDPETGEALPVNRTGELWIRGPYVMKGYFKNAEATQSTLTPDGWLKTGDLCYIDEDGYLFVVDRLKELIKYKGYQVPPAELEALLLTHPEIEDVAVIPFPDREVGQFPMAYVVRKKGSNLSEREVMEFVAKQVAPYKKVRKVAFVAEIPKNASGKILRKDLIKLATSKSKL

SEQ ID NO: 2857 - protein, 334 aa, Zea mays
  VARIANT 58..334: note = Derived polymorphism lacks residues 58 to 334
  VARIANT 37..334: note = Derived polymorphism lacks residues 37 to 334
MTSVCSSCCSFKCQIAHWRQGHKDECHPPSVNTRHDEEEEKAKVGRAAKENASVGVKQVAEMNKPAVGSKTSDANHDLKSSNGKSKHMPSEAVCSSAEIPGGHKSNSTVEISQNVQSVDSSKMGSSIKHANFVEDGSSTEDLNEALPCNFHSSSPNINGRSSFVNKEFCNHSKEHQRAKDASVVEDCSQTSSTRELEDSNIHHVAASVVLESKSSRTPIHVELERSKTKSAGNDSIQSTKPVPSALTVDKATSVRGSLSITPNNSSKVADSLPDRSFKPSDRSGSTTNNLATSLKKMTLFPYELFVKLYSKVELHPFGLHNLGNSCYANAVFSV

SEQ ID NO: 2858 - protein, 278 aa, Zea mays
  VARIANT 9: note = Ancestral polymorphism is A, Derived polymorphism is V
  VARIANT 14: note = Ancestral polymorphism is P, Derived polymorphism is S
  VARIANT 15: note = Ancestral polymorphism is L, Derived polymorphism is V
  VARIANT 18: note = Ancestral polymorphism is V, Derived polymorphism is I
  VARIANT 23..278: note = Derived polymorphism lacks residues 23 to 278
  VARIANT 27: note = Ancestral polymorphism is A, Derived polymorphism is T
  VARIANT 30: note = Ancestral polymorphism is C, Derived polymorphism is Y
  VARIANT 34: note = Ancestral polymorphism is V, Derived polymorphism is A
  VARIANT 78: note = Ancestral polymorphism is G, Derived polymorphism is S
  VARIANT 85: note = Ancestral polymorphism is F, Derived polymorphism is S
  VARIANT 87: note = Ancestral polymorphism is V, Derived polymorphism is A
  VARIANT 100: note = Ancestral polymorphism is A, Derived polymorphism is D
  VARIANT 246: note = Ancestral polymorphism is R, Derived polymorphism is W
MSVPPARLAASSLPLLLVWLQLQLLLASACDRCVRHSKAAYYTSALTLAGGSCGYGTDAASFSAGFLAAASPALYRAGVGCGACFQVRCKDKKLCGAAGARVVVTDRARTNRTDLVLSSTAFAAMARPGMAPRLAARRAVDVEYKRVPCEYKHRNLSVRVEERSHAAAPAPGDLAIRFLYQGGQTDIVAVDVAQVGSSNWRFMTRDDGPAWSTRQAPPGPLQLRVVVTGGYDGKWVWADREVLPRWRRAGEVYDTGVQITDVAQEGCFPCDTHEWEEE

SEQ ID NO: 2859 - protein, 671 aa, Zea mays
  VARIANT 452..671: note = Derived polymorphism lacks residues 452 to 671
MLQPGFSSSNHHHSATPERPSLPATPGAQVLFGPFAGDERHQDASETKLMKQPTWVFFEKESVTDLREQILQLIQHDCKDQEEKSRAELLEKLNRCKRDTLIELCRSFDLIGSRANRKEELVLFLMEFIKDHCSGSDVINSDKKYKKRKRVREEENLSAGKPSKKKKREGEEEAEDRVKHSDCDLLDNKYSCADSKNGKFPNEQTNFEPSGRINYSVSENLDGASLSEAPIPTDEQAIITTPPTKFVTAAEDDSTDVKALQRKMSSIAKKKTTSKEDCKVKLCGNRESKGDTKPRKQVIKPSKDELREAVFLILDTADFATVRYTMTFGDVVKEVDKYFGKDLFERKPLIRSLIEEELFRLADEAEKKELEESEAAEAKARAEQAAKEMAQVQTVELVINEQNVLEDGRDSNTKDSLKNANDSANKKCIDGGASVEYGFNENSCYAAEGSEEHKVDDDNKNITKDGNGGKVAVAPTANTDCTLQLQGSSNVEAETTMKSNVGTLEASKDGEVRDARNGENNGTEDGGNEGIRSGNVGSNAEAEESHGHGNNERAEHTEDDKAQECSHNENSASVGILGDGDGEAREGDINAEAEQSQADGGGNSKAEDAEHNENTKTDANSSKNGTTAAGNGKTDVDVKGATAMAQLKEALCDEMDVDCKGGGVGPRLCRS

SEQ ID NO: 2860 - protein, 222 aa, Zea mays
  VARIANT 101: note = Ancestral polymorphism is E, Derived polymorphism is D
MPDSDNDSGGPSNAGGELSSPREQDRFLPIANVSRIMKKALPANAKISKDAKETVQECVSEFISFITGEASDKCQREKRKTINGDDLLWAMTTLGFEDYVEPLKHYLHKFREIEGERAAASAGASGSQQQQQQGELPRGAANAAGYAGYGAPGSGGMMMMMMGQPMYGGSQPQQQPPPPQPPQQQQQHQQHHMAIGGRGGFGQQGGGGGSSSSSGLGRQDRA

SEQ ID NO: 2861 - protein, 150 aa, Zea mays
  VARIANT 1: note = Ancestral polymorphism is M, Derived polymorphism is L
  VARIANT 2: note = Ancestral polymorphism is A, Derived polymorphism is T
  VARIANT 39..150: note = Derived polymorphism lacks residues 39 to 150
  VARIANT 106..150: note = Derived polymorphism lacks residues 106 to 150
MASVKLRTNTLDKLDGDPYVNIRMGKMLCVHKSSTVTIWTFLAMFERCDGVWISHKKCNVNLNTLMNMFSVLGDGGGLGGRNASNGSGPPCLRLPRDVHAAIAREQLRQPHRRVAPALVSQARVTVGAHAEEGMIHAEQPKARCHLRCHA

SEQ ID NO: 2862 - protein, 66 aa, Zea mays
  VARIANT 39..66: note = Derived polymorphism lacks residues 39 to 66
  VARIANT 31: note = Ancestral polymorphism is P, Derived polymorphism is H
  VARIANT 30: note = Ancestral polymorphism is A, Derived polymorphism is T
  VARIANT 22: note = Ancestral polymorphism is G, Derived polymorphism is D
  VARIANT 21: note = Ancestral polymorphism is S, Derived polymorphism is I
MWCNDSDKIHGGRMKEMKIFSGIKERNNQTPIAFLKFVCSNAEKFLVIPPNVAPRLEYLTNQLFIS

SEQ ID NO: 2863 - protein, 160 aa, Zea mays
  VARIANT 126: note = Ancestral polymorphism is T, Derived polymorphism is I
  VARIANT 37: note = Ancestral polymorphism is A, Derived polymorphism is V
  VARIANT 14: note = Ancestral polymorphism is G, Derived polymorphism is S
MVDVPSDWLVVIAGKYASIYGPTTGDKIRLGDTNLYAEIEKDFAFYGDECIFGGGKVLRDGMGQASGYPESFCLDTVITNAVVIDYTGIYKADIGIKGGLIVAIGKAGNPDVMDGVHNNMIVGVNTEVIASEGMIVTAGGIDCHVHFICPQLAEEAIASG

SEQ ID NO: 2864 - protein, 358 aa, Zea mays
  VARIANT 62..358: note = Derived polymorphism lacks residues 62 to 358
MAAGFRRRLTALTVPKASSLLRRTRHKKLSYSRVRCNSLPGRFHPAVAGLHESANALIRWTEEPAQQASPAWVADGAAHLARLLSGLTDLLHHPQARDPLIRHHRGGNGNGNGNGNTNSNSKTPASWAERLLDDLLLLADAHGCVREALLTRRQLLGEAHAALRRRDAARLAAALRARRRADRDLSRLASTLRCLSHRCSSGAGAAVAPDHGEAAVADAVAAATCAAAAASAAIFAGLASASASSASRAMPSPLATVSPAKVAAAPVWWVADLLRWRRRTVAVVAGSGSGSEPGPGAREANFEAERCSDEEEGERQAAMERLRRLEDCVVAAENGCERVYRALVNARVSLLNVLTPCF

SEQ ID NO: 2865 - protein, 512 aa, Zea mays
  VARIANT 144: note = Ancestral polymorphism is L, Derived polymorphism is P
MGCCGSSQRAGTHPEKKPPGALPPHRPSYSLNQHQAPAPPPPSAARAGARQVPPLKEFSLAELRAATAGFAAGNIVSESGEKAPNFVYRGRLDAGRRAIAVKKFTKMAWPDPKQFAEEAKGVGKLRHCRLANLIGYCCDGDERLLVAEFMPNDTLAKHLFHWENQTIEWAMRLRVAYYIAEALEYCSTEGRPLYHDLNAYRVLFDENGDPRLSCFGLMKNSRDGKSYSTNLAYTPPEYLRNGRVTSESVIFSFGTILLDLLSGKRIPPSRALDMIKGNNIQVLMDSHLEGNYSTDEATTLVDLASQCLQYEPRDRANTKKLVSVLEPLQIKSEVPSYEMLGIPKHEEEAPPPPQPQRPLSPMGEACSRTDLTAIHQILVNTHYRDDEGSNELSFQEWTQQMRDMLEARKRGDFAFRDKDFKAAIDCYTQFVDVGTMVSPTVYARRSLCHLMCDQPDAALRDAMQAQCVYPDWPTAFYMQAVALAKLNMQSDATDMLNEASQLEEKRQKNTKP

SEQ ID NO: 2866 - protein, 259 aa, Zea mays
  VARIANT 13: note = Ancestral polymorphism is A, Derived polymorphism is G
  VARIANT 186: note = Ancestral polymorphism is M, Derived polymorphism is T
MWTRALATVLFVAGAALLGVGVGGASAQQGVWSIITRPMFQSMLSHRGDSGCQGAFYTYDAFIEAASKFPGFGTTGDEQTRRRELAAFFGQTSHETTGGWATAPGGPFAWGYCRVKEQNPTDPPYYGRGPIQLTHEYNYRLAGQALNLNLVGNPDLVASDPVVAFKTAIWFWMTPQSPKPSCHAVMTGAWTPSATDRAAGRLPGYGLTSNIINGGLECGKGQSTDGAKDRVGYYKRYCDMLRVGYGDNVPCKDQKPYGG

SEQ ID NO: 2867 - protein, 543 aa, Zea mays
  VARIANT 342: note = Ancestral polymorphism is P, Derived polymorphism is T
  VARIANT 149: note = Ancestral polymorphism is R, Derived polymorphism is W
MLRGTGYGGGDARRRALRSSRRHLPGWIWWLLGIFLLVGLMLFVLHHNQKEQFRPPVVDNGSAIQEVPREKVNFSEELLSSTSFARQLVDQMTLAKAYVILAKEQGNLQLAWELSSQIRNCQRLLSEGAVNGRAITKDEAHPIISRLARLIYKAQDSHYDISTTIVTLKNHALALEERAKAAIVQSAEFGQLAAESFPKNLHCLTVKLTEEWLRNPKHRSHSEENRNSTRLVDNNLYHFCIFSDNVLATSVVVNSTVSNANHPQQLVFHVVTDRIHFGAMSTWFLINDFKGCTVEVRCIDEFSWLNASSSPLVRQLSEAETQGYYYSAGSKNPERETKFHNPKFVSLLNHLRFYIPQILPNLEKVVFLDDDVVVQKDLTQLFSIELHGNVIGAVETCLESFHRYSKYLNFSHPTISSKIDPHTCGWAFGMNIFDLIAWRKANATSLYHYWQEQNSDLLLWRTGILPAGLLTFYGLVEPLDRRWHVLGLGYDVDIDDRLIESAAVVHYNGNMKPWLKLAIRRYKYIWERYVNISHPYVRECMLQ

SEQ ID NO: 2868 - protein, 287 aa, Zea mays
  VARIANT 48..287: note = Derived polymorphism lacks residues 48 to 287
MAAAREVHDSIVSNSMGRRCRVIAQGYKVVDEERHAVDYRPSVVWADYFIKNPTLPHTYEPNRKPRVQSATSIFFVSAVGSRLKGHDTSKSSTALAKPSSRLRQMPLRRRPGPRRPRALTLPLQRCPQEAPARRLLPRSLSPHFNADVRGKVCVAANCWLWDLPPLQHRRGSARHGAVVVMELQPLCRATLHRRATVKPAASADAYYYINCASSDSITDDGDAASTVRSRTRSTLNSLCCSTFTTPCPCPTLSCRSTTVARYLRPITSASSSIAISHRPPLSPSSRK

SEQ ID NO: 2869 - protein, 506 aa, Zea mays
  VARIANT 11: note = Ancestral polymorphism is E, Derived polymorphism is Q
  VARIANT 54: note = Ancestral polymorphism is N, Derived polymorphism is I
MKERRDVLIKEAKKRLTGKHDDPLAEMNLIDAVQRLGVSYHLQDEIHASLQKLNSMEFSNESFHEISLQFWLLRQERYCMSCDVFQSFMDDQRKLNANIKSDVRALLALYEAAHLGTPTEQFLTEAQRQTTSLLRSMVGHLEKPLADKVRHALRTPSFRRMKRLEARLYIPLYEEDKEDCDEMILELAKLDFYLLQRIHREEVKEICEWYHGLDSPRKLFYARHRPTEAYFWALGVYYEPQYAKARKLLAKFIATITPYDDTFDNYGIWEELQPFADVMQRWDMKEAEGLNECYSDFARFMFGTMIEIENALPKDIGRRNVNFIRDIINEVCKGYVTEIGWRDTKYIPPLEEHLKVTLITCFYWGINCTAFVVFEENVTEEILKWMSRFPQIVKDSCIISRLMDDIVAHEFETERDNVATAVTCYMKQYKTTKEEASDALWNSVEQAWKSMNHEYLTWTSIPSSLLIRVINLARMMETMYKEIDGYTDSKLLKEWISMLLDQPIPF

SEQ ID NO: 2870 - protein, 378 aa, Zea mays
  VARIANT 64..378: note = Derived polymorphism lacks residues 64 to 378
MFLQRPNAHLHVRLPRVLDASQIKSSLPNYNLPQRRRSQTPSPTAQPRSGDPSLSFPSFCRPRSLAFPSTMAAAAGGGAVRALSQKEQDIQMMLAADVHLGTKNCDFQTERYVFKRRTDGIYIINLGKTWDKLQLAARVIVAIENPQDIIVQSARPYGQRAVLKFAQYTGAHAIAGRHTPGTFTNQLQTSFSEPRLLILTDPRTDHQPIKESALGNIPTIAFCDTDSPMRYVDIGIPANNKGRNSIGCLFWLLSRMVLQMRGTILPGHKWEVMVDLFFYRDPEEAKEQEEEVAAAPEFAAITDYQGADQWGGDQWTSDVAAPPVAPTGADWGAAPAPVPTGEGWDQAGAPVPADGTVPPVVAPTGWDQAAPPTAQGWE

SEQ ID NO: 2871 - protein, 288 aa, Zea mays
  VARIANT 184: note = Ancestral polymorphism is W, Derived polymorphism is C
MESEIMASYETKQNCEIRVFESSDEMATDLAEFISQASEISVKERGCFAIALSGGPLVRHMRKLCEAPYNKTLDWSKWYIFWAEERAVAKNHAESNYKLTKEEFLSKVPILNGHVYSINDNATVEEAASDYEFVMRQLVKVRTVGVSESNDCPRFDLVLLNIGPDGHVASLFPNHPALELKGDWVTYITDSPEPPPERITFTLPVINSASSVAIVATGEDRARAVSFSVSACQDQEEEGPADDDAGTTMIPPASMVQPTDGKLVWFLDEAAASSLEASNGACEHQEGY

SEQ ID NO: 2872 - protein, 515 aa, Zea mays
  VARIANT 267: note = Ancestral polymorphism is F, Derived polymorphism is S
MDATLSTTTTQDSLLFLLPSAATLLSPLLTVLLVAVSLLWLFPGGPAWAFVSRSRATPPGAPGLVTALAGPAAHRALASLSRSLPGGAALSAFSVGLTRLVVASQPDTARELLASAAFADRPVKDAARGLLFHRAMGFAPSGDYWRALRRISSAYLFSPRSVAAAGPRRAAIGERMLRDLLSGAAGREVVMRRVLHAASLDHVMATVFGARYDAASPEGAELEEMVKEGYDLLGMFNWGDHLPLLRWLDLQGVRRRCRSLVGRVNVFVARIIEEHRHKKDDAIGEPAAAGDFVDVLLGLDGEEKLSDSDMIAVLWEMIFRGTDTVAILLEWVMARMVLHPGIQSKAQAELDAVVGRGRAVCDADVARLPYLQRVVKETLRVHPPGPLLSWARLAVRDAVVGGHVVPAGTTAMVNMWAIAHDPAVWPEPSAFRPERFEEEDVSVLGGDLRLAPFGAGRRVCPGKTLALATVHLWLAQLLHRFRWAPADGRGVDLAERLGMSLEMEKPLVCKPTPRW

SEQ ID NO: 2873 - protein, 298 aa, Zea mays
  VARIANT 238: note = Ancestral polymorphism is V, Derived polymorphism is A
  VARIANT 261: note = Ancestral polymorphism is G, Derived polymorphism is V
MAVVGAIIGAGAGGLMNGRIAIVRTQCHQPIRLASWRSRSSFVDPSLRPYLPVQSGSCLVACRRRPPAKLEVLCVIMSSRRYPSGGEKRKRKKRVDDLIDSQRGAIDKFFKSNASASTNPNDTFALAIVPVGIQEPTNENSREEEHVDINADDNNILKSSTSNSLSSLAHNGCRNWRNISTKLREHENSVEHFQNMNKWNELRTRMRKEETTDKDLQKQINKEKERLRQVLLRIIAIVKFLGKCNLAFRGSIEKLYSDSNGNFLACVEMIAEFDLVMQDHLRHIQNKEIHYHYLSPKI

SEQ ID NO: 2874 - protein, 534 aa, Zea mays
  VARIANT 138..534: note = Derived polymorphism lacks residues 138 to 534
  VARIANT 26..534: note = Derived polymorphism lacks residues 26 to 534
MERKGGCCLAPRYAATAAAQQAGAAWQMGRIMLKFRPIAPKPAAMAPAPTPTPVTGPAVSAGKGKRKAACGGGGRRGRKPKKAAKVAMVTAAPAATAAAQDVGDCRKHCDKEKSSSSPSSSSSGTSSVDSSPPPRPQQRQLATLPLMPETAADKTVACPAIPETRLHYRRIRPCRSCPKLLVDWAVNLGFHLVQLLPINDTSVHGMRWDSYPYSSLSVFALHPLYLRVQALSDAIPVLRYTFVMLSNLFIEEIQQAKKHLDKKDVDYEAALSTKLSIARKIFNLEKEKVLNSSSFQQFLSENELDKLMSEGTLHHDVIRFHYYVQYHLYIQLSEAATYARKKNVILKGDLPIDVDRNSVDTWVYPTLFRMNTTTGAPLDYFDKNEQNWGFPTYNWEEMSKDNYGWWRARLTQGGAVSLKEATVPTPRLISSQELEFFRPHIEIKRDRQTSEVFEVLDAEGPYRSTREQLFSIGQMLRIRKGPLKGYLCRVVRIFRNDVTVKLDSLLKIVTVQADLLSVPANRGPKYGITSRLPY

SEQ ID NO: 2875 - protein, 325 aa, Zea mays
  VARIANT 162: note = Ancestral polymorphism is M, Derived polymorphism is T
  VARIANT 56: note = Ancestral polymorphism is D, Derived polymorphism is N
MAVMAGAASMEVEQDLPGFRFHPTEEELLGFYLSRVVHGKQLHFDIIGSLNIYRYDPWDLPAMAKIGEREWYFFVPRDRKAGSGGRPNRTTERGFWKATGSDRAIRSSADAKRVIGLKKTLVFYQGRAPRGTKTDWVMNEYRLPDHSAAGRAAPPLPPKEDMVICKIYRKATPLKELEQRASAMEEMQRRIGGATATSLVQAAGSTGDDYLSSDDTYDTSFLQFPSSSSPAPSGDSYGAPAAAPREAKTEAADATTVTVASTSSSSSLLHAASVAGPAVRHGDLPTLQVPTHLGVADWTQMQDPFQLRSPWQDQLFFSPLAHLLY

SEQ ID NO: 2876 - protein, 291 aa, Zea mays
  VARIANT 16: note = Ancestral polymorphism is P, Derived polymorphism is H
  VARIANT 108: note = Ancestral polymorphism is R, Derived polymorphism is Q
MASRDFLRVFGAGAGHQDDAAAAAGRTDDVELSLGLSLGGRFGTTDAKRPRLARSSSIASVCSVSSLHADADAAPLPLLRTTSLPTETEEERWRRRETQSRRRLEARQKRVERRNSMASLAPAVVGGTGRRSNASQGSNSASTTEQGIGGSASNQSTDARSPSSTSDNNTNQNNMLPPTTKAAEKPLNGTATEQPQPRLRTLGSLTTRTSSTGDIRKLMMEDMPMVSSKVEGPNARRIDGFLYRYKKGEDVRIVCVCHGSFLTPAEFVKHAGGGDVSNPLRHIVVNPAPFS

SEQ ID NO: 2877 - protein, 853 aa, Zea mays
  VARIANT 576..853: note = Derived polymorphism lacks residues 576 to 853
  VARIANT 562..853: note = Derived polymorphism lacks residues 562 to 853
  VARIANT 559..853: note = Derived polymorphism lacks residues 559 to 853
MGKRSGSSRKDKNKVILPPELPPEIHDDEVDVSEEDIEFYATDSSNVTPFRHFDKKSIDRYVGRVAGRDEGEVERLYEERQKRKATESSGRPREDDDYLEVDPVDALPTKTLQGELVYNRAKKARSEDNSGSVKTKAQENGANAKTNTKKDESKGKSKNKKGDDNKVKNIQSQTEVPKGQLHSNVLEEVKEELSAEELFEKKKAQLAELGMSMLEDPESNIRSLNDMLSISNDRDQKVVKLGVMSLLAVFKDVIPSYRIRQLTEKELAVEVSKEVKKTRYYEYTLIRCYKAYLQKLISLEKQPYFYTVAVRCMCALLDTAPHFNFRESLLASVVKNLSSSDDVVRKMCCEAIRSLFINEGKHRGEATIEAVRLIADHVKLNDCQLHPDSIEVFLSLRFDEDIGKDEIQEEKVKPKRNKRWQKNQEVPKQLPVNDKKKTRQELISKARKEVDADLRAVSFTLDPKERKGIQKETLSALFETYFRILKHSMAASNSRTKVNNVSPGGSHPLLTPCLEGLGKFSHLIDLDFMGELISCLKKLSGYSDRQDEIPNDNALSVSERLQCCIVVFKVWRSNLEALNVDLQDFFVQLYNLILEYRPDRDHGEVLADALKTLLWEGRQHDMLRAAAFIKRLATFALSFGSAEAIAALVTLKHLLQKNSKCRNMLENDSGGGSLSCLVAKYNPEATDPYLSGALASVLWELSLLEKHYDISVSSMASNILSMANLNPTQNPVPILNVNPLEAYRDLSLERELSKPASKALPLNLKRKRRAKEFVALSPDVLQKADCSVDKDELEEKLQSHFSVLRGISENERLRAELNHTLSSINMYKEYKKQKRKNMKVKTGRKKNSKALAV

SEQ ID NO: 2878 - protein, 414 aa, Zea mays
  VARIANT 372: note = Ancestral polymorphism is R, Derived polymorphism is M
  VARIANT 329: note = Ancestral polymorphism is R, Derived polymorphism is G
MSDVTSDSAQRRRSPPPPSPSPSMPRFQQQPSGRQPPPPGADPFAFGIVAFIGICFVLVSLSVPSSVLHQVPEGHVGVYWRGGALLKTITPPGFHLKLPLITQYEPIQVTLQTDQAILITPYLIFVRDIPCGTKGGVMISFDKIEVVNRLRKEFVHETLLNYGVHYDKTWIYDKIHHEINQFCSAHSLQQVYIDMFDQIDETMKEAIQRDCTRYAPGIEIISVRVTKPNIPGSIRRNFELMEEERTKALIAMEKQKVAEKEAETQKKIALSEAEKNAQVSKILMEQKLMEKDSSKRQEQIDNDMYLAREKAVADANYYRHGWQYHILFRSILLMHASCFLPPTNRIWFGLSRILKEAEANRLKLTPEYLELRFIESIANNSKIFFGEKIPNMIMDQRLLKNYLDAAPRKDHYEM

SEQ ID NO: 2879 - protein, 174 aa, Zea mays
  VARIANT 162: note = Ancestral polymorphism is D, Derived polymorphism is Y
  VARIANT 154: note = Ancestral polymorphism is R, Derived polymorphism is H
  VARIANT 145: note = Ancestral polymorphism is I, Derived polymorphism is T
  VARIANT 141: note = Ancestral polymorphism is D, Derived polymorphism is Y
  VARIANT 130: note = Ancestral polymorphism is R, Derived polymorphism is K
  VARIANT 129..174: note = Derived polymorphism lacks residues 129 to 174
  VARIANT 120: note = Ancestral polymorphism is F, Derived polymorphism is S
  VARIANT 111..174: note = Derived polymorphism lacks residues 111 to 174
  VARIANT 107: note = Ancestral polymorphism is S, Derived polymorphism is G
  VARIANT 98: note = Ancestral polymorphism is M, Derived polymorphism is T
  VARIANT 69: note = Ancestral polymorphism is I, Derived polymorphism is T
  VARIANT 65: note = Ancestral polymorphism is S, Derived polymorphism is R
  VARIANT 40: note = Ancestral polymorphism is L, Derived polymorphism is P
  VARIANT 35: note = Ancestral polymorphism is G, Derived polymorphism is D
  VARIANT 31: note = Ancestral polymorphism is A, Derived polymorphism is T
  VARIANT 23: note = Ancestral polymorphism is V, Derived polymorphism is F
MKHAYRVIVADPPYLSKECLEKVAKTVSFLARPEGSFLLLLTVPNCTVVPYQSLFVFLSRKKIYSQNDIILGIEVTEVDIEAFEAKYRGLKCRTSVMMNFLGSAKLSCLLWLSAYNFDLFGDIFNDIQLKHLCIVFQRGADQDTIILMATKASRTENQDDIDAIIVGMMADPKE

SEQ ID NO: 2880 - protein, 242 aa, Zea mays
  VARIANT 170..242: note = Derived polymorphism lacks residues 170 to 242
  VARIANT 135: note = Ancestral polymorphism is G, Derived polymorphism is R
  VARIANT 125: note = Ancestral polymorphism is N, Derived polymorphism is I
  VARIANT 33: note = Ancestral polymorphism is P, Derived polymorphism is L
  VARIANT 27..242: note = Derived polymorphism lacks residues 27 to 242
  VARIANT 5: note = Ancestral polymorphism is C, Derived polymorphism is Y
MEISCGCRKFERMGLLCSHALKVFTLQNVDTIPEKYVLKRSTKDARRSMYTLAQDDSTQQECTEAEFAYRNRAMHYAYNLIIKSQELEESRKIFWDSLETGEKALEVFFEMRNMRTQAAKDADKNVKKKKKTSKGTNPKKAKQAPGVSSTGPELIVHTNEHQFQSSQDAQGNATIGRPYYYQSGGRMLLPLIAPADAPVYVNPKQYEGILCRRRARAKAESENRLTKGRKLWQYPDNIELRN

SEQ ID NO: 2881 - protein, 200 aa, Zea mays
  VARIANT 112: note = Ancestral polymorphism is T, Derived polymorphism is A
MEASSSALALVAAVLLLSSPLAASDFCVCRSDQPTAVLQKAIDFACGPQGGADCTPILQGGGCYSPDTAAAHCSWAANTYYQNNKARGATCDFGGAATVSTTDPSTNDSSTTDTSFSGCTFASSATSAGAGTGTGTAGSSTFSPSAGTGFNGTGNGMGGSTTTGLGPTGNAFDAAAAAAPGLLPSAASLGLALAVLSFLT

SEQ ID NO: 2882 - protein, 355 aa, Zea mays
  VARIANT 11..355: note = Derived polymorphism lacks residues 11 to 355
  VARIANT 23: note = Ancestral polymorphism is V, Derived polymorphism is I
  VARIANT 34: note = Ancestral polymorphism is S, Derived polymorphism is F
  VARIANT 169: note = Ancestral polymorphism is K, Derived polymorphism is R
  VARIANT 267: note = Ancestral polymorphism is R, Derived polymorphism is C
  VARIANT 296: note = Ancestral polymorphism is E, Derived polymorphism is V
MRVRCNYRLLQLRLFLIVFSSAVHPACALALLLFCANWATADANADDLRQVLGFLSVPSAAFVASFAGDEHSPGPLLKKTGIFCIHRGSSRTFSFLQFSSSWIAMANEFPDEVLKSVFPLLDGKDLVFCMLVCRQWHEIARDDYFWKCICSRKWPSICKQPPSGANYKKLYLTFSKPREMQNLPVPRLTFEDIVFYIDMWLEGSLIFSQAVSGRTLRAGLQGAPPPGIPDILAAHLSSQDCILMLEVEPKLAVPMGPAITVSVLANRKDSNKMACIINKSTFDYIDSNAARALAYEYLRFSPRHPFTSDIRAWMSLLFLCKGANTIEVFGIELDFCDAAKSEKEILWLLDMLDWK

SEQ ID NO: 2883 - protein, 257 aa, Zea mays
  VARIANT 157..257: note = Derived polymorphism lacks residues 157 to 257
MGGQSHDGSTEWKETWWEKSDWTGYKELGAEKSGRNAEGDSWWEKWKEVLYQDEWSNLARIERSAEKQAKSGIENAGWYEKWWEKYDAKGWTEKGAHKYGRLNEQSWWERWGEHYDGRGFVLKWTDKWAETDLGTKWGDKWEEKFFAGIGSRQGETWHVCPGGERWSRTWGEEHFGNGKVHKYGKSTTGERWDLVVDEETYYEAEPHYGWADVVGDSTQLLSIQPVERPPGVFPAIDFSSAPPPKDAPPGMPPSPLD

SEQ ID NO: 2884 - protein, 378 aa, Zea mays
  VARIANT 7: note = Ancestral polymorphism is R, Derived polymorphism is H
  VARIANT 113: note = Ancestral polymorphism is V, Derived polymorphism is A
  VARIANT 349..378: note = Derived polymorphism lacks residues 349 to 378
MSPFAARVASLAALLLALLLAAPASAANFTCATVGKTCQSAIGYAVPNATTYGELVARFNATTTLAELLGANGLPATTPASTPLAAKATVRVPFRCRCGSNGVGQSDGGPFYVVYPLDGLDHIAREVFGGFVTYQEIATANNITNVNLIVVGQKLRIPLPCTCDQVDGADVMHFAYSVAKGDDPPGIAARFGVTETTLLSVNKITDPKTSLQQGQILDVPLPAKVISQSRLPSVLTVRANSVLPVCKSSVGNASADYNLLVPNGTYVLTADDCIQCSCSASNYEHLDCTPVKGGRCPAVPPCSGGLTLGQVNGTGCASRMCAYSGYTNTTSLTIHTSLVPANETACQNGGAARAEFAGSVLRTSLIAFLMSLILICLL

SEQ ID NO: 2885 - protein, 667 aa, Zea mays
  VARIANT 136..667: note = Derived polymorphism lacks residues 136 to 667
  VARIANT 424: note = Ancestral polymorphism is K, Derived polymorphism is E
MVAKNVVSRGPGAVLRMDSKSVDLERGSTRRQTVCSEVLKCKYSKAETNIVILKRLGAMVLHGVDAKRMRFHTDLKNRRFDHIVFNFPRGGFRGKENDLRMIDLHKELVWGFFRNARHIVRQLGEVHVTHKSGEPYGSWDLEHLASESSFAMVDKVPFQREDYPGYNQKRGDGKRCNKPFDLGACCTFKFQIRNLKKLKQMNRRSRLIPNLGGNNFHPGHSVTDRGVFHPVAPVEARSWHHFSPLAHTGSMLMSPQPYTVNQCQRSGRCGSYPKPVESCHPVVSMPGPCLNDLPAQGGIPPPLPMSRIPSPDLLAPREQPWYQQRTILDHLGVDDYFFAREHQMSLQREYEMKRQVIPLEHRHTDRESVEKLEWLHRMIALYDGKDTEEQSHCSPSWSSEGEGFDVTKSGDARVGLVGFPSIGKSTLLNKLTGTFSEESLEKKYFWIDCSLDLLTDKYFRTIIRPGLVEHLTLSNYFLPFYPATRQIICYNGVCCWRHIPIRRPIMYPGMDLKFNATPALGEQTTFKWVIDHGCKMMKLLNPSNQLSPQKTKKFKEIQFQKLQRLPDGCHPDFDNDHLCSINNHDLLPKMSTPSADLHLLPETGVENMRTPKSLHAELKRELSKLNTVLKLPCWCAASFLKYTELDHRESLALASDGLNYECNEAPS

SEQ ID NO: 2886 - protein, 559 aa, Zea mays
  VARIANT 485..559: note = Derived polymorphism lacks residues 485 to 559
  VARIANT 71: note = Ancestral polymorphism is A, Derived polymorphism is D
MDGSMWCAANYVPLTPLSFLERAAVVYGDRAAVVCGDRRFSWRETRERCLAGAAALARLGVGRRDVVAVIASNVPAMYELHFSVPMTGAVLCTLNTRHDAAMVSVLLKHSEAKVFLVESQFHAVARDALRLLADAKDRLPLVITVSDPSSSSSTGDGRGSNDGSVAVAEYEALLRSAPRDFEIRWPADERDPISLNYTSGTTSRPKGVIYSHRGAFLNTLATVLVNEMATMPVYLWTVPMFHCNGWCMVWATAAQGGTSVCIGSVSPGVVFDHIVRHGVTNMGGAPTVLSMLANAPAADRKPLPRRVRISTGGAPPPPQVLAKMDELGFDVAHGYGLTETYGPATTCVWKPEWDALPPAERARMKALQGVAHAMVQEVAIKDPASMETLPSDGRAVGEVMLRGNTVMGGYYKDAGATEEAMRGGWLRTGDLGVRHPNGYIQLKDRSKDIIISGGENISSIEVESVLFGHPAVLDAAVVARPDDHWGEAPCAFVTLRDGARATADDIIRFCRARLPHYMAPRTVVFSDLPKTSTGKTQKYLLREKARAMGGLRKPDRSRL

SEQ ID NO: 2887 - protein, 79 aa, Zea mays
  VARIANT 56: note = Ancestral polymorphism is A, Derived polymorphism is T
MSCSCGSSCNCGSSCKCGKMYPDLEEKSGGGAQASAAAVVLGVAPETKKAAQFEAAGESGEAAHGCSCGDSCKCSPCNC

SEQ ID NO: 2888 - protein, 371 aa, Zea mays
  VARIANT 298: note = Ancestral polymorphism is L, Derived polymorphism is H
  VARIANT 18: note = Ancestral polymorphism is A, Derived polymorphism is T
  VARIANT 17: note = Ancestral polymorphism is G, Derived polymorphism is R
  VARIANT 15: note = Ancestral polymorphism is R, Derived polymorphism is H
MRLCPCDGVFEAAVRCRAIGLGARARESLPPWQSVEHSCRSAALALSRWLAAAPVVWWRMASKYVARVPSPWWAPQRRLVGSWVSVCSVKCGALGGRDVVCAAVSFRPCIDIHKGKVKQIVGSTLRDSSNDGMELVTNFESDKSPAEFAKSYKEDELLGGHVIMLGSDPASQAAALEALHAYPGGLQVGGGINLQNAMSYLNEGASHVIVTSYVLSDGKMNIERLTKLVELVGKQRLVLDLSCRKKDGRYTIVTDRWQKFSDVFVDEPALEYLAAFADEFLVHGVDVEGKRLGIDEELVELLGHHSPIPVTYAGGVSTMDDLERIKKAGKSRVDVTVGSALDIFGGDLPYKDVVLWHKKQSMVGQVSRNMW

SEQ ID NO: 2889 - protein, 132 aa, Zea mays
  VARIANT 18..132: note = Derived polymorphism lacks residues 18 to 132
  VARIANT 17: note = Ancestral polymorphism is R, Derived polymorphism is C
MHQHLRRSNALSASVIRYLLDPDIYTDGRISVQGIDVVLFAPDDAKATQTADPNRKKIKLHAGHHPRPRRPPDDSKAGSPCSRAGHHPQEEDQAPASTSFHLLSLPLPYLSKGTNLSASSVDSDFSLLLVLQ

SEQ ID NO: 2890 - protein, 597 aa, Zea mays
  VARIANT 39: note = Ancestral polymorphism is R, Derived polymorphism is G
MLLISLVKFVQELLTVVTLMGTGKPGDVLPILITVLGTRALIGWALGFLLRAIAKEGEESISIFCVTVAHNKLTTKWIRAAPPITCAQPNIQISQPLVKQSTVDNMLSTHEANADQFDLLSYGNLRGLEASRSSEESNFGNDLKDGSSVSSENFGSSCLPGESYQSATVDHEKRPLSDVKTCQIACKRPKQTDHCTWLYSFEEHPLTSEVGISSPALYDGLVEIKQPNDIPAINGATTCSGSSVIPCRNHDQSILVENLDIPDWATSFPGYFEDCGPVVTYSHVDDIGSPRKGVPIGPEHQADIPEWRPLNSMIVPGASEFCANLDCSSASTSESVPRGDDYVSDKWIRYCVVPVTCCSSPVDWAGDSKIDCNCSDEGSMRCSRQHIIEARDNLKMILGQDRFRELGLCEMGEDVALRWTDEEEKLFQRVVFLNPVSLGKNFWDHLPDAFPNKTSQEFVSYYFNVFMLRKRAQQNRSDVLAVDSDDDELHGEPLAERVEGDPAVESSTHEHSVSNSLPMDDDHKEFEGAQFDGSLCEKSVYNAVECRHLPNQMPADSNTVNTALDVCDQDNGAQCSEFHMSLPSDTSNSLGDQSASV

SEQ ID NO: 2891 - protein, 346 aa, Zea mays
  VARIANT 1: note = Ancestral polymorphism is M, Derived polymorphism is V
MWDVAVLASSATRHSCKVCRKGFPCGRSLGGHMRSHSLADELDDEEEHQQRQGLDCATAPGAGGHGLRDKPKKTRRLSSLSDCGGRGDVFSPCESNVDYRRARGGGKAMELERDWKQEGLMPPPRRRRSMRVPARTPPPTAFDKEPEDVALSLIMLSCDIVDRRGCSTAVGAKYSPGEDSTRRDYQYEYHHHDADSNDGTKINKRKLHHSDVGDEKRGRYECPVCGRTFRSYQALGGHRASYKRINSNCSIAKPILDYQPEPKPSVETNTTSMVSNNRTIKFECRICFRVFSSGQSLGGHKRSHSIAGELYEHVHSVDDDDVGDDEQPLISDEFLDLNLPAPGVED

SEQ ID NO: 2892 - protein, 644 aa, Zea mays
  VARIANT 278: note = Ancestral polymorphism is N, Derived polymorphism is K
MRAAAASAIRRLLPRYSISSGGGLHRHSQSQNQSGYCFNPHWDYTNRLARPRALLDFSPCHPRWSSPSSPRSVASPQFFCSLSGTEEEEAVVLDMDAGTVRCAANHAPLSPISFIERAAAVYGARPAVVYGDRRHTWAETRGRCLRVAAALATRFGIARGDVVAVLSPNVPAMYELHFAVPMAGAVLCTLNTRHDAAMVSVLLKHSGAKVFLVESNLLDVGRAAMKRLAESNSAAALPVLLTISDDTDSDDYEDLVRNGPARFDIRWPADELDPIALNYTSGTTSRPKGVVYSHRGAYLNTIATVLAYDITAMPTYLWTVPMFHCNGWNLPWGVAMQGGTNVCLRHFTGEVIFDSITRHGVTHMGGAPTVLNMMANARTATAERKPLPWPVRVMTGGAPPPPRVLFAVEELGFVVYQIYGLTETYGPATVCTWMPEWDALPAEERARLKARQGFHHVAMQDVDVMNPSTMESVPHDGQTVGEVMFRGNTVMSGYYKDLKATKESMAGGWLHTGDLAVRHPDGYIQIKDRAKDIIISGGENISSIEVESVIFSHPAVLEAAVVARPDHHWGETPCAFVKLKDGASATEAEIINFCREKLPHYMAPKTVVFEDLPKTSTGKTQKFVLRDKARAMGSLTKVACSSKM

SEQ ID NO: 2893 - protein, 118 aa, Zea mays
  VARIANT 40: note = Ancestral polymorphism is A, Derived polymorphism is T
  VARIANT 49: note = Ancestral polymorphism is G, Derived polymorphism is C
MSGVQEQFEIKFRLPDGTDIGPRRFPPASTVATLKETIIAQWPKDKEKGPRTVNDLKLINAGKILENNKTLSECKSPICDFSAMTTMHVVIRAPTSSKQSDKRAEKKAKNFRCGCAIM

SEQ ID NO: 2894 - protein, 1050 aa, Zea mays
  VARIANT 685: note = Ancestral polymorphism is C, Derived polymorphism is S
  VARIANT 205..1050: note = Derived polymorphism lacks residues 205 to 1050
MASPSPASARPQRSPDEVEDIILRKILLVSLTPPANPSPAVAYLELTAAELLSESRPLLALRDAAERLLIDRLSLPDPPAGSPTPFAYLVSAFRRAADEARKISTIRDAALRARLAASIAHLRALILSYARIVAGNPDTFPTPPGAQHPASDLLVFLLAEAADPLDPTPAPGAPPPPGFIDEFLGSADYDSIEPAMGELYELLRQSVDKVSALGDFQRPLRLLRRLVGIPNCAKALVNHPKWIPKNQIMLIGEGRVMELYSVLGAFFHVSAIRDREFASKPDVGQQCFSEASSRRPADLLSSFTTIKSVMNGLYDGLKDVLLILLKNLDTREKVLEYIAEVINKNASRSGMQVDPLKCASSGMFVNLSAVMLRLCEPFLDNMEAKKDKIDVNYLFCNNRIDFKDLTAINASSEEVSSWIESINNEHAQNNASGEARFAESQEATSSGKNSTASQLRCSKKENFSFICECFFMTSRVLNLGLMKAVSDFKHISQQLSRFEDDLESNRAVRDQGGGSPQLEQDITRLEKIVEILSQDKFCYEAQILRDGAFLQRALSFYRLMILWSVNLVGGFKMPLPSQCPKEFACIPEHFLDDAMDLLVLTSRIPKALESFVLVSILLMHFYYDIVLSNLRSDDFLSFIIMFMGSTSYIKNPYLRAKMVEVLNCWMPQRSGLNSTASLFEGHQLCLDYLVGNLLKLYVDIEFTGSHTQFFDKFNIRHNIAELLEYLWDVPSHRNAWRQIAKEEEKGVYLNFLNFLINDSIYLLDESLNKILELKEIEAEMANIVEWERRPAQEREERLRVFHQWENIVRFDMRLANEDVGMLAFTSEQIPAPFLLPEMVERVASMLNYFLLQLAGPQRKSLTVKDPEKYEFKPKQLLKQIATIYVHISRGDKESVFSAAISKDGRAYNDQLFSSAANILWKIGGDPKIIQEFVQLAGRAKAAASEAMDAEAILGDIPDEFLDPIQYTLMKDPVTLPSSKVTVDRPVIIRHLLSDSTDPFNRSHLTQDMLIPNTELKLQIEEFVRSQQSRKRTAAALLEIGEAEGTDDMAE

SEQ ID NO: 2895 - protein, 51 aa, Zea mays
  VARIANT 1: note = Ancestral polymorphism is V, Derived polymorphism is M
MAVAQKKGDSSKSDSDDDSDEEVPPESKAPVATIKKEDSSESESESVSEVE

SEQ ID NO: 2896 - protein, 785 aa, Zea mays
  VARIANT 299: note = Ancestral polymorphism is M, Derived polymorphism is T
MALKLCRRLSGFIVGANSRCCRLSDVDKFALLFQNCTDVRSLKKLHARVLTLGLGRDVILGSEILICYASLGVLCKTRLCFQGFLNNDLAEWNSVMVDIFRAGYPEEAILLYRGLKLRQIDLDEKTVTFGLKSCIELRNLLLGKGMHADSVKLGLSRDKFVGSSLVGLYSKLARMDDSQKAFEEILDKDIVSYTSMITGYSENMDSTSWNAFKIVSDMSWSNLEVNRVTLVSLLQVAGNLGAIREGKSVHCYSIRRDIGISDEVLETSLVHMYMQCGACQLASAVLKNSAQSVASWNAMLAGLVRTGQSGNAIHYLYIMLYEHKVVPDSVTYANVISACAELCNSGYAASVHAYIIRRSIPLDVVLATALIKVYLKCTRITISKRLFNQLVVKDTVSYNAMIYGYLQNGMVNEAIALLKEMVTECVAPNFVTILSLLAAIADHKDFARGRWIHGFSIRHGFCSNVDIANQIIRMYSGCGKIASARIVFASFENKNLISWTTMMMGCLFCGHGGQTVELFQLLMQQHDNKPDSIAVMTAIQAVSEFGHLKGVKQVHCFVYRALLEKDTKTMNSLITAYAKCGRLDLSVSLFLSLEHRDLDSWNSMISAYGMHGFYTKVLEMFKLMEEGNINPDGLTFSSVLSACSHAGLIKEGLHIFQSMTSMYSVRPQEEHYGCFVDLMSRAGHLEEGYKFIKLSTLNDKSSVLCALLSACRTYGNTMLGQVISNELLEVGQQNPGTYALISEVFAQKGQWNKSASIRNRAKENGLRKLPGSSLIESVEQVSKVC

SEQ ID NO: 2897 - protein, 377 aa, Zea mays
  VARIANT 131: note = Ancestral polymorphism is L, Derived polymorphism is P
  VARIANT 165: note = Ancestral polymorphism is P, Derived polymorphism is S
MAAREASAPAPSTPHAGDGVSRPPRPTLALPPRSVIESLFAAGAAETSPGPLTLAAALFPDAPSPAFHGSFTQLLVGAIGSPAVPSSPSPFAVPPRLSPATLLGSPGFFSPTAFPQLRLRIGPPDALITAPASFEMSHQQALAQVTAQAVHSQYNMINHADYTISFSSTTTPALVTAQHANFSGNLTSAQEKPALPSHTGNSNIESNEVSQGLKTSAPTFDKPADDGYNWRKYGQKAVKGGEYPRSYYKCTHTSCAVKKKVERSAEGHITQIIYRGQHNHQRPPKRRSKDGGGQLNEADDFHENEDTSTRSEPGSQDHSGKHEGSNDGIPGPSVSRRGEVYEQLSGSSDSEEERDDEQRAGNGCPGYTNANRRYYLS

SEQ ID NO: 2898 - protein, 555 aa, Zea mays
  VARIANT 525..555: note = Derived polymorphism lacks residues 525 to 555
  VARIANT 509..555: note = Derived polymorphism lacks residues 509 to 555
  VARIANT 484: note = Ancestral polymorphism is R, Derived polymorphism is W
MGSCTSKSALDHRRPARYYTRGRRVHSRRSIMPEAPQSQQLGDASRGRMTGFSMSEIVHVETANRGKSEHSKTFHLTQMEWHHSQRDSKGCSNEDAWFDSVSILEDDSDDEFKSVDGDSDEDEEQAEKQQYASVSSFADALSRIGDICRGVPLPDILALKGDGRRSQQSMPSSFGLKAVLIKDKSDAADDDDDDGDGGGGKETSTPSRLRKLLQSISFNERVQQLTGGSPAKKKSTVIRLSYKTTSSCGGDDYEDGGGGGGGECGRSKKYVVRPKVGQTVPCGGERPATGCWSRMDPSLFKLRSDTFLKDKKKCAAPNYAAYYPIGVDLFACPKKVHHIAQHLDLPQIKTHPKIPSLLIVNIQMPTYPAAMFLGDSDGEGLSLVLYFRVSECYDKEVSEHFKESMMRFFEDETEKVKGFTSESTVSYRDRLKIMAGLVNPDDLQLGSTERKLVQAYNEKPVLSRPQHSFYEGEDYLEVDLDIHRFSYIARKGLDSFRARLKNGILDLGLTIQLNAVILQAQKQSELPEQVLCCVRLNKIDFTDQEVPTIVTVDDN

SEQ ID NO: 2899 - protein, 151 aa, Zea mays
  VARIANT 78: note = Ancestral polymorphism is L, Derived polymorphism is I
MPLLADGRSPRAIRRLPSPARNPFHLRPQRSPMCQILLGRAPTAGATPPRATTCGEWKVRGAIKGGAKVIGGGGIFNLFDWKRKSRKKLFSNSPEGSKLVKRSEETLLSGCLHLLDELKTLANDCQHREMSLEVVPDDGGWWRLGPLLLQV

SEQ ID NO: 2900 - protein, 590 aa, Zea mays
  VARIANT 191..590: note = Derived polymorphism lacks residues 191 to 590
  VARIANT 389..590: note = Derived polymorphism lacks residues 389 to 590
MDDAWSWLASLPPPLRDEDGPDTPLPAPWSLPLAASTDGASIVLRADTSPAASSSPADGDDGDGEPALLVAFSVAINGAGGDARALWASEGFAASSPVAPRVQLLVQLLNEVLALSPYVPCLGAGVDGLGGDASEAKVDAETVSAVVGAAEAGPSAPGAAFFSLALLLRLFWLCATDAPADAGYLYFRDLGSEIERGLGECRPALAVFLRSVGPDVEDRFMRSLGYMLAKWCLLREIQAVAGSAAKLEAPRRRRALPAACLSYATEVHGLLILKGYAPVLAMPRVTGPASTSIAASPHELPEEPALRYGLAHQQLEAVAQLEYAARVRDRRFVTVSVRVDNVRVRVAPLAFRSNDGGGNDGEEAEDDDDAGVDDIMDGESHFPSRIRLWVGPRFGASYATGPSLGRSTGNPERDVEMTRTVKGAFSGATKPANGGVVPRIKAKMRSSARTRSRSWRWEQEAEGSAGVFEGVLYDPVTGTEVSAWRPAGTGGGGGTGATDPRNGMRRRYGGPGRAFSKMRGLVVAGDELPEEMTWRVGREAEGRTLRWRLGLKAWVTYLPNEARSRHFETRCIEWAHEVDLPLLAVDGDQS

SEQ ID NO: 2901 - protein, 465 aa, Zea mays
  VARIANT 49: note = Ancestral polymorphism is D, Derived polymorphism is Y
MTSPGGVFSAALVAEDFPWVDMEEEMGMAPDMYREVFDLAQRGTRAFRDRLFDEAISCYTKAQNLRPDPIILGNRSLTFCRLSQLLRERSAADSEYQPLNGLDPTTHAELALKDAEKILSINSNSPRPYILKAYALFLMEHYHEARETLLAGLQVDPLSHVLQTCLNDLDRNTNIAAGARRARLARIDDFECTLCFKLLYEPVTTPCGHSFCRSCLHQSMDHGNKCPMCRTVLFIGPRTCPISVTLSNIIQRNFPEEYAERRSEHETMTYAGVDLMPLFVMDVVLPSQKMALNIFEPRYRLMVKLLQNYIHFYQTRLLIIFLDPTDKAPIGIIKRAIELKDCILILLIEQFIKILSLSMFDLIFLHQEVRRIMEGNHRMGMVAIDSATGTVADCGCEVEISECEPLPDGRFYLEVEGTRRFRIVRSWDQDGYRVAEVEWLKDIPLPEGSQGRREVKSSYLSHAFL

SEQ ID NO: 2902 - protein, 270 aa, Zea mays
  VARIANT 2: note = Ancestral polymorphism is P, Derived polymorphism is L
  VARIANT 29: note = Ancestral polymorphism is L, Derived polymorphism is M
  VARIANT 69: note = Ancestral polymorphism is D, Derived polymorphism is Y
  VARIANT 154: note = Ancestral polymorphism is N, Derived polymorphism is S
  VARIANT 155..270: note = Derived polymorphism lacks residues 155 to 270
  VARIANT 161: note = Ancestral polymorphism is A, Derived polymorphism is T
MLVFGYATKEADEAMLFRHMVPSKLWKVLSWLNVGTEKKLANVKVVVDQFIYEEIYKRKAWGSNKSQADVLSMYTKLSLDPSMSEQQKTDFLREMVVGFIIARKDLIVVKLTWFFYMMCKHPKVEAMILEELKDLQSCITVMWLKQVSLLFLSNQISSLPASVFERARLSRLQVHRTAVWLAEPAVRMRLMALLVDGCRGLSGGAMAGVIHGQAQHGDPMFQEFAGQLLRWVCSSLFEMVRSWVLEGELEDVFAEFFIVGKPVNYQPERR

SEQ ID NO: 2903 - protein, 191 aa, Zea mays
  VARIANT 138: note = Ancestral polymorphism is A, Derived polymorphism is T
  VARIANT 153: note = Ancestral polymorphism is K, Derived polymorphism is Q
MCRQLGRQAGFHPAMSAPNSDSNMQQLVPIAPPGKASGGDSEKGLVVVDLAGKRSGGVKLREDEEDLEVKLRRIMENVPVRVSNTSGSSAGSGSGDFHQYRQMRRREQDRLARMDADYQKRKKMAEFELRREERMKAAEERTAKKRLKRQKKKQRKKEKRAKTGNNGGDEPNRVESSDDDHGSDDDDESKQ

SEQ ID NO: 2904 - protein, 618 aa, Zea mays
  VARIANT 281: note = Ancestral polymorphism is G, Derived polymorphism is R
  VARIANT 284: note = Ancestral polymorphism is R, Derived polymorphism is H
MAVMTDMPAATALRAPAPAPAGCDGQKDAEKLRFIEEMTSDVDAVQERVLAEILARNAGTEYLARCGLAGATDRAAFRAKVPVVTYEDLQPDIQRIANGDRSPILSAHPISEFLTSSGTSAGERKLMPTIKEELDRRQLLYSLLMPVMNLYLPGLDKGKALYFLFVKSETTTPGGLTARPVLTSYYKSEHFKNRPFDPYHDYTSPTAAILCADAFQSMYAQMVCGLCQRHDVLRVGAVFASGLLRAIRFLQLHWEQLADDIESGSLTPRVADPSVRDAVARVLRGDPELARFVRAECSRGDWAGIVTRVWPNTRYLDVIVTGAMQQYIPTLEYYSGGLPMACTMYASSECYFGLNLRPMCRPSEVCYTIMPNMGYFEFLPVDEASGVAPGDAAQLVDLARVEAGREYELVITTYAGLYRYRVGDILRVAGFHNAAPQFRFVRRKNVLLSIESDKTDEAELQRAVDRASALLRARCGGGAAVVEYTSHACTRSIPGHYVIYWELLATTKASKQGAAQAVAGDVLERCCLEMEEALNSVYRQSRVADGSIGPLEIRVVRSGTFEELMDYAISRGASINQYKVPRCVSFPPIVELLDSRVVSRHFSPAPPHWAPAARPSSD

SEQ ID NO: 2905 - protein, 223 aa, Zea mays
  VARIANT 196: note = Ancestral polymorphism is V, Derived polymorphism is G
  VARIANT 180: note = Ancestral polymorphism is G, Derived polymorphism is S
  VARIANT 143: note = Ancestral polymorphism is A, Derived polymorphism is S
  VARIANT 58: note = Ancestral polymorphism is W, Derived polymorphism is L
  VARIANT 23: note = Ancestral polymorphism is S, Derived polymorphism is I
MAETVGSIVVGEVVNRTSSFILSKHRERLSTREGIERLEMAYVKMEAALELSSRPGRWQQQATATATDASLLRWRRRLRRAADECDAALRRLKLRELQEEDARARLARAPLPRRVARALLCLASALLLLARGGGDDEHSRARAAVQRFERLAGGAAEFLRCAQLGVAPRRCGGGGLSLGGSLVNARATSTRGCRVVLSQHRHRFLGVGPASPAEEKYRKTEMY

SEQ ID NO: 2906 - protein, 401 aa, Zea mays
  VARIANT 298: note = Ancestral polymorphism is L, Derived polymorphism is H
  VARIANT 60..401: note = Derived polymorphism lacks residues 60 to 401
MSLSWWWTRSVGADRERKDELAAVPEHSFQSVALVVGSTGIVGASLVDIIPRADTPGGPWKVYALSRRPPPPWSLPSSSSLTHINVDLTDSATVAEALTPLTDITHVFYVAWSPRATEAENREANSAMLRNVLSVVVPNCPALAHVSLQTGIKHYLGPFELIGKIPTPDPPYTEDVPRLDCPNFYYDQEDVLFAAVSRRGGAVSWSVHRPNLILGFSPRSFFNVVCSLCVYASICRKEGVALRWPGCLGSWESFSNASDADLIAEQHIWAAVDPMAKNQAFNCNNGDLYNWKMLWPVLAARFGLEWTGYDGEEKQFKVSEAMAGKEAVWAEIVRENGLVETRLYDVADWWFIDFVVYEHSADSKLLDSMNKSKEHGFLGFRDTVKSFGKWIDKMKAYKIIP

SEQ ID NO: 2907 - protein, 178 aa, Zea mays
  VARIANT 33: note = Ancestral polymorphism is T, Derived polymorphism is M
MATTHDDCVSLCLMALAAAGGGGMTTQSYAPSTAAWTTQECELRFRCSVCGKAFASHQALGGHKASHRKPTHLQTQQASSSSVTTSSAGSGGGQGRHRCSVCHRSFATGQALGGHKRCHYWDGLSVSLTASGSGSTVKGFDLNLMPATRWGEEEEVQSPLPIKKRRLSGPSLDLSLTI

SEQ ID NO: 2908 - protein, 233 aa, Zea mays
  VARIANT 89..233: note = Derived polymorphism lacks residues 89 to 233
  VARIANT 81: note = Ancestral polymorphism is C, Derived polymorphism is Y
MVAGLEDPAIDPTTLSLALSASAPALNKEDYIAICLAALAGTRKFGLGREQDQHQHTKWCPTTTTHAPSTQQELRFRCAVCGKAFATYQALGGHKSSHRKPPTPERYAAALAAAATAAAARGDHSDETTASSLSGSAASGGPHRCSICRRGFATGQALGGHKRCHYWDGMSVSISLSSAASGMASSSGLSTVRNFDLNLAPLPENGDAGMMKRWAEEEEVQSPLPIKKRRLSD

SEQ ID NO: 2909 - protein, 248 aa, Zea mays
  VARIANT 17: note = Ancestral polymorphism is A, Derived polymorphism is V
MAAGFEALLDSTALSLALPVPVPTMTLLGLKKLNSEDYLAICLAALAGTRGRSGLSKAAAAAAGFGRQEGGGSRKQWSCPPPAPAREEEELRFRCAVCGKAFASYQALGGHKSSHRRPPTGEQYAAALAAAQQAADHSEETTTTSGGPHRCTICWRGFATGQALGGHKRCHYWDGSSVSVSLSATASATGTGTGSSGVTVRNFDLNLMPVPESDGMRRWVEEEEEVQSPLPIKKRRISNPSLTLATCD

SEQ ID NO: 2910 - protein, 101 aa, Zea mays
  VARIANT 71: note = Ancestral polymorphism is H, Derived polymorphism is Y
  VARIANT 80: note = Ancestral polymorphism is D, Derived polymorphism is N
MLSISLKLIMYTFSYHDFYSAFRFSTSWTLPVSAVSSATSTANSGARCPTNFQSSCRQGDEVPDGDNFPLHNRILQQHMNPLKRHVTMPPKSSNKQAQSLR

SEQ ID NO: 2911 - protein, 271 aa, Zea mays
  VARIANT 128: note = Ancestral polymorphism is D, Derived polymorphism is Y
MGIVEEAHNLRVVGEGKRGVIVLAHGFGTDQSVWKHLVPHLVADYRVVLFDTMGAGPTNPDYFDFSRYATLEGYALDLLAILQELGVRSCIYVGHSVSAVIGALASISRPDLFTKLVLLSASPRYLNDVDYYGGFEQDELDELFEAMRSNYKAWCSGFAPLCVGGDMESVAVQEFSRTLFNIRPDIALSVAQTIFQSDVRSLLPHVTVPCHIVQSTKDLAVPVVVSEYLHRHLGGDSIVEVMPSEGHLPQLSSPDIVIPVLLRHIQHDIAV

SEQ ID NO: 2912 - protein, 124 aa, Zea mays
  VARIANT 85: note = Ancestral polymorphism is M, Derived polymorphism is R
  VARIANT 73..124: note = Derived polymorphism lacks residues 73 to 124
  VARIANT 68..124: note = Derived polymorphism lacks residues 68 to 124
  VARIANT 39: note = Ancestral polymorphism is G, Derived polymorphism is D
  VARIANT 33: note = Ancestral polymorphism is W, Derived polymorphism is L
  VARIANT 25: note = Ancestral polymorphism is I, Derived polymorphism is N
MSILGFNEFMTLLMNPLYVFAIFVIYLVGKALWVKSENGREFQHGFLPTILSLSTKFVPSIMNILKRLADAGQEPATAPERQREMKIQPKSTRNSSSYSKVTSPGSFNITTLEIGPEYSNLVAQ

SEQ ID NO: 2913 - protein, 148 aa, Zea mays
  VARIANT 135: note = Ancestral polymorphism is P, Derived polymorphism is L
  VARIANT 46..148: note = Derived polymorphism lacks residues 46 to 148
MFLLLLERPVKKPVKDYMSARENNRHVMLFLHESEKPVKSTTVVEQVDEYVDTRDEMPAATYQSMEIEKDAEEPHNVTVYKCGGCGTTLRAKICASNGQHVAAKQARQDSDSYSVAIAVSNGQPFQTKSKAQRAPSMLMLLASSMEAI

SEQ ID NO: 2914 - protein, 238 aa, Zea mays
  VARIANT 92: note = Ancestral polymorphism is T, Derived polymorphism is M
MAAALRCPASVRVSGPAAAGLAKVRQASRVVAVSGARQSRGGGVAVRASLFSPKPAAAKDARPTKVQELYVYEINERDRESPAYLRLSAKQTENALGDLVPFTNKVYNGSLDKRLGVTAGICVLIQHVPDRNGDRYEAIYSFYFGDYGHISVQGPYLTYEESYLAVTGGSGVFEGVYGQVKLNQIVFPFKIFYTFYLRGIPDLPRDLLCTPVPPSPTVEPTPAARAAEPHASLDNYTN

SEQ ID NO: 2915 - protein, 928 aa, Zea mays
  VARIANT 371..928: note = Derived polymorphism lacks residues 371 to 928
  VARIANT 312..928: note = Derived polymorphism lacks residues 312 to 928
  VARIANT 290..928: note = Derived polymorphism lacks residues 290 to 928
  VARIANT 262..928: note = Derived polymorphism lacks residues 262 to 928
  VARIANT 232..928: note = Derived polymorphism lacks residues 232 to 928
MDPIMKLLEDDEDESLHSGADVEAFTAALNREVEASASASASTSTSVPAGSSSQPTDHGAGLLPQEHKSLLNHDPGQWQDPVKNEIVNQESQQQEQTHAFRNDHPSRPEMVSQGSNNCPLPTNTPKECDLLKAKQEPGSTSQQGIVAQHQPMQQMKSEQTPIVSQQQSMQQMKNQQTPVTNQTNSATTTAKAPVVTFHMLIPILSRYLDKARDIEVQSIFAKLRKNEVSKEYFLKTVRNIVGDKLLKQAASQYQMQAQRSPQTNPSNYSLSGQVSGQQTAPSGSVTGDEQKGYPGAHTIPMRQAIASTRPPQFRPSSSGQMRSNTGYPPSQTNLHKANEMGNMSDGKGVHMLQTRPPNNSIPVQTMQHHVQRPQTSSPVFGANSIHARPFPRPLGGPAAPFRPQMADSNPKAQLIQGAVTTVSGSVPTRSIVSGNAPGNQSTRQQSANKEQKTISFTRTAHMNNETVSQNSEFSQNSFAVMHAKQVNQALGSSKVSAGMESQSQQLSAPKPLAATSLSQTQSHGIQEEPKIQIQSSVQAPPAAASKTPQRKASSGQKKPLEVLGSSPPPSSKKQKVSGGFHEQSIDQLNDVTAVSGVNLRVDDFTCYVYWLCACHLPCSTYYLMDFEGITVCDFCQEEEEHLFSAPKEEGRVSEVARKVVQLEEEKLILQKGPLTQKLAGIMSKCNLKVIGTDVERCLSMCVEERLRGFIRSIIRFSKQRVEVEKSRHHFYPLSSDVRSHIMRVNREAREQWEKKQAEDAERIRKQNDGDGNANVDLEKDRIETRGLSKHAKTYKEDDDKMRTTAANVAARVAAGGDDMLSKWQLLAERNKQRSEGGDGSSGSVPGNMLQHRPSLKSGKDLREEHEVEKRGYSTMLGSGGVRRSPLTKVARSISMKDVVAALEREPQMSKSSLLFRLYGRPLTEPSAK

SEQ ID NO: 2916 - protein, 305 aa, Zea mays
  VARIANT 24: note = Ancestral polymorphism is E, Derived polymorphism is K
  VARIANT 11: note = Ancestral polymorphism is T, Derived polymorphism is S
MASVKVFGSPTSAEVARVLMCLFEKEVEFQLIRVDAYRGTKRMPQYLKLQPQGEALTFEDESLTLSDSRGILRHISHKYAKQGNPYLIGTGALERASIEQWLQTEAQSFDAPSAEMVYSLAFLPPTLPKQNDNGNGGAFNARDATVGSNADASSGKRGVAGSQPAASQTKVSAQKEEEMLKLFEQRKKDLEKLLDIYEQRLEEATFLAGDNFTIADLSHLPYADHLVSDPRSRRMFESRKNVSRWWHDVSGRDTWKYVKTLQRPPSTSTDASAKNGQLGQQQHLPSSTDGHGVKTQRLVQNERHF

SEQ ID NO: 2917 - protein, 229 aa, Zea mays
  VARIANT 22: note = Ancestral polymorphism is E, Derived polymorphism is D
  VARIANT 42: note = Ancestral polymorphism is L, Derived polymorphism is R
  VARIANT 139: note = Ancestral polymorphism is A, Derived polymorphism is P
MSRYHLKQFEKERMKMAMLRQEETFRQQVQELHRLYRAQQLLMAGDDAATNEATRSATATAMPPAATRRDLEAAAEDDDDERRTVGTGAGSSSRSWDDDAHSPPQQHGRSGNSEAPPLLLRESELELTLALGCFGGAAPGKKEASSTSVDSRTSVSSSSTESGSAGSPERGVRRRLPPPVVSDDHRVGAAGPAYHYYYQQGWAASGPRSRRPAAASLLAPQVPEFGTIG

SEQ ID NO: 2918 - protein, 512 aa, Zea mays
  VARIANT 112..512: note = Derived polymorphism lacks residues 112 to 512
MGKSKRNKGGRGGGGADDKLDGGGDADSVTSMSSGLSDLQFAQATEHISSQEFVLDKYVDALYEKRGSTREEALGSLTDAFESFVLLGLVENKFSTPIPAIRRLRRGGTTVEFAAPGLPAKWRHPPKRFQSSELTESRPTKLGDAAVKPGIFWNKPSGAYTTGFWKEPTPGLLAITLGAGSSSHEIMDESHPHLLRVLQTWPDAQKMISALDCLAVVTFVGATDLAETQLSLKAIWDVIHPKSGSNVGVVRKPKPPLLAAAVSAWAFLLTTIGSSRRNTDSWKEPITFLCSLLEAEDRAVRIAAGEALALCFELRMFDVSSSDEADVDSYTGEAGGSKHQLFLNMQALKAKLSGLVYSLSMEAGGRGADKKNLNDQRDLFQRISDFIKSGECPEESLRISGKNGILRVTSWRESIQLNYMRRFLGRGFLKHSQDNDLLHEVFDIKIDRTENMSATEKASRHGHSDSSLKNLFACVQKMFRSGEEKGRALKLNKERRLAQERKQQNILNEQYG

SEQ ID NO: 2919 - protein, 342 aa, Zea mays
  VARIANT 34: note = Ancestral polymorphism is A, Derived polymorphism is V
  VARIANT 37: note = Ancestral polymorphism is A, Derived polymorphism is V
MPMTPLECDMAPAASRQSWPLPRCGLLVLALALATTAAVGSAQLSSESYYDASCPAALLTIRTAVSTAVLLEPRMGASLLRLHFHDCFVQGCDASVLLDDTASFTGEKGAGPNAGSLRGFDVIDNIKMLLELLCPQTVSCADILAVAARDSVAQLGGPSWAVPLGRRDATTASASLANSDLPGPTSSLNGLLNAFSNKGLSSTDMVALSGAHTVGRAQCKNCRARIYNDTDIDASFAASLRASCPAQAGAGDGALEPLDGSTPDAFDNAYFGNLLSQRGLLHSDQALFGGGGGGATDGLVSAYASNAGQWGADFAAAMVKMGSISPLTGTDGEIRVNCRRVN

SEQ ID NO: 2920 - protein, 239 aa, Zea mays
  VARIANT 216: note = Ancestral polymorphism is W, Derived polymorphism is S
  VARIANT 94..239: note = Derived polymorphism lacks residues 94 to 239
MAAPVTVYGPMLSPAVARVAACLLEKDVPFQIEPVDMSKGEHKSPSFLKLQPFGQVPAFKDHLTTVFGTSTSQFFYYYCYISKSRAICRYICDQYADSGNQALFGKKEDGAVGRAAIEQWIESEGQSFNPPSLAIIFQLAFAPMMGRTTDLAVVEQNEAKLAKVLDVYDQRLGESQYFAGDDFSLADLVHLPNADFLVNRTSKAGLITERKNLARWWDDVSSRPAWKKVTEMQSTPRPS

SEQ ID NO: 2921 - protein, 371 aa, Zea mays
  VARIANT 340..371: note = Derived polymorphism lacks residues 340 to 371
  VARIANT 269: note = Ancestral polymorphism is R, Derived polymorphism is S
  VARIANT 261..371: note = Derived polymorphism lacks residues 261 to 371
  VARIANT 198..371: note = Derived polymorphism lacks residues 198 to 371
  VARIANT 126..371: note = Derived polymorphism lacks residues 126 to 371
  VARIANT 122..371: note = Derived polymorphism lacks residues 122 to 371
  VARIANT 105..371: note = Derived polymorphism lacks residues 105 to 371
  VARIANT 103..371: note = Derived polymorphism lacks residues 103 to 371
  VARIANT 34: note = Ancestral polymorphism is G, Derived polymorphism is D
  VARIANT 33: note = Ancestral polymorphism is C, Derived polymorphism is F
  VARIANT 30..371: note = Derived polymorphism lacks residues 30 to 371
MSAQCFFPHFALANIRTPFFILNSAYDVYQVKCGLRSISIVFGMASNNSGLAIFGQFHHILAPPSSDPGGRWSRCKSDPGGCSATQIATLQGLRSGMLTSLRQFESKPKAGVFINSCFAHSQSELQDTWFTPNSSSIDNKKIAEVVGDWYFERGAAVEIDCAYPCDLTCRNLIPIDKVCLEMLSFANYSGDADSKIVREVWARLLDQALTKGGVAEACSVVKRDRLSSGEELVGDDDVARALLGACKGLPGPVLAIFFSLQIEEIDEARKKFSNAKAISSSQFFGTQNREEKEAQLSLHKSAGSSSISSSDLFGRTNVDDSNLDLSDADLINIISFQASQDLSSLKDIAGETGKKLTSFASNFISDLDRIL

SEQ ID NO: 2922 - protein, 176 aa, Zea mays
  VARIANT 11: note = Ancestral polymorphism is F, Derived polymorphism is S
  VARIANT 16..176: note = Derived polymorphism lacks residues 16 to 176
  VARIANT 28: note = Ancestral polymorphism is G, Derived polymorphism is D
MSKEEIRELLFREILEYHPQLLSSYINGTERTTFLYPSAVDQFKKQFSHLEESGGNGPSVPTDRKHASLPRTTVVHSNPIPTKEQPLVMSSRVRPVSDDSCKNPWEKASSPGNVTRTSLTPQGLQAQAAGSVRVNGPVTDSRYPAHQQIPQAYGYRQMPARLDSTNPSQAMGGYTL

SEQ ID NO: 2923 - protein, 630 aa, Zea mays
  VARIANT 333..630: note = Derived polymorphism lacks residues 333 to 630
  VARIANT 563: note = Ancestral polymorphism is A, Derived polymorphism is T
MDTLFRLVSLHQHHQQHHQQAAAAAASSSPDQHHHHQSPYSSRSTSRSNDTSTGSRSSPSSYHTHNHHYHSSHPHSHYSSASYYYDPAGSGSGSAGYYYYDHHQPPPPPPYQEECGNDHGFYMDEDFSSSSSSRSRHFQSSSRAPPSSSPTPPHAQPQPPPASTSSGAGAGALFEAADFSFPQVDIDLDFSSPASSSGAAASSSGGGGAGRWAAQLLLECARAVAARDSQRVQQLMWMLNELASPYGDVDQKLASYFLQGLFARLTTSGPRTLRTLAAASDRNTSFDSTRRTALRFQELSPWASFGHVAANGAILESFLDAAAAAAASSSSSSQHPPRLHILDLSNTFCTQWPTLLEALATRSSDDTPHLSITTVVPTAGVPSSAAAQRVMREIAQRLEKFARLMGVPFSFRAVHHAGDLAGLDLDGLGLGLREGGAATALAINCVNALRGVAPGGARRRDAFVASLRRLEPRVVTVVEEDADLVAASEPSSSSAGEADAEAAFMKVFTEGLRFFSAYMDSLEESFPKASNERLALERAAGRAIVDLVACPASESVERRETGASWARRMRSAGFSPVAFSDDVADDMRSLLRRYREGWTLREPGADDGAAAGVFLAWKEQPVVWTSAWRP

SEQ ID NO: 2924 - protein, 112 aa, Zea mays
  VARIANT 90..112: note = Derived polymorphism lacks residues 90 to 112
  VARIANT 34: note = Ancestral polymorphism is V, Derived polymorphism is I
  VARIANT 25: note = Ancestral polymorphism is A, Derived polymorphism is T
MELCGGGELFDRIVQKGHYIERKVAELARVIVGVVEACHSMGVMHRDLKPENFLFADQKEEAALKTIDFGLSIFFHPDLVMFSHRINVWSTISALCDAMQCFSVSTKAVTIQ

SEQ ID NO: 2925 - protein, 426 aa, Zea mays
  VARIANT 261: note = Ancestral polymorphism is Y, Derived polymorphism is H
  VARIANT 246: note = Ancestral polymorphism is S, Derived polymorphism is C
  VARIANT 195: note = Ancestral polymorphism is S, Derived polymorphism is R
MPLAGRRDGPLMLRGGGGGKPLSRGSRIAVAVAVGVALGCVCAFLYPNGLFFRPSASALQWTHQVDSTACESSRRVTNLKSQVSSLERENVELRRQINELSMKLQIAGQGKNETLYKPGPFGAVKALRTNPTVIPDNSVNPRLAKILEEVAVKKELIVALANTNVREMLEVWFSNIKRVGIPNYLVVALDDNIESLCKSKGVPVYRRDPDEGIDNIAKTGGNHAVSGLKFRVLREFLQLGYSILLSDIDIIFLRNPFDHLHRDSDVESMSDGHNNMTAYGFNDVFDEPSMGWARYAHTMRIWVYNSGFFYIRPTVPSIELLDRVAGRLSREPKSWDQAVFNEELFFPSHPGYEGLHASRRTMDFYLFMNSKVLFKTVRKDAGLKKLKPVIVHLNYHPNKLERMKAVIEFYVNGKQDALDHFPDGSE

SEQ ID NO: 2926 - protein, 530 aa, Zea mays
  VARIANT 16: note = Ancestral polymorphism is A, Derived polymorphism is V
MEAFHPLLVSAIAAVALVHILRHLLRRPSKASRHPPGPWKLPVIGSMHHLVNVLPHRALRDLARVHGPLMMLQLGETPLVVASSREMARQVLKTHDANFATRPRLLSGQIVLYGWADILFSPSGEYWRKLRQLCAAEVLSPKRVLTFRHIREQEMASHVERIRAAGPSTAVDLSEMFYSLAISIVSRASFGSKHRNAGGFLTAMKAGVALSSGFRIPDLFPTWRPVLAAVTGMRRTLEDVHRTVDSTLEEVIEERRRARDEKQQARSGSGSVQGGQTADEDADDDENLVDLLIGLQERASSGSFQLNRNSIKAIIFDMFTAGTGTLASTLDWGMSELMRNGRVMRKLQREIREAFRGKQPAGADVTEADIQAASLPYLTLVIKETLRLHPPVPLLVPRESVDACEIEGYTIPARSRVVVNAWAVGRDPRYWEDAEEFKPERFEGNATDFMGGSYEYIPFGAGRRMCPGISYGMPVLEMALVQLLYHFDWSLQEGTREVDMTEAHGLGVRRKSPLLLCATSFAPGTAGVES

SEQ ID NO: 2927 - protein, 266 aa, Zea mays
  VARIANT 59..266: note = Derived polymorphism lacks residues 59 to 266
MFCECGTGSFNHVDEDPEDLGCTGGSPRERRKHGGKVNPFAERGLDRFSIVLSELETRRAKILRRVGSDDTTGLVFVRFVQSNGGWTPVIVKLPEEPPSKKAAATKRPRAAASTAAPLPPPGPASPRSPLDQATSPRKRDCASTSSTAKVVVATKVPARKASFSWGRRMRRPSSYWPSVIVLTLVSLAVFGRVFAICLASIWWYVLPTLGSGRCYNGSAGEDARRAGMRISMEKKKVVSPLPHQHAKKGSISGAYETVRPPKGKRG

SEQ ID NO: 2928 - protein, 433 aa, Zea mays
  VARIANT 317: note = Ancestral polymorphism is P, Derived polymorphism is T
  VARIANT 239: note = Ancestral polymorphism is T, Derived polymorphism is M
  VARIANT 145: note = Ancestral polymorphism is A, Derived polymorphism is V
  VARIANT 101: note = Ancestral polymorphism is V, Derived polymorphism is M
  VARIANT 94: note = Ancestral polymorphism is Y, Derived polymorphism is C
  VARIANT 72: note = Ancestral polymorphism is P, Derived polymorphism is L
MESSSAATTMTGSSSGREHGGVHVLLVPLPAQGHMNPMIQFGRRLAYHGLIPTLVTTRYVMSTSPAAGVPFPLLAISDGFDEGGMASCSDPVECCRRLEAVGSETLARAIDAEARAGRAPAVMVYDPHMPWAQRVASAAGVPTAVFLPQSCAVDLIYGEAWAGRAPLPMADGGALRRRRVISVDLGAEDLPPFVVAPEIYAQYLKVSIGQFEFLDAAADVFVNSFRDLEPLEAEYMESTWRAKTVGPALPSFYLDDGRMPSNLASGVSFFSSSAPTMGWLDRQPPCSVVLASYGTVYSLDADQLGELGNGLCDSGWPFIWVVRPDEAQKLPQDLEDACREKEKGLIVQWCPQLEVLSHKATGCFITHCGWNSTVEAIVAGVPMVGMPRSADQPTNARYVESAWGIGLRMRLDQNGLLKREESRAHQINLTSIS

SEQ ID NO: 2929 - protein, 192 aa, Zea mays
  VARIANT 19: note = Ancestral polymorphism is T, Derived polymorphism is I
  VARIANT 24: note = Ancestral polymorphism is D, Derived polymorphism is N
  VARIANT 39: note = Ancestral polymorphism is G, Derived polymorphism is V
  VARIANT 49: note = Ancestral polymorphism is D, Derived polymorphism is N
  VARIANT 84: note = Ancestral polymorphism is G, Derived polymorphism is D
  VARIANT 125: note = Ancestral polymorphism is W, Derived polymorphism is S
MTWLDKQEPCSVVLASYGTVANLDKEQLDELGNGLCDSGKPFVWVLRSNEAEKLSRQLGGRCKERGLIVPFCPQLEVLAHKATGCFLTHCGWNSTIESIASGVPMVAMPQWADQPTTAKYVESAWGIGVRMRKGSLVRKEVERCIREVMGGERKHVYGRNAARWMHKAKEAMQEGGSSDKNIAEFAAKYLPK

SEQ ID NO: 2930 - protein, 138 aa, Zea mays
  VARIANT 10: note = Ancestral polymorphism is G, Derived polymorphism is W
  VARIANT 35: note = Ancestral polymorphism is G, Derived polymorphism is R
  VARIANT 65: note = Ancestral polymorphism is L, Derived polymorphism is R
MASAPADSYGCAACGAPLNLSAAHLYPADFYFEAGNKGTLSFSWVDESRLRFAPEDRIRPFFETRNYWGIQRKRTRISCDACGHLLGHVYDDGPPAMQGTGQFGMGPSQVIPRRPRYRFKIKAIAASSSAPAAAAYEK

SEQ ID NO: 2931 - protein, 129 aa, Zea mays
  VARIANT 71: note = Ancestral polymorphism is R, Derived polymorphism is W
  VARIANT 63..129: note = Derived polymorphism lacks residues 63 to 129
  VARIANT 55..129: note = Derived polymorphism lacks residues 55 to 129
  VARIANT 54: note = Ancestral polymorphism is G, Derived polymorphism is R
MATHRHCLPLLLLVAAALAAVPARAALGGGRGPLLGGWNPIPDVSDSHIQELGGWALGQAKHQKLAADGLRFRRVVRGEQQVVSGMNYRLYVDAADPAGRTVPYVAVVYEQVWTRTRQLASFNPVPRAH

SEQ ID NO: 2932 - protein, 45 aa, Zea mays
  VARIANT 13..45: note = Derived polymorphism lacks residues 13 to 45
MTAREPRGFGFIQYFDPEDASDAKYHMDGKMLLGREIVVVLQRKT

SEQ ID NO: 2933 - protein, 312 aa, Zea mays
  VARIANT 239: note = Ancestral polymorphism is R, Derived polymorphism is H
  VARIANT 230..312: note = Derived polymorphism lacks residues 230 to 312
  VARIANT 202..312: note = Derived polymorphism lacks residues 202 to 312
  VARIANT 199: note = Ancestral polymorphism is R, Derived polymorphism is C
  VARIANT 162: note = Ancestral polymorphism is D, Derived polymorphism is N
  VARIANT 159: note = Ancestral polymorphism is Y, Derived polymorphism is H
  VARIANT 128: note = Ancestral polymorphism is L, Derived polymorphism is F
  VARIANT 112: note = Ancestral polymorphism is I, Derived polymorphism is V
  VARIANT 106: note = Ancestral polymorphism is M, Derived polymorphism is T
  VARIANT 88: note = Ancestral polymorphism is S, Derived polymorphism is L
  VARIANT 82: note = Ancestral polymorphism is C, Derived polymorphism is R
  VARIANT 72: note = Ancestral polymorphism is G, Derived polymorphism is S
  VARIANT 1: note = Ancestral polymorphism is M, Derived polymorphism is V
MVLRSPLHHQRRPPPWQPPSLCTSTSAAVASLRCLLTAPSTGLILPSPSESDSSASLPVLLPSPSPIGAPSGHINQNLSRKCEALAVLGLAEYGDEIDVIAPPDIMKQILKIPYSKAQVSIAVNRLMLMKVKRYSEDKKLVIVPQVINLHRRSKQHLQYCVDPLAVTRVIYLEALRIFVLCSCVPNAVLIFDGRTTYVRALQPIDKDEEVSISYIETAAVTKKRNNYLKQYFFTYTCPRCVKGFDDDALLEGFRCKNQTCDGFLLPNSGKKAYTCQKCGASRDVEEINKMRSEILQLSDKASSFLSSGSILV

SEQ ID NO: 2934 - protein, 116 aa, Zea mays
  VARIANT 63: note = Ancestral polymorphism is G, Derived polymorphism is D
MSARALLLTTATLLLLVAAARAGQPLAGGWSPIRNVSDPHIQELGGWAVTEHVRRANDGLRFGEVTGGEEQVVSGMNYKLVLDATDADGKVAAYGAFVYEQSWTNTRELVSFAPAS

SEQ ID NO: 2935 - protein, 127 aa, Zea mays
  VARIANT 24: note = Ancestral polymorphism is A, Derived polymorphism is V
  VARIANT 8: note = Ancestral polymorphism is S, Derived polymorphism is G
MAMTMTLGSMLIAAAAVVGLCSVAPAASAREEPLQPQIVGGWKPIKNVNDPHVQEIGRWAVSEHIKTANDGLGFGRVVSGEEQIVAGKNYRLRIQATKVGGQKAMYRAVVYEQLTNTRQLLSFDPAN

SEQ ID NO: 2936 - protein, 293 aa, Zea mays
  VARIANT 27: note = Ancestral polymorphism is P, Derived polymorphism is A
MRSMFATRSLLAAAASAPTVLRASAFPSRSLLLSLPFPRGRAARNMLGAARSISSAAPSRVGGRAAMEVRAAQSGEIHVIVGPMFAGKTTALLRRVQAEAGNGRSVALIKSDKDNRYGLDSVVTHDGTKMACWALSELSSFHDKLGIEAYNKEAVPCQKTPYKLIKVDVIGIDEAQFFDDLYDFCCKAADRDGKIVVVAGLDGDYKRRKFGSILDIVPLADSVTKLTARCELCGRRAFFTLRKTQETKTELIGGADVYMPVCRQHYMDGQIVIEATRIVLDLDRSTVTAKALK

SEQ ID NO: 2937 - protein, 71 aa, Zea mays
  VARIANT 15: note = Ancestral polymorphism is P, Derived polymorphism is L
  VARIANT 64..71: note = Derived polymorphism lacks residues 64 to 71
MQIASNYHIKQKSHPRHDALVLVLDKKRTDKEYSKRIGSWHKKLLRMKLRAIDTSKYTQPCPIKVSKYNLN

SEQ ID NO: 2938 - protein, 537 aa, Zea mays
  VARIANT 415: note = Ancestral polymorphism is L, Derived polymorphism is P
  VARIANT 321..537: note = Derived polymorphism lacks residues 321 to 537
  VARIANT 171: note = Ancestral polymorphism is S, Derived polymorphism is I
  VARIANT 160..537: note = Derived polymorphism lacks residues 160 to 537
  VARIANT 155: note = Ancestral polymorphism is S, Derived polymorphism is Y
  VARIANT 100: note = Ancestral polymorphism is T, Derived polymorphism is M
  VARIANT 93..537: note = Derived polymorphism lacks residues 93 to 537
MATSCPTLPFDEARWIVRIRRIFDEEIEVSEDQPICVFDVPKPLLITKPEAYVPQLLALGPYHHCREEICDMERYKLSAAKRAQSHLPDMDFQKLVDVFTKLEHLVRAHYHRHLNLSNEALGWMMAIDVSFLLEFLETLKNRNGNQQRALQRIPSRMSHLVDPSRRTSSHSMLLRDVVMLENQVPLFLLLKAIEARCSTAAAQLPPPQSVLSSMLAGLFQEVSTFRGIGRPCTDVDRHVHLLDFLYSNMVPRCTEESHGAEEGGDASCHDHGKSALNSAMDLLVSRGSKIVSVMADFVLRVLLKFVASLPCLSVLGDPIEQLTQHAAAPGVPDKDASPLLEEIAVPSVAELAYTGVRFCPTVGGLSTVDFCPATATLHLPVIGVDVNSEVVLRNLVAYEAAAGLGPLVLARYVELMNGIVDTAEDARVLRECGVVLNHLKSDGEVAELWNGMTRSVRLTKVPALDRVIDDLNRHYGSCWKVRVRTFVKARVFGSCRELLACVALLLLFLFVGLQSICVLHGCVPVSYGMPSRRFGAS

SEQ ID NO: 2939 - protein, 360 aa, Zea mays
  VARIANT 268: note = Ancestral polymorphism is G, Derived polymorphism is S
MEAAEAPNYDSIVNRDEITDAAAAAFANPEQVPEKYVRTEEVLDGVVVGADESYELPVVDMARLLDPELAPSEVAKLGDACRNWGFFQLTNHGVDEAVVQRMKDATVQFFSSPLDSKAKVAVRGNGFEGFGHHYSRASSGKLDWAESMILITQPVKDRNMEMWPTNPPTFRDALDVYSVEMIGLAMRLLGFMAADLGVEPEALQDAFTGKRQSMAVHHYPPCRQREKVMGITPHTDGLGLTLLLHVDDTPGLQIRRGGRWFPVRPLPGAFVVNVADILDVLTNGAYASVEHRVLPDAERARTTVVVFQEASVGGLVAPLPGLLDQQGARARYRSIEIEEYIKGNFNALEQGTRFIQSLRI

SEQ ID NO: 2940 - protein, 75 aa, Zea mays
  VARIANT 19: note = Ancestral polymorphism is P, Derived polymorphism is L
  VARIANT 23..75: note = Derived polymorphism lacks residues 23 to 75
  VARIANT 61: note = Ancestral polymorphism is D, Derived polymorphism is Y
MDRSSRFMSSALNLGMKRLGKWQQDYNDVAYLGESPSEASDFIELAQLPGGENTCRKIFLDEQAKMPRKHFRCEG

SEQ ID NO: 2941 - protein, 79 aa, Zea mays
  VARIANT 69: note = Ancestral polymorphism is A, Derived polymorphism is S
  VARIANT 65: note = Ancestral polymorphism is G, Derived polymorphism is W
  VARIANT 60: note = Ancestral polymorphism is Y, Derived polymorphism is C
  VARIANT 57: note = Ancestral polymorphism is V, Derived polymorphism is M
  VARIANT 56: note = Ancestral polymorphism is A, Derived polymorphism is V
  VARIANT 55: note = Ancestral polymorphism is A, Derived polymorphism is V
  VARIANT 52: note = Ancestral polymorphism is A, Derived polymorphism is P
  VARIANT 44: note = Ancestral polymorphism is H, Derived polymorphism is Y
  VARIANT 31: note = Ancestral polymorphism is E, Derived polymorphism is V
  VARIANT 15..79: note = Derived polymorphism lacks residues 15 to 79
  VARIANT 11: note = Ancestral polymorphism is T, Derived polymorphism is I
MHGSLFISAVTASEWVKGKQVEEVVAIKNTEIAKHLSLPPVKLHCSMLAEDAIKAAVKDYEAKKGKKMAKAEEQDTPCP

SEQ ID NO: 2942 - protein, 797 aa, Zea mays
  VARIANT 126: note = Ancestral polymorphism is P, Derived polymorphism is L
MATPLLLPSRAAHAASATTCASQHLKATTSKEPPPRARPKHGEGGAPRPVPVPSSAPRPKSLVLSHIAAGRMDEAADAFAGVSSPGAFLHNVMIRGFADAGLPLDALAAYRAMLAASARPDRFTFPVVVKCCTRAGALGEGRAAHAAVIKLGLGADMYTANSLVALYAKLGLVGDAERVFDGMPARDIVSWNTMVDGYVSNGMGALALACFRDMNDALRVRHDGVGVIAALAACCLESALAQGREIHGYAIRHGLEQDVKVGTSLVDMYCKCGNVLYAENVFATMLLRTVVTWNCLIGGYALNERPVDAFDCFMQMRAEGFQVEAVTAINLLAACGQTESSLYGRSVHAYVVRRHFLPHVVLETALLEMYGNVGKVESSEKIFGQMTEKTVVTWNNMIAAYIYMEMYQEAIALFLELLNQPLYPDYFTMTTVVPAFVLLGSLRQCRQMHSYIIKLGYGDSTLIMNAVMHMYARCGDIVASREIFDKMPGKDVISWNTIIIGYAIHGQGKTALEMFDEMKCNGIEPNESTFVSVLTACSVSGLETEGWKEFNSMQHEYGMVPQIEHYGCMTDLLGRAGDLREVLRFIENMPIAPTSRIWGSLLTASRNKNDIDIAEYAAERIFQLEHNNTGCYVVLSSMYADAGRWEDVERIRSLMKEKGLRRTEARSLVELNAEECSFVNGDMSHPQSEKIHELSDILSRNIGEDLDSPTNLRDSDPFASGKTVLPNKHSVRLAVAFGLISSEPGTPILVKKNVRVCNHCHRALKLISKYSRRKIVVGDTKIYHIFSDGSCCCGDYW

SEQ ID NO: 2943 - protein, 254 aa, Zea mays
  VARIANT 214: note = Ancestral polymorphism is A, Derived polymorphism is V
  VARIANT 111: note = Ancestral polymorphism is A, Derived polymorphism is V
  VARIANT 93: note = Ancestral polymorphism is I, Derived polymorphism is V
  VARIANT 41: note = Ancestral polymorphism is R, Derived polymorphism is C
MSRLTTTETVVLPVELSELGKKMSEAAVRVIGLWPSPFVIRVLIALKLKGVEFEFVEEVVGRKSELLLRSNPVHKKIPVLLHHGKPISESLIIVQYIDEVWSSGAPAFLPVDAHARAVQRFWAQYVDDKLPWAIRILKGTDDGGMEQAAGQLSAALQLLEEAFAQLSQGKRYFGGDSVGYLDIALVSHVGWVKAVEKIAGVTLLDKAKVPNLVAWADRLCAHPAVVDAIPDADKFVEFSVTYGSFSKPINAPAK

SEQ ID NO: 2944 - protein, 848 aa, Zea mays
  VARIANT 727: note = Ancestral polymorphism is L, Derived polymorphism is S
MVLSSSCTTVPHLSSLAVVQLGPWSSRIKKKTDAVAVPAAAGRWRARARAQDTSESAAVAKGSSLTPIVRTDAESRRTRWPTDDDDAEPLVDEIRAMLTSMSDGDISVSAYDTAWVGLVPRLDGGEGPQFPAAVRWIRNNQLPDGSWGDAALFSAYDRLINTLACVVTLTRWSLEPEMRGRGLSFLGRNMWKLATEDEESMPIGFELAFPSLIELAKSLGVHDFPYDHQALQAIYSSREIKVKRIPKEVMHTVPTSILHSLEGMPGLDWARLLKLQSSDGSFLFSPAATAYALMNTGDDRCFSYIDRTVKKFNGGALPTACAFLLVSSTVRLLSPFLAVPNVYPVDLFEHIWAVDRLERLGISRYFQKEIEQCMDYVNRHWTEDGICWARNSDVKEVDDTAMAFRLLRLHGYSVSPDVFKNFEKDGEFFAFVGQSNQAVTGMYNLNRASQISFPGEDVLHRAGPFSYEFLRRKQAEGALRDKWIISKDLPGEVVYTLDFPWYGNLPRVEARDYLEQYGGGDDVWIGKTLYRMPLVNNDVYLELARMDFNHCQALHQLEWQGLKKWYTENRLMDFGVAQEDALRAYFLAAASVYEPCRAAERLAWARAAILANAVSTHLRNSPSFRERLEHSLRCRPSEETDGSWFNSSSGSDAVLVKAVLRLTDSLAREAQPIHGGDPEDIHKLLRSAWAEWVREKADAADSVCNGSSAVEQEGSRMVHDKQTCLLLARMIEISAGRAAGEAASEDGDRRIIQLTGSICDSLKQKMLVSQDPEKNEEMMSHVDDELKLRIREFVQYLLRLGEKKTGSSETRQTFLSIVKSCYYAAHCPPHVVDRHISRVIFEPVSAAK

SEQ ID NO: 2945 - protein, 478 aa, Zea mays
  VARIANT 12..478: note = Derived polymorphism lacks residues 12 to 478
MQIRCMGHDHQWAFAEHREASAPAARRRKGTPPVPKFPKTVPPRRTESQRLRDWKRPRVPAMERDVVLSAPEAAGSSSSPASSSYSSFAETRVICRVCQKQFAQYTCPRCNARYCSLSCYKGHSVQCTESFMRENVMDELKQMQPEDESKKKMLDILKRLHLEEEMASDGEDESMLSEELIQKVMSGEEIKLEDLSDCEIKRFRQALASGELSKMIEPWTPWWKKPSARSISLGPDGSQLIRQVNAEDTAVPYPDANTDQEASINEIPEGPESPLPSLKQLTRTEPSPLLAVHLVDILYSYCFTLRLYNGDWHSDPLGASTVALSMSKVMGQDAKPETVPEALAACIEETCSPAYRHTGGFRFAIGLVDDIIAILSLGQNALICALCDFHRLVEVGKSMLKVEKVGKTERAQGSPKLRSAARKLFFMTCWVHEQPDEAWPSLAHIVQVQKASMEELETGNWKADRKSKPQSAVLIEEL

SEQ ID NO: 2946 - protein, 290 aa, Zea mays
  VARIANT 103: note = Ancestral polymorphism is T, Derived polymorphism is I
MPGAMEPAEADAAAAAVAGRRPTASERRRMYRDLALSLRCGLRDAAAGFSFLRLRGLRALLRALRSTSDADADADAGLFRDSQSIRDLQVIPVLFEHSLRKATGDAVLTVAQVLGMEPAAARLRNPATDSEVVLALRVLEGCCLLCPACAAAAHRYNAVKVVLNILMTRGILEQRACLDTLLALLVNCSGNLTDFKEQDGLNKIAVIVKDANRDDHVRLKCSEFLLLYSGNAKEKCGADSESNMREDLAKVFGEKCASFISSMNLFSSTLESQMRQSELSFLAEHVLDYM

SEQ ID NO: 2947 - protein, 529 aa, Zea mays
  VARIANT 157..529: note = Derived polymorphism lacks residues 157 to 529
MAAALLPETAPRLLTPETLRTAAKQSQGIHLVPLSLRRAIKRYLRDQDRAHMNRKVLLLSASFDRAKGTGAELAAAATRAALLDDPNAPSGAEQRSARWKVRSAYGDIGLRYREDETVAYVASRMPAIYAACHRVLREVATIRTRCFYRPYRAEFVYRAFGLRNHYIPNELVHDRAMRAVWPKSIERVNLVEPSKEMQRAGQSLLDNLKGLPLIHSYDSIQELNRKIEKHERGHDLVVSSYALGEIPSLSDRITIVRQLWDLTSDVLVLLEPGTPQGAKIISQMRSYILWMEKRKCRKIEKSSSRPPSSMKSIVAQKVSLKNGSFVVAPCPHDGRCPLENSDKYCHFVQRLERTSSQRAFKRSKGVPLRGFEDEKFCYVALRRGKRPEEAWPLDDLNFETLKERNAKRKPEDLVIDYDDQFPSEEDEEVHVDGGDSLVPYASDEHELSLFHDSEEAEAEQTVRADLGGGWGRIIYSPMRRGRQVQMDVCRSTKRDASEGTFERVVVTRSKNPTLHFQARKSLWGDLWPF

SEQ ID NO: 2948 - protein, 613 aa, Zea mays
  VARIANT 277: note = Ancestral polymorphism is S, Derived polymorphism is G
MAGLPPQPQHVHALPLLLLVVLPCLIPCLRATTEMAPTAATAGASDEGASALLGLLQRVQSEALRTLGPHDFDPKFYVDLPLATDERAAAAALAALPRPSPSRAELDDFLSRYFGDPGSDLVADVPPDFEPEPRGFLPHVHSPEARAWALEVHALWKRLARRVAPDVAARPDRHTLMPLPGRAVVPGSRFREVYYWDSYWVIRGLLVSKMYDTAKTIVLNLVYLLEKYGFVPNGARSYYTNRSQPPLLSSMVLEIYRATGDVEFVRTVFHSLLKEHSFWMSEIHNVAIADNHGRVHNLSRYQARWNKPRPESATIDEELASKLNSMAAKEKLYCEIASTAESGWDFSSRWMRFGCLLFLTTFTVLFRNSTDMTTLATTYIIPVDLNTFLFKMELDIGALAKVVGDNATSEFFLNASKARHIAIDSILWNSEMEQWLDYWLPGDADCQEVHEWKPNSQNRNIFASNFVPLWLNAYHSEFVRFADEAKSNRVMASLKASGLLHAAGIATSLTNTSQQWDFPNGWAPLQHLIAEGLLHSGSEAKKLAEDIATRWVRTNYAAYKATGAMHEKYDVEACGESGGGGEYKPQTGFGWSNGVVLSFLEEFGWPEGKEIAC

SEQ ID NO: 2949 - protein, 210 aa, Zea mays
  VARIANT 107..210: note = Derived polymorphism lacks residues 107 to 210
MHTHLTTHHRRGEADDPRGNESAAAAATSPGNGAGTDAAASAASASTPAASTSAAGAASRLGAGAEDEKGGGSPAWIDVPERSKSAFMELKRRKVHRYVIFKIDDSREEVVVDKIGAPGESYDDFTASLPTDDCRYAVYDLDFVSDDNCRKSKIFFISWSPSDSRIRAKTIYAVSRNQFRHELDGVHFEIQATDPDDMNLEVLRGRANRT

SEQ ID NO: 2950 - protein, 176 aa, Zea mays
  VARIANT 29: note = Ancestral polymorphism is R, Derived polymorphism is C
  VARIANT 14..176: note = Derived polymorphism lacks residues 14 to 176
MDFPRQSPACSSPQPRPDLGPAQLPGRRRSLLAVHGRVPLPLGSSGLLGLGSSAASQSLCSPMPRALQFHGRAPGGRAPSLPLFPSACLFQLGFSPAASAPVVACLCPWPLPSPCSGSCSRVLSGPMAVAFSLLRIVLASSPCCLLALPLEKSPRNNNLSVWWQEPMTPRNRVCKG

SEQ ID NO: 2951 - protein, 520 aa, Zea mays
  VARIANT 155..520: note = Derived polymorphism lacks residues 155 to 520
MGNSLGCSASGERLVSAARDGDAIEARMLLELSPALARYSTFGGLNTPLHFAAAKGHLDIVTMLLEKGADVNARNYCGQTALMHACRHGHWEVVQMLLLFRCNVTRADYLSGRTALHFAAHDGFVRCIRLLVADFVPSVALEDIASSVVDGGDCQTNSGSSPNSSSGQKFNESARVRYINKPADGGVTALHMAALNGHLDCMQLLIDLGANVSAVSFPYGTTANLIGAGSTPLHYAAGGGKQECCELLISKGASRLTLNCNGWLPVDVARIFGRRSLEPLLSPNSHSNVPVFQLSSYLALPLMSILNIAREFGLQHTTPSIDDNDLCSVCLERSCSVTAEGCSHEFCIKCALYLCSTSNIRVEFTGPPGSIPCPLCRNGIMSFTKLPSTPTEGLKSGSALTFCNPCILNARSMDSPATFSKAEIRRNRVAAVSSELVCPITCSPFPSSALPTCRCSDDDPCGDTDVQDGPEFQSPRPSHSASMELDKRGEGDLDRASCSGMFWSRRSCHREQQCDAEINA

SEQ ID NO: 2952 - protein, 234 aa, Zea mays
  VARIANT 209: note = Ancestral polymorphism is S, Derived polymorphism is R
  VARIANT 96..234: note = Derived polymorphism lacks residues 96 to 234
MRRRLARQPVAAPMSSTPPRCTFLVVGVLLEPVGSAAEQVTWTGLLVAGTKYRGEFECTGATTLDGYRKHIEKDPALERRFQPVKVPEPTVDETIQILRGLHERYELHHKLRYTDDALIAAAQLSYQYISDRFLPDKAIDLIDEAGSRVRLRHAQLPDEAKELDKELRQISKQKNKAVRGQDFEKVYYCLAHRRSAPTSLATSIWLIPSIMLFPFEINILLLILPFVSSSCFLL

SEQ ID NO: 2953 - protein, 296 aa, Zea mays
  VARIANT 86: note = Ancestral polymorphism is R, Derived polymorphism is K
  VARIANT 108: note = Ancestral polymorphism is G, Derived polymorphism is C
  VARIANT 199: note = Ancestral polymorphism is Q, Derived polymorphism is L
MGAWVSVLLGMDGAAAAGPAAVGLGDLPELCAAQVLLRLDPPEICRLAQVNHAFRGAAGADFVWEAKLPENYNYLMEFVGSGDEGKRRRRRAGKKEIYARLARPVPFGDGKKEFWLDKNKGMICMALSSKALVITGIDDRRYWQHMPTSESRFQSVAYLQQIWWFEVVGEVDFCFPVGTYSLYFRVHLGKFYRRFGRRQCTSEHVHGWDKKPVRFQLSTSDGQQALSQCYLEEPGSWVLYHAGDFVASKPDQLMKLKFSMAQIDCTHTKGGLCIDSVLIYPKGKGFHQERVVRSQK

SEQ ID NO: 2954 - protein, 172 aa, Zea mays
  VARIANT 20..172: note = Derived polymorphism lacks residues 20 to 172
  VARIANT 9: note = Ancestral polymorphism is A, Derived polymorphism is V
  VARIANT 5..172: note = Derived polymorphism lacks residues 5 to 172
MGFHQGITASLYNHHMLSFQSNNDVGIGGGDDATGGMVMAPGSVSGGSGNAGLFLSPNTGVVSNAPGVASSRNSSGDAFCGIGTPKYKYVTGSSSDWSDREVDILNEGLVSNDERERPRIVLDPPKRDALATPTPPAEVGRSRSSPFGAARPREDVLADKGMDWKKMETEID

SEQ ID NO: 2955 - protein, 287 aa, Zea mays
  VARIANT 75: note = Ancestral polymorphism is R, Derived polymorphism is W
  VARIANT 108: note = Ancestral polymorphism is C, Derived polymorphism is F
  VARIANT 168: note = Ancestral polymorphism is N, Derived polymorphism is S
  VARIANT 197: note = Ancestral polymorphism is M, Derived polymorphism is T
  VARIANT 200: note = Ancestral polymorphism is W, Derived polymorphism is L
  VARIANT 215: note = Ancestral polymorphism is D, Derived polymorphism is G
MPLHARAPPLRHSHLLLTAATARLRPCAAPATKPRRRSLVLVRASSSDPPQQQLNLSVLRFTLGIPGLDESYLPRWIGLGFGALVVLNHLLSASPTPAQLRSEAVGLCLAAFSATLPFLGRFLEGADAASRVPLPEGSIQVFVMSENLSAVQKEDMAWASYVLLRNTNTTSVVIAIGDLLCVRGYWNPPANTSKYSTIEWFKSQMQQLGLVDLRGALYFPNSSDSQLAKILPDGILSVLAQPILSPDPANNETKTEGVILLACNANYAYSEKDRAWIRTVADKFQRA

SEQ ID NO: 2956 - protein, 557 aa, Zea mays
  VARIANT 190: note = Ancestral polymorphism is L, Derived polymorphism is P
  VARIANT 252: note = Ancestral polymorphism is E, Derived polymorphism is G
MSFGSCPAVAGGATAEELLERARGLVPPALAAARAATGFGGRWKAIAARLGRLPQCLSDLSSHPCFSKNSLCRELLQSVAATLAEAAELGARCHEPPKAGKLQMQSDLDALAGKLDLNLRDCSLLVKTGVLSDATVPAAPAETASAAGAQVDVRELLARLQIGHAEAKHRAVDGLLDALREDEKSVLSALGRGNVAALVQLLTATTPKVREKAATVLCLLAESGSCEGLLVSEGALPPLIRLAESGSLVGREKAVITLQRLSMSADIARAIVGHSGFRALIDMCQTGDSITQSAASGALKNISAVPEVRQALAEEGVVRVMINILDSGVVLGSKEYAAECLQNLTSSNDNLRRAVVSEGGLRSLLAYLDGPLPQEPPVAALRNLVTVVPPDSLVSLCVLPRLAHVLRDGSVGAQQAAAATICKVSGSMDMKRLVGEHGCVLLLVRLLEAKSNGAREAAAQAVASLMGCPANARDVKKDEKSVPNLVQLLDPSPQNTAKKYAISCLLALSASKRCKKLMVSHGAIGYLKKLSEKDVAGARKLLEKLDRGRLRSLFSRK

SEQ ID NO: 2957 - protein, 236 aa, Zea mays
  VARIANT 61..236: note = Derived polymorphism lacks residues 61 to 236
  VARIANT 75: note = Ancestral polymorphism is K, Derived polymorphism is N
  VARIANT 77: note = Ancestral polymorphism is K, Derived polymorphism is N
  VARIANT 110: note = Ancestral polymorphism is C, Derived polymorphism is Y
  VARIANT 146: note = Ancestral polymorphism is S, Derived polymorphism is N
  VARIANT 167: note = Ancestral polymorphism is D, Derived polymorphism is V
  VARIANT 178: note = Ancestral polymorphism is N, Derived polymorphism is K
  VARIANT 201: note = Ancestral polymorphism is V, Derived polymorphism is M
MSALKTKHSTPKYGLVYLASLIGKASQKHKGKISLSLATKTALAIYYDGEDNSITTECQIKVENLGNQLVQQKGKPKIEVYEKDRKKGVGALTTHARDSSDIIAIVLVYCMANNNIIRFHPTRRNINGLLRRKSLTTVQGLNKEFSYNKNLIDLKKEFCCNGTEVQDLELGLVIQLQNIESKLRQIEEDPEGAGTAHLYSVTLKISGVANRAFEPLFERQAQAEKIKSVQGMLQRF

SEQ ID NO: 2958 - protein, 139 aa, Zea mays
  VARIANT 53..139: note = Derived polymorphism lacks residues 53 to 139
  VARIANT 86: note = Ancestral polymorphism is E, Derived polymorphism is K
  VARIANT 91: note = Ancestral polymorphism is K, Derived polymorphism is E
  VARIANT 102..139: note = Derived polymorphism lacks residues 102 to 139
  VARIANT 120: note = Ancestral polymorphism is P, Derived polymorphism is L
MHCSGKGKPWDRLDAGKPCALDHTWKAYDLYIGENDSSSASASSGVVLLYRSQGKVMNCDGGGSCGTCIVEIIDGKELLNERTSTENRYLKKKPDSWRLACQTIVGNKENSGKASFILFPTHPAINTSLPYALKKKVVQ

SEQ ID NO: 2959 - protein, 313 aa, Zea mays
  VARIANT 95..313: note = Derived polymorphism lacks residues 95 to 313
  VARIANT 126: note = Ancestral polymorphism is P, Derived polymorphism is L
  VARIANT 138: note = Ancestral polymorphism is A, Derived polymorphism is V
  VARIANT 196: note = Ancestral polymorphism is G, Derived polymorphism is D
  VARIANT 202: note = Ancestral polymorphism is S, Derived polymorphism is F
  VARIANT 215: note = Ancestral polymorphism is A, Derived polymorphism is V
  VARIANT 223..313: note = Derived polymorphism lacks residues 223 to 313
  VARIANT 224: note = Ancestral polymorphism is S, Derived polymorphism is P
  VARIANT 251: note = Ancestral polymorphism is I, Derived polymorphism is T
  VARIANT 270: note = Ancestral polymorphism is A, Derived polymorphism is V
  VARIANT 291: note = Ancestral polymorphism is R, Derived polymorphism is P
  VARIANT 292: note = Ancestral polymorphism is M, Derived polymorphism is I
  VARIANT 296: note = Ancestral polymorphism is G, Derived polymorphism is E
  VARIANT 308: note = Ancestral polymorphism is V, Derived polymorphism is M
MAGAPTPKLPSFPGPVAQAGGGFASALKPKAKAGNDEAAAAVDQLAEGPRPATPSAPARYWRGSIIGSPPSPWPGRHCSAQPSTSRRPCALRSPRPARPWRPRAVLTSYDVVLKLGAYKVFSEVSPMLQFAHPTCVQAVLDELDVFLQFAAYNEDALDAAELVAITSGDAVAVHLPVGSAHVAAMPAVLRLVKRLGAKVVVFVDRGCDSTELPFATHLLQAFQSCVSLLRVPAGLRRRRGGGANAEAVGKIERLMDKPPPLPWRTMLASAGFVLVQASTFAESQAEALLKRIALMEFRVEKRGELVSMSAWQC

SEQ ID NO: 2960 - protein, 209 aa, Zea mays
  VARIANT 127: note = Ancestral polymorphism is R, Derived polymorphism is M
MEQRQQERRTVPTTTTCGGRRARAETRHPVYRGVRLRAGKWVSEIRELRKPSRIWLGTYPTPEMAAAAYDAAALALRGAGAALNFPDAATARPPPASASAEHVRAAAAAAAAAAAVGLGDSRHFHGRSDRREVRGHSHSSGADEYERCHGGGGAGSMEGVVDEDDLFEMPRLMLSMAEGLMMTPPVLGPAPAAAALDGDEEGVSLWDHS

SEQ ID NO: 2961 - protein, 117 aa, Zea mays
  VARIANT 7: note = Ancestral polymorphism is R, Derived polymorphism is W
  VARIANT 44: note = Ancestral polymorphism is G, Derived polymorphism is R
MAAQRRWSGAADVASWCALLALVMVVGSLAGSGKEEPEQYSRAGLVVVRGPRLAARPCDELYVVAEGETLHSISASCGDPYILERNPHVHDPDDVFPGLVIKITPHAGGSPNSGDAN

SEQ ID NO: 2962 - protein, 608 aa, Zea mays
  VARIANT 50..608: note = Derived polymorphism lacks residues 50 to 608
  VARIANT 274..608: note = Derived polymorphism lacks residues 274 to 608
MAPGLANWVALVLTVLLGLSCLVVALSEDGLCRTCHALFGISAVLQTCELAWTCAETLDKLRFVRHAQDAPLVSQYNYIVIGGGTAGCPLAATLSEHSRVLLLERGGLPSRNMSDQQHFTDALADTSPASPAQRFVSEDGVVNARARVLGGGSCLNAGFYTRASTDYVRAAGWDARLVNSSYRWVERALVFRPAVPPWQAALRDALLEAGVTPDNGFTFDHVTGTKIGGTIFDSSGQRHTAADFLRHARPRGLTVFLYATVSRILFRQQEGVPYPVAYGVVFTDPLGVQHRVYLRDGAKNEVILSAGTLGSPQLLMLSGVGPQAHLEAHGVQVLVDQPMVGQGVADNPMNSVFIPSPVPVTLSLVQVVGITRSGSFIEGVSGSEFGIPVSEGARRLARSFGLFSPQTGQLGTLPPKQRTPEALERAAEAMRRLDRRAFRGGFILEKILGPVSSGHVELRSADPRANPAVTFNYFQESEDLQRCVRGIQTIERVIQSRAFANFTYANASTESIFTDSANFPVNLLPRHVNDSRTPEQYCRDTVMTIWHYHGGCQVGAVVDDDYRVFGVQRLRVIDSSTFKYSPGTNPQATVMMLGRYMGVKIQAERWRK

SEQ ID NO: 2963 - protein, 357 aa, Zea mays
  VARIANT 160: note = Ancestral polymorphism is A, Derived polymorphism is S
  VARIANT 208: note = Ancestral polymorphism is S, Derived polymorphism is L
MLAAVMDYFSSCWGPRSGAGHREKGSDAAGRQDGLLWYKDVGQLVTGEFSMAVVQANQLLEDQSQVESGSLSLADTGPQGTFVGVYDGHGGPETSRFINDHLFNHLRRFATEHKFMSADVIRKAFQATEEGFLSLVSKEWSLKPQIASVGSCCLVGVICAGTLYVANLGDSRAVLGRLVKATGEVLAIQLSSEHNACYEEVRQELQSSHPDDPHIVVLKHNVWRVKGIIQISRSIGDVYLKKPEYNREPLHSKFRLRETFQRPILSSEPQITEHRIQPNDQFVIFASDGLWEHLSNKEAVDLVQSSPRNGIARRLVKAAMQEAAKKREMRYSDLKKIDRGVRRHFHDDITVVVVFMP

SEQ ID NO: 2964 - protein, 238 aa, Zea mays
  VARIANT 10..238: note = Derived polymorphism lacks residues 10 to 238
  VARIANT 70: note = Ancestral polymorphism is A, Derived polymorphism is G
  VARIANT 153: note = Ancestral polymorphism is E, Derived polymorphism is K
MDVSVGSRARHLTDVDGDLWDLVRRDLQLKATFLYIDLNRCRQSNIDYTSSQVPFRITATGWVQEFNNTARIVKKIKLTCTPCKIFKKTTLIKGMFTSDLEVARFEGAAIRTISGIRGHVKKVNVEVPTYSNPVTTALQPREQTWQGMRTTAELRKAHNIPTPHNKDSVYKPIERKPRKFNPVEIPAKLQQLLPFKSKPKDTTKQKKAPVENRVPVIMQQLLPFGKMFCIQALYIDFQ

SEQ ID NO: 2965 - protein, 399 aa, Zea mays
  VARIANT 159: note = Ancestral polymorphism is C, Derived polymorphism is F
MLAAVMDYFSSCWGPRSGDGHRGKGPDAAGRQDGLLWYKDAGQLVTGEFSMAVVQANQLLEDQSQVESGSLSLADPGPQGTFVGVYDGHGGPETSRFINDHLFNHLRRFATEHKFMSADVIRKAFQATEEGFLSLVSKEWSLKPQIASVGSCCLVGVICAGTLYVANLGDSRAVLGRLVKATGEVVAMQLSSEHNACYEEVRQELQSSHPDDPHIVVLKHNVWRVKGLIQISRSIGDVYLKKPEYNREPLHSKFRLRETFQRPILSSEPQITEHRIQPNDQFVIFASDGLWEHLSNKEAVDLVQSSPHNGIARRLVKAAMQEAAKKREMRYSDLKKIDRGVRRHFHDDITVVVVFLDLNAMSKASWSKSPSVSLRGGGVTVPAKSLAPFSAPARLNSTY

SEQ ID NO: 2966 - protein, 225 aa, Zea mays
  VARIANT 198: note = Ancestral polymorphism is L, Derived polymorphism is V
  VARIANT 194: note = Ancestral polymorphism is W, Derived polymorphism is S
  VARIANT 133: note = Ancestral polymorphism is A, Derived polymorphism is T
  VARIANT 89: note = Ancestral polymorphism is P, Derived polymorphism is L
  VARIANT 82: note = Ancestral polymorphism is G, Derived polymorphism is S
  VARIANT 65: note = Ancestral polymorphism is I, Derived polymorphism is L
  VARIANT 63: note = Ancestral polymorphism is K, Derived polymorphism is R
  VARIANT 40: note = Ancestral polymorphism is R, Derived polymorphism is S
  VARIANT 28: note = Ancestral polymorphism is D, Derived polymorphism is H
  VARIANT 14: note = Ancestral polymorphism is S, Derived polymorphism is R
MSEAAVRVIGLWPSPFVIRVLIALKLKHVEYEFVEEVVGSKSELLLASNPVHKKIPVLLHHGKPLSESLIIVQYIDEVWSSGAPAAILPADPYARAVQRFWAQYVDDKMHPAIRVLKGTYDGDKEQAAGQLSAALQLLEEAFAQLGQGKRYFGGDSVGYLDIALVSHVGWVKAVEKIAGVTLLDEAKVPNLVAWADRLCAHPAVVDAIPDADKFVEFSVTYGSFS

SEQ ID NO: 2967 - protein, 399 aa, Zea mays
  VARIANT 96: note = Ancestral polymorphism is R, Derived polymorphism is G
MLAAVMDYFSSCWGPRSGAGHRGKGSDAAGRQDGLLWYKDAGQLVTGEFSMAVVQANQLLEDQSQVESGSLSLADPGPQGTFVGVYDGHGGPETSRFINDHLFNHLRRFATEHKFMSADVIRKAFQATEEGFLSLVSKEWSLKPQIASVGSCCLVGVICAGTLYVANVGDSRAVLGRLVKATGEVVAMQLSSEHNACYEEVRQELQSSHPDDPHIVVLKHNVWRVKGLIQISRSIGDVYLKKPEYNREPLHSKFRLRETFQRPILSSEPQITEHRIQPNDQFVIFASDGLWEHLSNKEAVDLVQSSPRNGIARRLVKAAMQEAAKKREMRYSDLKKIDRGVRRHFHDDITVVVVFLDSDAMSKASWSKSPSVSLRGGGVALPAKSLAPFSAPARLNSTY

SEQ ID NO: 2968 - protein, 88 aa, Zea mays
  VARIANT 19: note = Ancestral polymorphism is R, Derived polymorphism is M
  VARIANT 43: note = Ancestral polymorphism is E, Derived polymorphism is K
  VARIANT 50: note = Ancestral polymorphism is S, Derived polymorphism is R
MASRPKLSGIQKQVLALYRGFLRTARLKAPEERHRIESVVLAEFRDKAKSVDRRNFIHIEYLLRSGKKQLEQLKNPDITGLATLVVKK

SEQ ID NO: 2969 - protein, 238 aa, Zea mays
  VARIANT 68..238: note = Derived polymorphism lacks residues 68 to 238
  VARIANT 144: note = Ancestral polymorphism is R, Derived polymorphism is T
  VARIANT 197: note = Ancestral polymorphism is S, Derived polymorphism is L
  VARIANT 217: note = Ancestral polymorphism is V, Derived polymorphism is L
MAGGDDLKLLGLWASPYVLRVKLALSLKGLSYENVEEDLRDKSELLLKSNPVHQKVPVLIHGGKPICESQVILQYIDEAFAGTGPSLLPADPYERAVARFWAAYIDDKMLPAWNQSTMGKTEEERAEGKKQSVVTVETLEGALRDCGGQGKPFFGGDSVGYVDVVLGGLLGWVRASEELHGVRPFDPERTPLLAAWSERFGALDAVQTVMPDVGRLLEFGKALMARLAAAAAAGASNN

SEQ ID NO: 2970 - protein, 138 aa, Zea mays
  VARIANT 38: note = Ancestral polymorphism is A, Derived polymorphism is V
  VARIANT 42: note = Ancestral polymorphism is T, Derived polymorphism is I
  VARIANT 57: note = Ancestral polymorphism is F, Derived polymorphism is C
  VARIANT 68: note = Ancestral polymorphism is A, Derived polymorphism is T
  VARIANT 103: note = Ancestral polymorphism is F, Derived polymorphism is C
  VARIANT 111: note = Ancestral polymorphism is S, Derived polymorphism is L
MARFWASFIDEKFLASWLKAGRGKTDEEKADGLKLTLAAVETLEGAFMECSKGKPFFGGDSVGYLDIALGALVAWMRAAEARHGLRLFDASRSPLLEKWVERFSELDEVVLVMPDIDRLVELGKVREAAAAAAAAVNS

SEQ ID NO: 2971 - protein, 276 aa, Zea mays
  VARIANT 21: note = Ancestral polymorphism is G, Derived polymorphism is R
MATATALSLSGGGGGTPLLRGHAALASGRCCAFPRSRWRPPRLSASRADDSSPAPFEMTVEGALKLLGVAEGASFDEILRAKNSVLASCKDDQDAVAQVEAAYDMLLMQSLSQRRAGKVANNSIRYADVKPVKSAGAGAVPQWMQATMKNAPITFETPSSSSLGIQSCVYGALMVFTYASGSSTSLPSAYTSPDVPGFILATGFGASLYFLAKKNMNLGKAALITVGGLAAGATVGSAVENFLQVDIVPFLGIHSPAVVVSEFILFSQLLVSLFVR

SEQ ID NO: 2972 - protein, 287 aa, Zea mays
  VARIANT 166: note = Ancestral polymorphism is S, Derived polymorphism is L
  VARIANT 195: note = Ancestral polymorphism is A, Derived polymorphism is T
  VARIANT 208: note = Ancestral polymorphism is G, Derived polymorphism is D
  VARIANT 211: note = Ancestral polymorphism is S, Derived polymorphism is R
  VARIANT 222: note = Ancestral polymorphism is L, Derived polymorphism is V
  VARIANT 232: note = Ancestral polymorphism is L, Derived polymorphism is I
  VARIANT 237: note = Ancestral polymorphism is L, Derived polymorphism is I
MAGGGDDELKLLGAWASPFVLRVKLALSFKGLSYENVEEDLSGSKSELLLESNPVHKKVPVLLHNGKPVCESQIIVQYIDEAFAGTGGPSLLPADPHQRAVARFWGAYIDDKVVLLMLLMTLSFIFYLYYSTYDLRRHEYDRCPMHIDGVRRRRTDASFPLQLLASWLQSARAKTQEEKADALKQALAAAENLEAAFTEISEGKPFFGGDSVGYLDVTLGALVAWVHAAEKLNGMRIFDATRTPRLSAFVERFGALGAAKAVLPDVDGLVEYAKQRQADAAAAASDS

SEQ ID NO: 2973 - protein, 128 aa, Zea mays
  VARIANT 67: note = Ancestral polymorphism is G, Derived polymorphism is S
  VARIANT 68: note = Ancestral polymorphism is K, Derived polymorphism is N
  VARIANT 71..128: note = Derived polymorphism lacks residues 71 to 128
  VARIANT 91: note = Ancestral polymorphism is S, Derived polymorphism is F
MAGGGGQELKLLGTWTSPFVTRVKLALSFKGLSYENLEEEDLYHNKSELLLRSNPVHRQVPVLIHNGNPICESQLIVQYIDEAFSSANGPSLLAAEPYERAVARFWGAYIDDKVPNNTAQAQAFTSRQ

SEQ ID NO: 2974 - protein, 245 aa, Zea mays
  VARIANT 21: note = Ancestral polymorphism is A, Derived polymorphism is V
  VARIANT 55: note = Ancestral polymorphism is S, Derived polymorphism is G
  VARIANT 70: note = Ancestral polymorphism is G, Derived polymorphism is R
  VARIANT 96: note = Ancestral polymorphism is P, Derived polymorphism is L
  VARIANT 106: note = Ancestral polymorphism is R, Derived polymorphism is S
  VARIANT 136: note = Ancestral polymorphism is M, Derived polymorphism is K
MAESMGKDGGDGELKLLGLWASPFVARAKLALQIKGLSYEYVEEDLGNKSELLLSSNPVHKTVPVLIHNGTPVCESTVIVQYIDDAFAGTGPSLLPADPYQRALARFWAAYLEDKIVTPWRRVFMVKTDEEKAEAMRQTVAAMDALEGGLKECSSGGGGQSPFFGGDSVGYVDVLLGGMVSWVKASEPLSGAKIIDAARTPLLAAWMERFCELDAAKAVLQDVHAVVEYARTVQARVAAATASNQ

SEQ ID NO: 2975 - protein, 272 aa, Zea mays
  VARIANT 21: note = Ancestral polymorphism is P, Derived polymorphism is L
  VARIANT 56: note = Ancestral polymorphism is P, Derived polymorphism is H
  VARIANT 75: note = Ancestral polymorphism is R, Derived polymorphism is W
  VARIANT 100: note = Ancestral polymorphism is R, Derived polymorphism is S
  VARIANT 123..272: note = Derived polymorphism lacks residues 123 to 272
  VARIANT 127: note = Ancestral polymorphism is L, Derived polymorphism is Q
  VARIANT 142: note = Ancestral polymorphism is A, Derived polymorphism is V
  VARIANT 170: note = Ancestral polymorphism is A, Derived polymorphism is T
  VARIANT 184: note = Ancestral polymorphism is Q, Derived polymorphism is R
  VARIANT 200: note = Ancestral polymorphism is A, Derived polymorphism is T
  VARIANT 230: note = Ancestral polymorphism is A, Derived polymorphism is D
  VARIANT 244: note = Ancestral polymorphism is A, Derived polymorphism is V
MAGREADKDPELKVLGVWSSPFVIRARVALNLKGLAYRYVEDNLDSKSELLLASNHVHGKVPVLLHDGRPVCESRVIVEYIDEAFPASGPCLLPADPYRRAVDRFWASYVDDKVLITVPPLPCTARLQINFRFRTGRLTPVVVRGLDNGLQLFPTWIPVYNGRTSEDRVAAARQVVAVLEKFERAFDECSGGKAFFGGDAAGLVDVVLGGFLGWLRASEVMCGVRVIDPAKTPLLAAWADRFAALDGVREVIPDVQRLLEYNKIRRARRGLP

SEQ ID NO: 2976 - protein, 544 aa, Zea mays
  VARIANT 102..544: note = Derived polymorphism lacks residues 102 to 544
  VARIANT 111..544: note = Derived polymorphism lacks residues 111 to 544
  VARIANT 433: note = Ancestral polymorphism is K, Derived polymorphism is M
  VARIANT 434: note = Ancestral polymorphism is E, Derived polymorphism is V
MPPSDLVTPCVAVPVMDAALLAVIVPPRRSIHARHGWCSHAMWRGEVTAGAAEVEGEGEDEGTGKRVHRGGRSRGTLGDPGAWFLGSAAFAAVGFAEPEPPEMTVDELKLQARASGGHDLRTSSPSACACSPSTMTRPASSDNNGTGNHDLELLREKKDQFDLVISNVHMLDMDGFKLLKLVGLEMDLPGITRHQSDLPLKCGIQMLCFLTSCIIFEETPVYPDGWVCISILHPPSEDPNGYELARYFHHFWYGSVCNVPGIIILFLVWIWNGLGSTTMMRQSCSKDWMISIPLLPIRLGSPSPLCPTGTKQPMELEQPMDDFHSPAANSLNCFDPSTQSACTQPVVAANSDRVRKPEGRGAWLTRNGRQDTTGGSLQPHAWWPVWEGAHCSSSDDFRNFSGQGKGNDRKVRRVRGVQIRMRAEKRSRKIFVKEAKDTPKLWYSNRKKVLAWQVKQKQLAHEKCEFYTLLWRSRRVLNMAHATRRFLNMAHATFGQRGHIKHAAINAPVQGTAADVAMCAMLEIDRNTRLKELGWALLMWVVYA

SEQ ID NO: 2977 - protein, 200 aa, Zea mays
  VARIANT 141: note = Ancestral polymorphism is F, Derived polymorphism is S
  VARIANT 133: note = Ancestral polymorphism is A, Derived polymorphism is T
  VARIANT 128: note = Ancestral polymorphism is K, Derived polymorphism is E
  VARIANT 70: note = Ancestral polymorphism is L, Derived polymorphism is P
  VARIANT 63: note = Ancestral polymorphism is G, Derived polymorphism is V
MAGEEGLKVLGLQVSPFVLRVCLALNMKGVSYEYVEEDISNKSELLLKSNPVHKKVPVLIHNGKPICESLVIMQYVDELFAGRPILPTDPYERATARFWAAYADDKLFPAWYGMVKAQAEEERAEKAKETLAAIEHMEVTFAKCSGGNAFFGGDSIGYVDIVLTCSAPSCSGSRRCAGFSTWRSLTLARLRCWLRGRSGL

SEQ ID NO: 2978 - protein, 228 aa, Zea mays
  VARIANT 16: note = Ancestral polymorphism is D, Derived polymorphism is E
  VARIANT 21: note = Ancestral polymorphism is N, Derived polymorphism is Y
  VARIANT 25: note = Ancestral polymorphism is I, Derived polymorphism is L
  VARIANT 26: note = Ancestral polymorphism is V, Derived polymorphism is A
  VARIANT 29: note = Ancestral polymorphism is L, Derived polymorphism is F
  VARIANT 39: note = Ancestral polymorphism is E, Derived polymorphism is V
  VARIANT 41: note = Ancestral polymorphism is L, Derived polymorphism is I
  VARIANT 42: note = Ancestral polymorphism is L, Derived polymorphism is R
  VARIANT 46: note = Ancestral polymorphism is E, Derived polymorphism is D
  VARIANT 51: note = Ancestral polymorphism is S, Derived polymorphism is F
  VARIANT 64: note = Ancestral polymorphism is D, Derived polymorphism is A
  VARIANT 66: note = Ancestral polymorphism is K, Derived polymorphism is M
  VARIANT 73: note = Ancestral polymorphism is V, Derived polymorphism is A
  VARIANT 75: note = Ancestral polymorphism is V, Derived polymorphism is I
  VARIANT 124: note = Ancestral polymorphism is E, Derived polymorphism is D
  VARIANT 129: note = Ancestral polymorphism is A, Derived polymorphism is T
  VARIANT 141: note = Ancestral polymorphism is T, Derived polymorphism is R
  VARIANT 143: note = Ancestral polymorphism is E, Derived polymorphism is V
  VARIANT 147: note = Ancestral polymorphism is K, Derived polymorphism is E
  VARIANT 159: note = Ancestral polymorphism is D, Derived polymorphism is G
MAANGGDELKLLGVWDSPYVNRVQIVLNLKGLSYEYVEEDLLSKSELLLNSNPVHKKVPVLIHAGKPVAESQAIVQYLDEAFPSGTFPSVLPAEPYARATARFWAAFVDDKVGSPWHTVLFAREHGKKADAASRIVAALETLEGAFEDCSGGRDYFGGDAIGFVDVVLGSYLGWFKVFEKMVGVRVLDVARTPLLAAWGERFAAAEAAKDVLPDDVDKVLEFLQKFLD

SEQ ID NO: 2979 - protein, 205 aa, Zea mays
  VARIANT 28: note = Ancestral polymorphism is G, Derived polymorphism is S
  VARIANT 53..205: note = Derived polymorphism lacks residues 53 to 205
  VARIANT 61..205: note = Derived polymorphism lacks residues 61 to 205
  VARIANT 68..205: note = Derived polymorphism lacks residues 68 to 205
MGESSKELLDLPSDPRPPASFIESLLAGREQQQQDKEGKRKLGASTDPLPKSQGTVELALQLVQVSDQKRVIGKVKDFLGEIARANQKLQLDAQNKPPVEYDIEALTGNEEEYIEMDLLLGVADLHSEQAVEAAEATINGRQTSEMSFACSSSDSEDDSDDSDEDADDKPLTSDKDNKCKSPDDAEMGPAKGKKPNKRQKIVVLN

SEQ ID NO: 2980 - protein, 231 aa, Zea mays
  VARIANT 18: note = Ancestral polymorphism is V, Derived polymorphism is M
  VARIANT 35: note = Ancestral polymorphism is V, Derived polymorphism is M
  VARIANT 168: note = Ancestral polymorphism is G, Derived polymorphism is A
MAGGNDLKVLGVWTSPFVIRVRIVLNLKGLAYEYVEEDLGNKSALLLGSNPVHKSVPVLLHAGRAINESQVILQYIDEVWAGTGPAVLPADPYERAVARFWGAYIDDKVESAWLGMLFRCANEEERAAAVARAREALDALEGAFRDCSRGRPFFGGDDIGFVDAVLGGYLGWFGAVGRIIGSRLIDPARTPLLAAWEDRFRAADVAKGVVPDDLDKMLAFLQTLRAMNYAK

SEQ ID NO: 2981 - protein, 397 aa, Zea mays
  VARIANT 270: note = Ancestral polymorphism is R, Derived polymorphism is W
  VARIANT 263..397: note = Derived polymorphism lacks residues 263 to 397
  VARIANT 262..397: note = Derived polymorphism lacks residues 262 to 397
MNTTNGHGLMHHHHVQASMAPAQHQKQRPGLPPPAPAPAGAGSHSLHADMCVDDSSAPGRAQALGGLPPRKAHRRSRSDVVPYGYFQPLPPPSPSPKVEAGGWGLASGGGGGAGDDLLNAYMSMEGMDGLNHSDGDSRGSSGMRTNGADSSENESEDYGAGADSQFFLWGDGGKRRRNASGEPAAPPAAAAAAARHARSHSMDSLMGKLSFSANGEPGKFSLDFGGGEFTPAEMKRIMADEKLAEMALADPKRVKRVLANRQSAARSKERRMRYIAELEQKVQILQTEATTLSAQLTLLQRDSAGLATQNNELKFRLQAMEQQAQLRDALNEALTGEVQRLKLGDTASSGNNLPQQVQLRCQNQVAGLHKQQQQQGGEQIPFYQLEQNGAPRNDAPK

SEQ ID NO: 2982 - protein, 527 aa, Zea mays
  VARIANT 290..527: note = Derived polymorphism lacks residues 290 to 527
  VARIANT 19..527: note = Derived polymorphism lacks residues 19 to 527
MDATDPLCAISSTARLLPRTLGPAPAIGPSPSKARDALLEAIALARSLKGSEELVKQATMVPKEHGDIQALYHDDGVKGRPPANGSKEQQGRRPALDRKRARSRGWHRISELEKHLFPGGAANAKCTDDESKGSPDIVMGEPSLVHYSSDVLMTDENFTASDVDRETPNLGARAADPVLDPEPNLPDHAYERQPGGSSLGLYRDTEVGVAKENETCSKSIIFVEEDDVPIDYITIGRSTDETEVSSSHPLEGSSTEELVTKPVRHAAPDGICRTSHAAEDSIQHLVLASWHMKRSKRVVSYKHVFVEVCSIYFFSTDKSSQLLEMPQEDINPLNQAQMHGGSTKKSAPDLSPTKQKKQQAVQERKRKQQSKRGKKWLADTCMGVLEMFGGESLKIPQTNFESENQPHNDDVNIEKQTITSSTPSPNGAKEQKRAQRRNQPKKRNQRKILGDADLACQPGVRKSSRTRSRPLEYWLGERLLYGPIHDNLHGAIGIKAYSPGQDGKRSLKVKSFVPEQYSDLVAKSARY

SEQ ID NO: 2983 - protein, 128 aa, Zea mays
  VARIANT 56..128: note = Derived polymorphism lacks residues 56 to 128
  VARIANT 55: note = Ancestral polymorphism is P, Derived polymorphism is S
  VARIANT 43: note = Ancestral polymorphism is A, Derived polymorphism is T
  VARIANT 40: note = Ancestral polymorphism is L, Derived polymorphism is H
  VARIANT 33: note = Ancestral polymorphism is S, Derived polymorphism is F
  VARIANT 22..128: note = Derived polymorphism lacks residues 22 to 128
  VARIANT 8: note = Ancestral polymorphism is R, Derived polymorphism is C
  VARIANT 1: note = Ancestral polymorphism is M, Derived polymorphism is R
MVVLLCDRWSRFWVLAVYRVMQKVHPTNHFVISKDFDELLKMAAADKRLASELAPRSYLNGKAESVMQKLVTCVQNTVELYHELHALDRLEHDYRLKQKEQDGLSLRGDSLDILKQETILDCGVLWKQ

SEQ ID NO: 2984 - protein, 192 aa, Zea mays
  VARIANT 1: note = Ancestral polymorphism is M, Derived polymorphism is L
  VARIANT 8: note = Ancestral polymorphism is H, Derived polymorphism is N
  VARIANT 45: note = Ancestral polymorphism is G, Derived polymorphism is C
  VARIANT 54..192: note = Derived polymorphism lacks residues 54 to 192
  VARIANT 59..192: note = Derived polymorphism lacks residues 59 to 192
  VARIANT 92..192: note = Derived polymorphism lacks residues 92 to 192
  VARIANT 98: note = Ancestral polymorphism is D, Derived polymorphism is V
MGPGILRNLLHEHGRVLARVERRSTEPGIVAIDRWVQKPEALEIGELVRDAMRQGVARQIDARHQLEYPLERELLPLPDDVDPILVDGPIQRSCAGVVLGVLHGSQVSQLSQDQPYQSVVGQVQQLELRELRRLRRDLAAELVRAEPKDLQRRNEGPDPARDVAVEPVVADLYGGRGLVAARWRSGLVAARA

SEQ ID NO: 2985 - protein, 255 aa, Zea mays
  VARIANT 89: note = Ancestral polymorphism is P, Derived polymorphism is R
  VARIANT 103: note = Ancestral polymorphism is N, Derived polymorphism is I
MYFICYDLLYKDYNFDQKFSLSTCSNSGLNLTATGVKINEDFIGDIRTQHKSGRTTVDVIIDSDSKVSTTVTVDEALTGLKTSFAFKVPDHKSGKLDLQYAHNRFSMNSTIGLTSTPLVELAATVGTSELAIGAEFGFDSTSAAVTKYNSGVGYNKSDFSVSLLLADKGETLKASYVHLFNPTNGATVAAEVTHKLKTKENYFTLGSSHALDPSTLLKTRFSNSGKAASENDNCASADSRGFTLIGSSNESKAKI

SEQ ID NO: 2986 - protein, 1814 aa, Zea mays
  VARIANT 1192..1814: note = Derived polymorphism lacks residues 1192 to 1814
MFYTSSKVPREMDDTLATIRMKLKKRKKGKDSNDFDAVAECGPEVPALVQQEGERAVVDIGDGVADEKSNLNVVKLEGSDVSGNCAQGLDDLGLKDSLAVLFTRPGRKSRQVSEEAEGMEVSCPHDEDGLNKGSGLAPDTASKGIKRRRRRTKEEMKNASVQDQKASLPRKAKTNGSKSTKLYKVGAGPGQALGGLSSVSPQLEKSGKENAVDDGSFYQSLGEVLLQDVEASKVLKDGSITSFNGVTDHFEISAWASNHPGLESRSGNLDEKTPRTAEHTTNLGVSDAHTRSQTLGKESSDDVDCSQGKSPTSTIKRKIGLKPKQVPGKSVRRKEEVLSVDADNKPTDTTEIIEASTTPVIEENLDQLPVMAPKDSCSSHDIVGNSPMCLGADMAAPVKYVDIVDVATPLDYEDKENTSKVKRVTRGSKKRKHGDMAYEGDVDWETLMQEQGLFSNPSAGFPDQSIKTKNKIKTSEVYEGGGDTGVAAVRAGLKAKTITPIEKIKFKEVLKRKGGLQEYLECRNMILSRWSKDVKHLLDLADCGVSDVPLKDELPHQALTRAVFLFLDQYGYINAGIASDKVAKGHNDTPYEVIEVPKLNESHQMESVNIQNSVVSVSQKNEDFEHGTSTECCRTVSVKNTECALVEASNEKNRSTVHCGVLELLPHLMSEEHPMEKNILDVSTEVRNASLPSSNLDIQFTSYMNSSVGKVEAPHQQEALEIENSGNNCQSDRAEFAVHGKRIIIVGAGPAGLTAARHLQRQGFLVTVLEARERIGGRVYTDRTSLSVPVDLGASIITGVEADIATERRADPSSLICYQLGLELTTLNSACPLYDVVTGDKVPDSLDEDLEAEYNGLLDEMALLFAHNGDSAIGLSLEDGLEYALRKHRATQPMDSVDQDGHLRFMTNSRAVDISVSASIGKEIDHCGKNDKIDVLSPLERRVMNWHFAHLEYGCAATLKSVSLPYWNQDDVYGGFGGAHCMIKGGYDTVLRSLAKGLDIRLNHVVTEVLYGSEELGDSCKDGKYVKVSTSTGSEFTGDAVLITIPLGCLKADTINFSPSLPDWKVSSINRLGFGVLNKIVLEFPEVFWDDNVDYFGATAEETDLRGQCFMFWNLRKTAGAPVLIALLVGKAAIDGQSISSGDHVNNAMVVLRKLFKNASVPDPVASVVTNWGLDPFSRGAYSYVAVGASGRDYDILGRPVDNCLFFAGEATCKEHPDTVGGAILSGLREAVRIVDLLNTGSDYIAEVETLQTYQMQTDSERNEVKDMSNRLEACELSTALSKNSSDAMYPIVSKESLLQEMFFSAKTTSGRLHLAKELLKLPTDVLKSFAGCKEGLSTLNFWILDSLGKNATQLLRHCVRLLVLVSTDLVAVRLSGIGKTVKEKVCVHTSRDIRAIARQLVSVWIEVFRREKDSNGGLKLLRRMPSIESSKTKSKDLQSGKPTLRVPNGTLDNNKVVSQRQRTRFASSQSPPKINKKYDNKEMKLETVTAAMSDGKLLSQKQQHGIESKVEECGIPMSEEEAAAFAAAEAARAAAIAAAQAYASVEAEISVPRELPKIPSFQSFVMRDHHLDESDARKRTLKDDFGRLECISENDSKNGEVKDLPENTKYADGDSLKMSHDNFTQQSHSNETACLANAQDHSTDTVVVDGRFTRAWVDTDTICIDGVKDPLAIERWQAQAMEADKEFYSRIRIPDEDDSSSQKHTCRSSASQGADSKPASERQSRGVEHIKQGLVNFIASLLMPLYRGKKIDREGYKTIMRKSVNKIIDTCSEGEKSMTTLEFLDDKRKIKIESFVGKMVDKHLHVVSKSAKP

SEQ ID NO: 2987 - protein, 283 aa, Zea mays
  VARIANT 110: note = Ancestral polymorphism is S, Derived polymorphism is F
MSKGPVPFANIGKRAKGKHLLFNNLLYKDYNFDQKFSLSTCSNSGLNLTATGVKINEDFIGDIRTQHKSGRTTVDVIIDSDSKVSTTVTVDEALTGLKTSFAFKVPDHKSGKLDLQYAHNRFSMNSTIGLTSTPLVELAATVGTSELAIGAEFGFDSTSAAVTKYNSGVGYNKSDFSASLLLADKGETLKASYVHLFNPTNGATVAAEVTHKLKTKENYFTLGSSHALDPSTLLKTRFSNSGKVGLLCQHEWRPKSLVTLSAEYDPKVVSAPSRIGVAISLKP

SEQ ID NO: 2988 - protein, 184 aa, Zea mays
  VARIANT 164: note = Ancestral polymorphism is P, Derived polymorphism is L
  VARIANT 62: note = Ancestral polymorphism is D, Derived polymorphism is A
  VARIANT 51: note = Ancestral polymorphism is A, Derived polymorphism is S
MSKKIVVKLHLQDNKDKQKAMKAVSALTGPTVSPAGCTWCAGIDEISADMASHKMTVVGMVDPVSVVSKLRKASWSATIESVGPAKEPEKKDGEAAKKDGGEGEKKEGGEGEKKEAGEGENKKEAGGEKDKDGKKAAPPTEQQVQLAELLNQYYRASSYYPYPPVATHYHVQSMEEDPNSCTVC

SEQ ID NO: 2989 - protein, 260 aa, Zea mays
  VARIANT 75: note = Ancestral polymorphism is R, Derived polymorphism is T
  VARIANT 169: note = Ancestral polymorphism is A, Derived polymorphism is G
MRVLMSRRRGAGASGGGLCINKKARLFMCGCGGTKAVSISDGSSDKSPTATPQTAASTTPLTGTSTATVTTESTRRGGSRPATTTSSAPSSFSVSSSSVTTTTTTTADDGPSSMEESTPSLSALLRQLHELERSVRFLHSAGSTDGKQWHRRTVSEGGGGSGRVEESVAVVKESADPLGDFRRSMLQMIVEKEIVGGAELRELLHRFLSLNSPRHHHLILRAFAEIWEEVFAGHERAPDFLASSRRCRKKQHQHLATRGA

SEQ ID NO: 2990 - protein, 550 aa, Zea mays
  VARIANT 247: note = Ancestral polymorphism is L, Derived polymorphism is P
MTAPRALPVPPHTARRAQGRHPRSTPAPPPPPRHHLHPQQQGATASVLGVGVPRAWLSQRTPVLGLRAWVLVAAGAAAAALALFCLAVCLCRRCSRRRAPRLAPCPHRPGASKSLKHRVHAHHQAATMPPLPPPANKDAEEAAARWRPASFEQPPIQAIKAEQKAPLILAEHFANSTSGESTASDQGGSDAEVPEAARRGWGRRYTRREMEEATGGLAAANMVGEGGYGVVFRGVLRDGTAVAIKNLHNNRGQAEKDFRMEVQTIGRVRHKNLVSLLGYCSEGACRMLVYEYMEKSNLDKWLHHDDSETSSLTWDIRMRILLGTARGLAYLHEGLEPKIVHRDIKSSNILLDRQWSAKVSDFGLAKLLCSERSYVTTRVVGTFGSVSLFLCFFFAGREGCCFSSREFVIVSRVRCRYVAPEYAETGMLNERSDVYSFGVLAMEVMTGRTPVDYTRPADEVNLVEWLKRMVADRRVEEVLDPRLPEPPPSKALKRAVLAALRCVDPDGSQRPTMAHVVHMLEDDQILRDEFKLARDLSPRESDSYEREHSR

SEQ ID NO: 2991 - protein, 373 aa, Zea mays
  VARIANT 341: note = Ancestral polymorphism is R, Derived polymorphism is C
MTGAGAGGGTRITGVEPRWWWTPSLVSYRVVEIEIVGVHNSQWRTVLLSLHPPALPPCYINARRFCLSLSLRRLPPPHPSPLLGAAPRRAASSASPPRSPTTRPAPTSSRCSQSPPATPPLTPRIPDAESCPSPAAVSSVFSKFRDPAPSPVTPDDAAAAPDEPRDLGFDDDDSFDADSILCGVHQSAAEGIDGIMGKGAPSPRHAPWPLPTLVVITEGAATSQRMSVAIPLEQSITPLFNAATTTSLQLYFPSHVFSTEGGAGGENFSQFGADLSRRMTYCHRAKDDSTGLQRESWGRFPASIYVLISTTTATTSTVAKQSEPCGGEPPQEVPRRVPYLRRRYRVIDGPLHRYLAQGATPPSLAPSLFLAPI

SEQ ID NO: 2992 - protein, 175 aa, Zea mays
  VARIANT 154: note = Ancestral polymorphism is S, Derived polymorphism is Y
  VARIANT 151: note = Ancestral polymorphism is T, Derived polymorphism is I
MPCSADASSQTQSDALPLDLRWNQTQAGRQAGGLCLSRSIGDQDVGEFIIPVPYVKQIKLHCWEVVLHHFRTKLNCKLSLYCLMLEAILLFQATVSGMLLTAEMAFKCARGLPPEAAAEPIVKEAVEAKGLRDDTTCIVIDIISPEKPKRTIQSQRTPGKGLVLLKKILFKENNI

SEQ ID NO: 2993 - protein, 335 aa, Zea mays
  VARIANT 105: note = Ancestral polymorphism is T, Derived polymorphism is M
MAAAPSHPFVYIDAAALHSLLPFASLIPHLRAGLAHPELSAGIQCPQRVSIPLPTAPSAALLLMPSWCAHPSLPYLALKAVTSFPSNSPRLPSVHAAVSLFSAATGAPLASIDGSALTLLRTAAVSALAASLLASPSRPPSVLALAGAGALAPYLAEAHLAALPSVSRVLVWNRTRAKSAALVAKLRESHPGLTVEEVGSMDEAVAAADVVSCATGSREPIVRGELLRPGAHLDLVGSFTPAMRECDDDALRRGRVFIDFEAAMEEAGELVGAVQRGVLRREDVAGTLSELAAGTVVGPRRDDEITVFKSVGTAVVDLLAAQLAYETHLAATKDA

SEQ ID NO: 2994 - protein, 462 aa, Zea mays
  VARIANT 15: note = Ancestral polymorphism is Y, Derived polymorphism is H
MDRSSSGSCGQGTVHHWLVLIVVWLCGSQHVVSQKSTLEPKDKFLLSDPPIGLFDPIEISPSVLPHNTNPVEPLSPMYPNYTSYDPVLTGKCHVNFSALSYIMEKTAYDCSIPLAPLVADVICCPQVNSLMNIFQAAYGSGNGTLVLNQASANACFSDIMNILASKGANTNIPELCTLRPSNLTDVSCPVKDISSFEKIVNISKLQDACSNVDPLKECCRPVCQPAIAEAAIHISSGGANMFGSSSMPGSAVGIDVVSDCKGVVHSWLSMKLSSEEANSAFRVLSGCKVNKVCPLEFDEPSSVVKACGKASSSTLSCCAALHSYIGTRQKQIFVTNLQAINCATMFGSMLQKAGVVDDIYGLCDIDLKDFSLQDFGQQGCLLRSLPTDIVFDNATGISFTCDLSDNIAAPWPSSSSVQSLSLCAPEMSLPALPVSPKSESSGPSRTGIGVLLLLVFLTTITI

SEQ ID NO: 2995 - protein, 253 aa, Zea mays
  VARIANT 32: note = Ancestral polymorphism is S, Derived polymorphism is L
  VARIANT 33: note = Ancestral polymorphism is G, Derived polymorphism is S
  VARIANT 77..253: note = Derived polymorphism lacks residues 77 to 253
  VARIANT 136..253: note = Derived polymorphism lacks residues 136 to 253
  VARIANT 166..253: note = Derived polymorphism lacks residues 166 to 253
  VARIANT 197..253: note = Derived polymorphism lacks residues 197 to 253
  VARIANT 202..253: note = Derived polymorphism lacks residues 202 to 253
  VARIANT 209: note = Ancestral polymorphism is A, Derived polymorphism is V
  VARIANT 224: note = Ancestral polymorphism is P, Derived polymorphism is L
MLTAQGKASRSAPLGAGRWARRGRPVAAPYRSGWQAYGGVSLEGSEFLGGMHRTEERVVPRAPHAAARDAEVVRPLSKLPNSSIGLYDSSFERDACGVGFVAELSGDYKRETVNDAIEMLERMAHRGACSCEKNTGDGAGIMVALPHDFFKEVAKDAGFELPPPGEYDVGMFFMPTDEKRREKGKAEFKKTVVYKGQLKPSQLKGYYYADLGHENFMSYMALSPAVVLLWPTAMPDSSGCDLRLGGGKEMCLV

SEQ ID NO: 2996 - protein, 688 aa, Zea mays
  VARIANT 561: note = Ancestral polymorphism is G, Derived polymorphism is R
MSECWHWRCLSAYHPSPARKAMALSSPPSPWRKVRHPASRRARWAACGYTYVVIPLSRLARPGRPGLPATTTTHRHMAHDEPGFAYADYFAAAAGAVATFVPEVDVGGGGEEGLHLYGLQPHHQQPGVEMYGARGHMPPAAMMAAHGGKAALGLDVASPVVGGHFGDDHLRQALQAPLSLSLHDDGTADAAPLALHHHHHHLGGVPQAQQHQPPGAWPQPQQQGAWHLRGSRFLRPTQQLLQEFCTLPVDTVTSTPAKPASVEDGVGSSSSAAAPSQQIIQAMDAAELQRLKAKLYAMLQEVERRYRRYREQMRAVAGSFEAVAGERAAAAYTRLAQRTISRHFRSVRDGVAAQMQAVRRALGEKDADDGGVVPAAAGMMANKGETTPRLRVIDQCLRQHRAYQTGVVLESQPWRPQRGLPERAVSILRAWMFEHFLHPYPSDVDKHILARQTGLSRSQVSNWFINARVRLWKPMVEEMYSEEMKDPKEGACSNANSSVNTGAGYASEELGQPLGHGGACGGVDEQKPTRAQLVHDAGSLASAVSIGSSRDQQQISSINFRMMDHLDFDAYSGDPAAAGGPAAGFGGAGASGGVSLTLGLQQHADGDPHGGVNIAFAAAPSAAHEFLFMAGGGEHRMVAAGAVHPSSSHGHGQFAASMQGDSAGVASSHYHRGLGAATGFQLLHDLAG

SEQ ID NO: 2997 - protein, 146 aa, Zea mays
  VARIANT 89: note = Ancestral polymorphism is A, Derived polymorphism is T
MPADPCRAGSTKAGSVEGWILFVGLDPWRECTALVAQLEVHVHHRARRFRCEGMSTYPRTYDLIHADSVFTLYRNREKILLVVKTYWTTHEAMTKISSRTVNTCSDRKFNMWGKEGSINDMKEHCFWSQIMERKGPTVEMAEWCQE

SEQ ID NO: 2998 - protein, 175 aa, Zea mays
  VARIANT 6: note = Ancestral polymorphism is A, Derived polymorphism is G
MEVTIAEKKPRAAGDGDGLVERLPEALLVEVLARVDVDGACSAAASCRSLYSAANAVLPALTSIDLSAFAPSNAILSRILAGNGAVRSLTVNCSILDDSAASVIARGSLHNLLLLKCSFSMSFFVALGGACHDLICASSALFGSCFFVCTWMQVMKLNYTSNGLEFGLLLSSHSD

SEQ ID NO: 2999 - protein, 115 aa, Zea mays
  VARIANT 23: note = Ancestral polymorphism is S, Derived polymorphism is Y
  VARIANT 35: note = Ancestral polymorphism is S, Derived polymorphism is Y
MAERDYALEMWRLLDPDSRLINSVQLHDRMVCVKSGLKKSLLNVFHDGSCHPGMALVIDDRLKVWDEKDQLRVHVVPAFTPYYAPQAEANCSIPVLCVARNVACNVRGGFFKKTK

SEQ ID NO: 3000 - protein, 190 aa, Zea mays
  VARIANT 39: note = Ancestral polymorphism is P, Derived polymorphism is L
  VARIANT 46: note = Ancestral polymorphism is Q, Derived polymorphism is R
MAPAAPAATGAASPAVTKGGGKVAARSVRLGLPALPPLPGLSLAAQGQTRAASSLYKRLARDVVAMAAGEPAAPQAANEELTEFVDALKKEAGRSTMTRLLLVAAACVVKWDRIEDKYAVTTLAVAATLGMWSAGGVVSAIDRLPVVPGLMQAVGIGYSGWFAYRNLLFKPDRDAFFAKVREIYEDIISA

SEQ ID NO: 3001 - protein, 319 aa, Zea mays
  VARIANT 106: note = Ancestral polymorphism is A, Derived polymorphism is G
MAVLHLQAAAVAVLLMATGLRAQLRVGFYDSSCPAAEIIVQQEVSRAVAANPGLAAGLLRLHFHDCFVGGCDASVLIDSTKGNTAEKDAGPNLSLRGFEVVDRIKARVEQACFGVVSCADILAFAARDSVALAGGNAYQVPAGRRDGSVSRASDTSNLPPPTANVAQLTQIFGTKGLTQKEMVILSGAHTIGSSHCSSFSGRLSGSATTAGGQDPTMDPAYVAQLARQCPQGGDPLVPMDYVSPNAFDEGFYKGVMANRGLLSSDQALLSDKNTAVQVVTYANDPATFQADFAAAMVKMGSVGVLTGTSGKVRANCRVA

SEQ ID NO: 3002 - protein, 375 aa, Zea mays
  VARIANT 112..375: note = Derived polymorphism lacks residues 112 to 375
  VARIANT 140..375: note = Derived polymorphism lacks residues 140 to 375
MAADVVSDLVLSFFCCCFYAPGDHHRGGGTRHYGGGHAHPTGRDAAYHHRGAGSRTASGRSRRTVSLQTVELKVRMCCEGCERVVRQALQNLRGVDRVDVNVPMEKVTVTGYVDRARVLQEVRRSGKKAEFWPSGGTPLWFTSPRSYFRDDGGSYRRNSYNYRRHGAMGYEDGDVSLDGQVVPKKDTFRYLVSMLQKEGDIDEDVRHRIKAGWLKWRQVAGVLCDPWVPHKLKGKFYRTAIRPAMLYGAECWPTKRRHVQQLSVAEMRMLRWICGHTRRDRVRNDDIRERVGVAPIEEKLMQHRLRWFGHIQRRPEEAPVHIEIIRRPENVKRGRGRPTLTWIEAVKRDLKEWNIDKEIDVDRKGWKCAIHVPEP

SEQ ID NO: 3003 - protein, 137 aa, Zea mays
  VARIANT 55: note = Ancestral polymorphism is P, Derived polymorphism is L
  VARIANT 111: note = Ancestral polymorphism is L, Derived polymorphism is S
  VARIANT 120: note = Ancestral polymorphism is N, Derived polymorphism is H
MDRRILRTSSCNGSGKNPSPSSPAAVSRPASSGGIGSKDDAAAGERKALLPRQPPGGMARKGRKGSNRRVQWKDKHGSKLTDVREFQPRYVENKHPHSFYVCFHNVLVQLLMIDATDSKNLLIPNYTIELYEFCNFC

SEQ ID NO: 3004 - protein, 1046 aa, Zea mays
  VARIANT 433..1046: note = Derived polymorphism lacks residues 433 to 1046
MGRLQYQHRSRSDSSFARSSETTAADLDARSLGSTAAAETVECPFGHIDGLSRAELREAAYEVFFMSCRAGGGRGGGAGGGGGLNYYPAGGDGGGDGGSPTIGAGPRGGTGINVVSSRLKKALGLKARRSSQPTILRSSMNPSSAPGSPGRMRGVRDQAPGSPGKPRRPMTSAEIMRQQMRVPEQTDARLRKTLMRALIGQVGKKADTIILPLELLRQLKPADFADGGEHHQWQRRQLKLLEAGLIHHPSLPLDRLNAPVLRFREIMQVADARAIDTGKASDTMRAICDAVLALAWRCAPGTGSPGEACHWADGYPLNVLLYVSLLQAIFDLKEETVVLDEVDELLELMRRAWQTLGIDKMIHNVCFAWVLFQQYVATGQIEPDLAGAALTVLGDVAADAKQEHRDPVYTQVLSSVLGSIHDWSEKRLLDYHEWYGKGMAATGAGAMVIPLSLALSTSKIIAESVPGMGIDLADSEHDGIGSFAGNRVDHYVRCSMRNAFAKALENELGQGNSMVIQRDDDPSETMARLAKDTEQLAQFELENFSPVLKRWHPFPGASAVATLHSCYGVLLKQYVAKATCLTNELVHVLHAAGRLEKALVPMMVEDVADSDDGGRSLVREVVPYDVDSLVARFLRTWIEERLRVARECLLRSKDTESWIPKSKGEPYARSAVELMKLAKATVDEFFGIPVTARDDMVQNVADGLGAIVQEYISFLASCGTKQSYLPPLPPLTRCNQDSTIIRLWKRAATPCREAGTNPRGRAHHGQSESISGGNNPRPSTSRGTQRLYIRLNTLHYLLSHIQALDKSLSFFSHGGCASPASVSNRQLAPSGRFDRARAAAQSAIVHVAEVAAYRLVFLDSHHSFYGGLYVGGVADARIRPALRALKQNLSLLVSILVDRAQPVAVREVMKASFQGFLIVLLAGGSDRSFTVEDHAMVEEDFRSLKRAFCTRGEGLVSEQVVEAEARAAEGVVALMALTAEQLVEEFGIAAYECTEAVSERQRLPLPPTTRRWSRSEPNTILRVLCHRDDEVASHFLKRTFQLPKRR

SEQ ID NO: 3005 - protein, 180 aa, Zea mays
  VARIANT 90..180: note = Derived polymorphism lacks residues 90 to 180
  VARIANT 49: note = Ancestral polymorphism is G, Derived polymorphism is D
MKGSWEEGSASGCISKKNRAATAHGGRRCGGATDCSVAQRATVPVGDDGVRFSLAKGVAAGGRERGYSMVSRTSWAHAPSTAGASEEAPQFLLTKLPRLALLSPHSSPTTPLYLIRGKQGSGSLESGQAVRMASLTEQVKKDELLRTAVGFGLQLCQQICGASICFNELQPVTKKALAYL

SEQ ID NO: 3006 - protein, 335 aa, Zea mays
  VARIANT 278: note = Ancestral polymorphism is R, Derived polymorphism is M
  VARIANT 231: note = Ancestral polymorphism is R, Derived polymorphism is H
  VARIANT 92..335: note = Derived polymorphism lacks residues 92 to 335
  VARIANT 43: note = Ancestral polymorphism is A, Derived polymorphism is T
  VARIANT 6: note = Ancestral polymorphism is W, Derived polymorphism is R
MGLAGRHLSRNKVLFFSGALFISLAVGIHLSPYPPSLSLPHLASFLLLPHPGSASASSGSSCVQFLHRVSWSDAAGAADNGSGGGKARAWSWPPSLASACGFARLSRDDASLLLNGSWVMVAGDSQARLLVLALLRLLLDPAAAAAAEPELFRRHSDYRAAVPARDISVDFVWAPFESNLTRLLREDLRLAPRLPDVLVLGSGLWHMLHVTDAASYGDALASVAGAAKSLRSQLPEPPPHMFWLGLPHLVNHMLNTDAKRAHMNGTMVHAYDREVDRRGVLRGEGGSFLLLDVGKLTQGCGQQCTADGMHYDGDVYDAVMHIMLNALVIESQQRI

SEQ ID NO: 3007 - protein, 90 aa, Zea mays
  VARIANT 61: note = Ancestral polymorphism is R, Derived polymorphism is H
  VARIANT 27: note = Ancestral polymorphism is D, Derived polymorphism is Y
MMVMGIGVEKTLMEVILCIREDMDIIDLEDETIDTKILNSMAVTNDHFKTALGTSNPSALRETVVEVPNVSWEDIGGLENVKGELQEMYG

SEQ ID NO: 3008 - protein, 426 aa, Zea mays
  VARIANT 29: note = Ancestral polymorphism is A, Derived polymorphism is V
MVNRNMLGPRTRYAYLAVAEPWPKVSGFAKVDAGTREVVVVGSCMTPADSIFNDADDGHQLQSVLTEIWRDEPTAAPVPRRTDSIFNDADDGHQLQSVLTEIRLDTRTGASTRCAVLPASAQVNLEVGMVNRNMLGRRTRYAYLAVAEPWPKVSGFAKVDAGTGEVVVVESCMTPADSIFNDADDGYQLQSVLTEIRRDEPTAALQSVLMEIRLDTRTGASTRRAVLPASAQVNLEVGMVNRNMLGRRTRYAYLAVAEPWPKVSGFVKVDAGTGEVVVVESCMTPADSIFNDADDGHQLQSVLTEIRLDTRTGASTRRVVLPASAQVNLEVGMPWPKVSGFAEVDLGTTTLARQSEHVAWSRSHAPTQSAWNRCPQRGRRRTESPSRSSRMHTAHSGAFAAGATGVHGQRRRHVVVHRLRVVCTQQ

SEQ ID NO: 3009 - protein, 540 aa, Zea mays
  VARIANT 90: note = Ancestral polymorphism is G, Derived polymorphism is A
  VARIANT 300: note = Ancestral polymorphism is Q, Derived polymorphism is L
MGNQCQNGTYGYGSNYNSYNHFQKEPLASRHCDGDDTEGCYTGPSRPSIADLMRQGLRQTLTSISVLGRETPNVTEHYTLGRQLGEGLTGTTYLCTETSTGCQFACKSILKTRFRNMQDVEDVRREVQIMRYLSGQKDVVAIKDAYEDEEAVHIVMELCEGGELYDRIKKGNYSEQKAAHLIRTIVGVIENFHSLGVMHRDLKPENFLLQDKDDDLSIKVIDFGLSVFFKPGEVFTETVGSPYYIAPEVLQKHYGPEADVWTAGVILYVLLSGVPPFWADTHEGVLDKVRNGHFDFESDQWHMISDSAKDLIRKMLCPCPSERLKAHEVLKHPWICDNGVATHQTLDPTVLSRTNKLSAVNKSKKLALQVIAKHLSEEEIARLRGMFKAMDNGNNVVITLSELKEGLSKCGSVFRNIEISDIVEADDYDGNTNINWEEFIAVTVPLNKTEHKEHLMAALTYFDKDGGDYITVDELQKASVEHEMKNAFLEDTIYQVDQNNDGQTNYGEFVTMMQSDSSGLGWQTMESSMNVPLREAPEVY

SEQ ID NO: 3010 - protein, 277 aa, Zea mays
  VARIANT 141: note = Ancestral polymorphism is T, Derived polymorphism is I
  VARIANT 226: note = Ancestral polymorphism is Y, Derived polymorphism is D
  VARIANT 233: note = Ancestral polymorphism is T, Derived polymorphism is I
  VARIANT 237: note = Ancestral polymorphism is S, Derived polymorphism is F
MGGKFDHADRLFQSIESAYINSLSNTSDVKELIPEFFYMPEFLENSNSYHLGVKQDGEPIGDVALPPWAKDDNSSDEFDKDSIESDDRSLEELSWETLELLVVPHIFSLLLLTRCTFLKFKNTLPVSKRRQTFRNMVFYLTVEDPCGGTYQSWQQHVPPPPLEHVAKMHPSPLLAYANHPPQLLPPAVAAMINSNGGSGSNYSGGEILPPPSPGAALSFSKSTFTYEELMRATDGFSDVVLLGQGGFGYVHRGVLPNGKEIVVKQLKLGSGQGEREF

SEQ ID NO: 3011 - protein, 199 aa, Zea mays
  VARIANT 57: note = Ancestral polymorphism is G, Derived polymorphism is R
MLPSPCTPRFDGCPSLRPLPPLTPLDVAQGFEEKEKELHALKCLAVESEQGADGCDGAMGSLGIRLRAIHGDVQGISTPQAKELVCKFVEVVGPEGKAFATRCARMKVWSELFCALWDSSSVAKMLLLTISTKSYELGSLDCLEQLIVHERTITRWIPPPCREQQDKLCREETIGQAKTKILQRSIKHRITEHTSVGVV

SEQ ID NO: 3012 - protein, 303 aa, Zea mays
  VARIANT 70..303: note = Derived polymorphism lacks residues 70 to 303
  VARIANT 59: note = Ancestral polymorphism is P, Derived polymorphism is H
  VARIANT 9: note = Ancestral polymorphism is I, Derived polymorphism is V
  VARIANT 7: note = Ancestral polymorphism is Y, Derived polymorphism is N
MGLGIAYAIIFQEEMMRGKAGYEHLNEPLHILVEAELPVEIIDVCLMQAREILEGLLKPVDEFQDYFKKQQLRELAMLNGTLREEGMQRSGSASPFHNSLGMKRAKTRGRVDSEEKERQKSSKQVGLKEKLKSWPVPEVCIVYTRRNRKQHKKELGDEVTGATPGTEYHMPARYGCLNQVCPDAGSDKIPDPDVDFYSVPDADFSSFGDHSESSFQNDQVWAMYDEEDGMPPYYALIRKVISTRPFKGRLVHLKANDSNGFGVSSWLSCGYSKTCGEFKFDVFKFDASLNGELSEELRNRLMN

SEQ ID NO: 3013 - protein, 100 aa, Zea mays
  VARIANT 23: note = Ancestral polymorphism is M, Derived polymorphism is T
  VARIANT 24: note = Ancestral polymorphism is A, Derived polymorphism is E
MKPFICSSHFVVLVLSIAIAAEMASVEAGDDCYHLSAKFKGWCLYPDHCADVCSTESDNNLGGTCRGFPSRCYCRALFCPQGPKAAPSTIAAARSPPTIG

SEQ ID NO: 3014 - protein, 97 aa, Zea mays
  VARIANT 6: note = Ancestral polymorphism is C, Derived polymorphism is Y
MKPFICSSHFVVLVLSIVIAAEMASVEADHDCYHLSGKFKGWCLYPDHCADVCFTESDNNLGGKCRGFPSRCYCKTYCAQGPKAAPRTTVAASPALV

SEQ ID NO: 3015 - protein, 335 aa, Zea mays
  VARIANT 5: note = Ancestral polymorphism is A, Derived polymorphism is D
  VARIANT 65: note = Ancestral polymorphism is R, Derived polymorphism is H
  VARIANT 70..335: note = Derived polymorphism lacks residues 70 to 335
  VARIANT 119: note = Ancestral polymorphism is R, Derived polymorphism is C
  VARIANT 168: note = Ancestral polymorphism is L, Derived polymorphism is I
  VARIANT 248: note = Ancestral polymorphism is I, Derived polymorphism is N
  VARIANT 317: note = Ancestral polymorphism is V, Derived polymorphism is E
MALAAAIIVVFLLPGLLLTAMAATPYPHGRGADALVGASKKYEGSSNLVDLRYHMGPVLSAAPLRLYVLWYGRWDPAHQVPVRDFLLSLSDTSLPRPSVADWWATAALYADQTLANVTCRVDLAGEAADESASLGRSLSRLDIQRVLASAVAAGRLPADTRGGAYLVLTAPGVGVQDFCRAVCGFHYFTFPSLVGHTLPYAWVGHSGGRCADVCAYPFALSSYMARSGMAALRPPNGDAGVDGMVSVIAHELAELATNPLVNAWYAGEDPTAPTEIADLCEGVYGTGGGGGYAGKVSVDAQGRSWNVNGRKGRKFLVQWLWSPEAKACVGPNASD

SEQ ID NO: 3016 - protein, 591 aa, Zea mays
  VARIANT 236..591: note = Derived polymorphism lacks residues 236 to 591
  VARIANT 12: note = Ancestral polymorphism is S, Derived polymorphism is P
MELVYMERRNGSYDDGAVPEFSGRGAGGDQDQDPPAAASEVQSDSRQTPDEKKSKGCQSCRDPFCSCSGGTPHSELFPPHPAKMMILEFLIASLRHPTRTHNVSDLDDLIADGVSQGSVVNLGPSEKKVLESLHAMVNAKTRPKSPSPFMAGSKLRKIRSKSHVITQSEILKLISPETWEASSFPGASPMIGGGTAEDGVHGNKPPPPCCSSVSSNQHVLSRCPSSLSACLLQCIWKDGLPHFELSLDDHPIAVYAASPVRVLEKDRAFDYVYMIHSGEQGRKDWMGHSSNVSRLVGKVKVSSSLVLNPDKSGLLETEFVLYGSPDDYLRQMRSPYSVPKGKGLVRRVTEIMRAGNVSASPRHPWKLGKSSSHQFDDLAGVLEGEMISAGGSDLVSLKADDLPSNQELAAIVVREQRRRRRKEPVSGGWGLKFLEKAGLNRPQGTEETDVQNSDGATHCVTVVVPRGYHGGVVSKSSRPSGLVERWRSGGRCDCGGWDLGCPIRVLNGDGCGSLPEGESRDRRSVEISIKGWSDLYTSTLQGAKNETMLKLVNITEDLYILYFDSSISPLQCFSTGIAIVHSRAPELCPKL

SEQ ID NO: 3017 - protein, 275 aa, Zea mays
  VARIANT 12: note = Ancestral polymorphism is P, Derived polymorphism is L
  VARIANT 106: note = Ancestral polymorphism is T, Derived polymorphism is M
  VARIANT 121: note = Ancestral polymorphism is A, Derived polymorphism is V
  VARIANT 128: note = Ancestral polymorphism is A, Derived polymorphism is D
  VARIANT 139: note = Ancestral polymorphism is R, Derived polymorphism is W
  VARIANT 140: note = Ancestral polymorphism is R, Derived polymorphism is H
  VARIANT 150: note = Ancestral polymorphism is P, Derived polymorphism is S
  VARIANT 160: note = Ancestral polymorphism is S, Derived polymorphism is L
  VARIANT 164: note = Ancestral polymorphism is E, Derived polymorphism is D
  VARIANT 168: note = Ancestral polymorphism is R, Derived polymorphism is W
MAVVTRDAACLPLVLLLLVFSAAPSPADGCDRCVRRSKATYYQASSLALNAGSCGYGSLAASLNGGLLAAASPELYRGGVGCGACFQVRCRDSELCSAAGAKVVVTDQARTSNRTALVLSAAAYAAMASAGKAARLRDRRVVDVEYKRVPCEYAKDRNLLIRVEEKSRPPSNLSIRFLYQGGQTDIVAVDVATVGSSNWRFMARDHGPAWSTAQAPPGPLQFRLVVTGGYDGKWVWAESEVLPRRWEAGRVYDAGVQVSDVAQEGCYPCDTREWQ

SEQ ID NO: 3018 - protein, 313 aa, Zea mays
  VARIANT 125..313: note = Derived polymorphism lacks residues 125 to 313
MAVGFRRTLTTLASPKSMAPSFLLDCARPKKLSYARVRSTSLPVRLHPLAAALHESARALLAWADAPAQTGPAWVADGAGRAGRVLSGLADLLHHPQARDALRRHPWTTEQLLDDLLLLADLHGCFRESLVALTQLLAETHAALRRRDGARLAAALRAQRRSAREVSRLASSARDLSHRAAPDDDSDEATLADAFAAATAAVAAASAAVFAGVSAASAESAASAAPSPRTPTPYSPARTPGSPMWLVTDLLRRRRTVSFEDSCGEEEEERKAAMGRVRGLEACVDAAESGCQEVYRALVNARVSLLNLLTPTF

SEQ ID NO: 3019 - protein, 259 aa, Zea mays
  VARIANT 165: note = Ancestral polymorphism is H, Derived polymorphism is R
  VARIANT 127: note = Ancestral polymorphism is G, Derived polymorphism is R
MGLPDTLAEQMLPMQMNSSASALMPLTSDYDECFTAALAEGFMGLDGAMYHPQTGAILPGCDAEASQQGFFNSASSNGLVMIGEYQKMMEGEGLTTTYDDTDSMKGAFNTNAEMQTERIILTKQVGGNDQHLVNGCNGNPELSGLEDSTFKVVRLSPEEKKEKIHRYRKKRNERNFNKKIKYACRKTLADSRPRVRGRFAKNDELCEAAAQSGSLNYGHYEQTDHMKEEAMLDTSDILAHLSELNSYNYKYKCTIESWM

SEQ ID NO: 3020 - protein, 290 aa, Zea mays
  VARIANT 31..290: note = Derived polymorphism lacks residues 31 to 290
  VARIANT 56..290: note = Derived polymorphism lacks residues 56 to 290
  VARIANT 135: note = Ancestral polymorphism is W, Derived polymorphism is R
  VARIANT 138: note = Ancestral polymorphism is A, Derived polymorphism is V
  VARIANT 142: note = Ancestral polymorphism is P, Derived polymorphism is L
  VARIANT 180..290: note = Derived polymorphism lacks residues 180 to 290
  VARIANT 212: note = Ancestral polymorphism is C, Derived polymorphism is S
MTPRVQELLGDEHHPRNMVDNMALIIIDQTYSALLEIYGSEGSPSGDGDIQIQVSQPVDPADPESLMLSVNASPTHCCISLTDTIYDGGGQDQTNATSAEQSSNLQYRLTRSTITSSPGTLHLARVDGGRRGDYWACADVRPDVANKGILGVLETINARLDAAIQLEATLLTMAKESGCWSPKVREIAEVHVALVKMRAATDIDAIMRHRRCLQNRRLLIQEYITCRPNADQACSSEAALAKSSGTLHVGRKRGCPFQETMSGRLPESDDAEVLTKRLKALHISHNCSTS

SEQ ID NO: 3021 - protein, 160 aa, Zea mays
  VARIANT 152: note = Ancestral polymorphism is W, Derived polymorphism is C
  VARIANT 73: note = Ancestral polymorphism is S, Derived polymorphism is N
MLHACSRTARRSPRQRHPRRYVLHTQEQATRESHIADKYKNQGYRDLFGPGTLERASIEQWLQTEAQSFDIPSADMVYSLAYLYCPTCSSMAGAQLGKLLDIYEQRLGEEAFLAGGKFTLADLSHLPNADRLAGDPQSACLIESRRNVSKWWDTVSRRDS

SEQ ID NO: 3022 - protein, 137 aa, Zea mays
  VARIANT 34: note = Ancestral polymorphism is K, Derived polymorphism is N
  VARIANT 33: note = Ancestral polymorphism is T, Derived polymorphism is I
  VARIANT 8: note = Ancestral polymorphism is P, Derived polymorphism is S
  VARIANT 6: note = Ancestral polymorphism is P, Derived polymorphism is S
MKTFDPWPVFFHREWKRNCPFLTGFTITGFIITKMTANFTEEDLKNSKNIFSLLAQRELSPRTKNQAKNLWTKPPRLDACPIESKFWGTYAQHDLLSWAEAEFLHWWIPKDCPLTPSSKATIAAAFSTDGRVLASTQ

SEQ ID NO: 3023 - protein, 295 aa, Zea mays
  VARIANT 1: note = Ancestral polymorphism is M, Derived polymorphism is I
  VARIANT 28: note = Ancestral polymorphism is A, Derived polymorphism is T
  VARIANT 45: note = Ancestral polymorphism is P, Derived polymorphism is T
  VARIANT 53: note = Ancestral polymorphism is G, Derived polymorphism is E
  VARIANT 54: note = Ancestral polymorphism is H, Derived polymorphism is D
  VARIANT 86: note = Ancestral polymorphism is L, Derived polymorphism is R
  VARIANT 118: note = Ancestral polymorphism is T, Derived polymorphism is A
  VARIANT 124: note = Ancestral polymorphism is G, Derived polymorphism is S
  VARIANT 127: note = Ancestral polymorphism is H, Derived polymorphism is Y
  VARIANT 130..295: note = Derived polymorphism lacks residues 130 to 295
  VARIANT 143: note = Ancestral polymorphism is A, Derived polymorphism is V
  VARIANT 185: note = Ancestral polymorphism is R, Derived polymorphism is W
  VARIANT 196: note = Ancestral polymorphism is H, Derived polymorphism is Y
  VARIANT 198: note = Ancestral polymorphism is A, Derived polymorphism is V
  VARIANT 210: note = Ancestral polymorphism is A, Derived polymorphism is V
  VARIANT 227..295: note = Derived polymorphism lacks residues 227 to 295
MTTASSCPRVRELFGDEHHPRNMVDNMALIIIDQTYSALLEIYGPEASLSSDGHIQIQVSQPVDPADPESPMLSVNASPTHCCISLTDTFYGGGGQDQTNVTSAEQSSILQYRLARSAITASPGTLHLARVDGGGQGDYWACADVRPDVANKGILGVLETTNARLDAAIQLEATLLSVAKKSGYWSPKVREIAEVHVALVKMRAATDIDAIMRHRRCLQNRRLLIQEYITCRPDADQACGTETALAKSLGTLHVGRKRGCPVQETMSDRLPESDDTEVLTKRLKALHIAHDCSTL

SEQ ID NO: 3024 - protein, 274 aa, Zea mays
  VARIANT 79..274: note = Derived polymorphism lacks residues 79 to 274
  VARIANT 71..274: note = Derived polymorphism lacks residues 71 to 274
MAHGAAVLGSAAAVASRMEDETPSTIDPVINATPPSQPTSSAEIARVLACLFEKDVEFQLIRVDSFRGTKRLPQYLKLQPHGEALTFEDGNVSLVGTYSRGRSSATSPTSTRTRGTGTCSARARWSGPPSSSGCRRRRRASTSPAPTWSTASPTCRPTCSSTAGAAAASRRRPGRRQKVEEMLQLFEKSRRQLGKLLDIYEQRLGEEAFLAGGKFTLADLSHLPNADRLAGDPRSARLMESRRNVSKWWDTVSRRDSWVRVKELQRPPSAEAPF

SEQ ID NO: 3025 - protein, 295 aa, Zea mays
  VARIANT 28: note = Ancestral polymorphism is A, Derived polymorphism is T
  VARIANT 59: note = Ancestral polymorphism is V, Derived polymorphism is A
  VARIANT 86: note = Ancestral polymorphism is L, Derived polymorphism is R
  VARIANT 130..295: note = Derived polymorphism lacks residues 130 to 295
  VARIANT 139: note = Ancestral polymorphism is Y, Derived polymorphism is C
  VARIANT 170..295: note = Derived polymorphism lacks residues 170 to 295
  VARIANT 174: note = Ancestral polymorphism is T, Derived polymorphism is M
  VARIANT 185: note = Ancestral polymorphism is R, Derived polymorphism is W
  VARIANT 280: note = Ancestral polymorphism is T, Derived polymorphism is I
MTTAPSCPRVRELFGDEHHPRNMVDNMALIIIDQTYSALLEIYGPEAPPSSDGHIQIQASQPVDPADPESPMLSVNASPTHCCISLTDTFYGGGGQDQMNVTSAEQSSILQYRLARSAITASPGTLHLARVDGGGQGDYWACADVRPDVANKGILGVLETTNARLDAAIQLEAMLLSVAKESGYWSPKVREIAEVHVALVKMRAATDIDAIMRHHRCLQNRRLLIQEYITCRPDADQACGTETALAKSLGTLHVGRKRGCPVQETMSDRLPESDDAEVLTKRLKALHIAHDCSTL

SEQ ID NO: 3026 - protein, 295 aa, Zea mays
  VARIANT 245: note = Ancestral polymorphism is P, Derived polymorphism is L
  VARIANT 190: note = Ancestral polymorphism is G, Derived polymorphism is R
  VARIANT 167: note = Ancestral polymorphism is S, Derived polymorphism is R
  VARIANT 124: note = Ancestral polymorphism is A, Derived polymorphism is D
  VARIANT 121: note = Ancestral polymorphism is R, Derived polymorphism is S
  VARIANT 116: note = Ancestral polymorphism is S, Derived polymorphism is L
  VARIANT 90: note = Ancestral polymorphism is R, Derived polymorphism is C
  VARIANT 81: note = Ancestral polymorphism is R, Derived polymorphism is C
MDRGQHRSKPEATPLNQRFASLCPLSLSVRKGSKALAAADPPAAPRESKMPVKVFGSPTSAEVARVLACLFEKDVEFQLIRVDSFRGTKRLPQYLKLQPHGEALTFEDGNVTLVESRKILRHIADKYKNQGYRDLFGPGALERASIEQWLQTEAQSFDVPSADMVYSLAYLPPDMQLDGRGVGGLPAATGTMNPAHRQKVEEMLQLFEKSRRQLGKLLDIYEQRLGEEAFLAGGKFTLADLSHLPNADRLAGDPRSARLMESRRNVSKWWDTVSRRDSWVRVKELQRPPSAEAPF

SEQ ID NO: 3027 - protein, 127 aa, Zea mays
  VARIANT 122: note = Ancestral polymorphism is H, Derived polymorphism is R
  VARIANT 83: note = Ancestral polymorphism is G, Derived polymorphism is R
  VARIANT 13: note = Ancestral polymorphism is S, Derived polymorphism is F
  VARIANT 6..127: note = Derived polymorphism lacks residues 6 to 127
MRRRKRRGGLFLFSPLLSSPPVVSAAETLLCSIAPLRLRLRSHLSRRGRSVCSRAEPVQRGRERKRSKEPHRIRMGQCASHPGPAAGGGGGVARRGCLAVAREQRSRFYIFRRCVAMLICWHKYKKI

SEQ ID NO: 3028 - protein, 249 aa, Zea mays
  VARIANT 94: note = Ancestral polymorphism is K, Derived polymorphism is N
MLATAPAHHIAYHPTSGSASSLSSASFRYRDDDTAGGLTLCCTKAPKAMKQKRQMLSLEAHDCANAIPDLSNMIKAVQGQDLKLKCYEEMDKRKKLYNIIQETKGNYQGFFCRCRPLSKDEVSSGQNANGGTTKKTFKFDRVFTTKDDQGIGKTFTMEVNESNRGVNYRTLEELFNIAEERKRSVTYDLSVSVLENQAKKTDINCDATLKSLFGGRDKVGMLEISKLLSPDFPKISKLLWSMEPGMALW

SEQ ID NO: 3029 - protein, 535 aa, Zea mays
  VARIANT 477..535: note = Derived polymorphism lacks residues 477 to 535
MEPFFLFVGLALVLCFLTLYYRHLQSKKTSPLEPTEWPIVGHLPGLVANIHHFHDWATGVLAGAGYNFEARAGRTGVRYFITCDPSNVRHIFTSNFANYPKGEEYAAIFDVLGGGIFNADGESWRRQRVKAQMLMTGPRFRAFTARCSRDKVERSLLPFLAHHADDDGRAPPCDLHDVFLRLTFDMTCTLVFGVDPGCLAFGLPVVPFARAMDDALETLFLRHIIPMACWKLMNVLEVGQERKMAAARRTIDSFVAATVAKRRADKLKGCECVSNSYDLLSSFICHEDDDSSENDDVFLRDTTVNLLLAGRDTTGAALSWFFYLVSKDPRVEQKLLDELAPIAASRRTKGAEDAAHAGSGMVTFDADELSSLVYLHAALSECLRLYPSVPFEHKVAAAADVLPSGKELKAGDKVLVFNYSMGRMEGVWGKDCMEFRPERWLNQEGTKLRYEPSYKFISFNAGPRTCLGKEMAFVQMKTVAAAVLWNFAVEVVPGHVVEPKLSIILHMKNGLAVKVTRRDDGTAPSSSCVRHTACF

SEQ ID NO: 3030 - protein, 220 aa, Zea mays
  VARIANT 23: note = Ancestral polymorphism is R, Derived polymorphism is C
  VARIANT 42: note = Ancestral polymorphism is Y, Derived polymorphism is C
MADEAAPRLMPVAADRDKDDRRRCAAHCGFAVLGIMSTLLVYGILQILTDAALLKRQKLEIEELRKKLQGSHSEGLEQVVLKLRNDMHKEQMVAEKERELEEGEAQKSPSKIVADSLSQISRSSTFLPNIGVPTTSKTGRSTLLAAQARMQAQFEEKLQAEREEAARMQEELQAQLQAQQAALEENQSLLRQTQEEVKGMHTKFEKTNALLRAVLKLQKD

SEQ ID NO: 3031 - protein, 476 aa, Zea mays
  VARIANT 221..476: note = Derived polymorphism lacks residues 221 to 476
  VARIANT 203..476: note = Derived polymorphism lacks residues 203 to 476
MGKRSGGRKLPFFTRSSSSSSKRNRSGRRLPSPSKQDNATRALLASPTAASPSATPDSAAAGQTAQPPSPLSVTAGAGGALSGKITKKKPGARLWMRLDRWGASEVVELDKATIIRRAGLPSRDLRILGPVFSRSSSILAREKTMVINLEFIRAIVTAEEVLLLDPLMHEVLPFVDQLRQHLPLRSLVGGNGECAPDGNGEKQGGSHGGQVPRLNEATGAEHEFPFEFHVLEVALEIVCSSLDLSVDDLERHATPVLDELTKNVSTRNLERVRSLKSHLTRLLARVQKVRDEIEHLLDDNEDMEHLYLTRKQVQNQQVEALMSSAASNSIVLAGPGVPRLNSSFRRSLSVATSMHLDNDVEDLEMLLEAYFMQLDGIRNRILSVREYIDDTEDYVNIQLDNQRNELIQLQLTLTIASFGIAANTFIVGAFAMNIPSSLYNTDNTLFWPFVGGTSSGCFVITILLFGYAWWKKLLGP

SEQ ID NO: 3032 - protein, 220 aa, Zea mays
  VARIANT 40: note = Ancestral polymorphism is P, Derived polymorphism is L
  VARIANT 126: note = Ancestral polymorphism is N, Derived polymorphism is I
  VARIANT 128: note = Ancestral polymorphism is L, Derived polymorphism is I
  VARIANT 185: note = Ancestral polymorphism is L, Derived polymorphism is P
MAATPTAAVLLARPLIALSSAFTSPHRARVPSDPSSISVPPLRSRWCQWRGPLRSLPPEGAPAELMEEDSKFVPLNADDPMYGPPALLLIGFEKGETVTIQAFLKELEGEFLKASHASAVTDICKNALSIYMLIRVIKSLVYFLFHILLTQVIHCTEEMTKQTLWDAMHTEQPDLEAVKGWKQLPLLRLSLTVQRRQERTPNEKNLKHGHAYQENCHFAF

SEQ ID NO: 3033 - protein, 363 aa, Zea mays
  VARIANT 1: note = Ancestral polymorphism is M, Derived polymorphism is L
  VARIANT 30: note = Ancestral polymorphism is S, Derived polymorphism is I
  VARIANT 75: note = Ancestral polymorphism is I, Derived polymorphism is V
  VARIANT 77: note = Ancestral polymorphism is N, Derived polymorphism is T
  VARIANT 78: note = Ancestral polymorphism is D, Derived polymorphism is N
  VARIANT 90..363: note = Derived polymorphism lacks residues 90 to 363
  VARIANT 128: note = Ancestral polymorphism is P, Derived polymorphism is L
  VARIANT 150: note = Ancestral polymorphism is G, Derived polymorphism is R
  VARIANT 152..363: note = Derived polymorphism lacks residues 152 to 363
  VARIANT 178: note = Ancestral polymorphism is R, Derived polymorphism is C
  VARIANT 201..363: note = Derived polymorphism lacks residues 201 to 363
  VARIANT 210: note = Ancestral polymorphism is D, Derived polymorphism is Y
  VARIANT 277: note = Ancestral polymorphism is P, Derived polymorphism is S
  VARIANT 286: note = Ancestral polymorphism is P, Derived polymorphism is L
  VARIANT 318: note = Ancestral polymorphism is E, Derived polymorphism is K
  VARIANT 326: note = Ancestral polymorphism is V, Derived polymorphism is E
  VARIANT 334: note = Ancestral polymorphism is P, Derived polymorphism is R
  VARIANT 341: note = Ancestral polymorphism is R, Derived polymorphism is W
  VARIANT 342: note = Ancestral polymorphism is Y, Derived polymorphism is H
MTRDGVNDAPALKNADIGITVAYSTDAACSASDIVLSEPSLSVIIGVVLTSRAIFQRMKNYMFDFPPFMVLIIAILNDGTIMTVSKDIVKPSPQPEGEIFATRVVLSAYLATMTVIFFWDAYKTDFFPVWTSNCYSDYRIRQLGICYDQGHWMRLGRHIWLYNIISFFPPDIIQFLIRYALSRRAWNLVLEQREATTMNPSYKEPDPSHDIMEFSYNVSTTTIDTNSSDGGCWQQHLRIKVPREKGESIVAKLGGSPSLSKSTATTQSLKSRGVWFPGRDNEILAPIFTPPSVAEVDVEANLPQQALKDVHVHAYTAEETKEAFYVARLFFLLPLSRVLYRYCVPVLVNFPFILFVKFCTILR

SEQ ID NO: 3034 - protein, 379 aa, Zea mays
  VARIANT 127..379: note = Derived polymorphism lacks residues 127 to 379
  VARIANT 213..379: note = Derived polymorphism lacks residues 213 to 379
  VARIANT 247: note = Ancestral polymorphism is A, Derived polymorphism is V
MAATTHAASMSFLLSHPQSRSATPSCHLPLHLAARRVRCATDAAALSPAVNTKHRRTADENIHEEAARHPALKQGLSAWYEPFPPAPNGDPNERYSLDEIVYRSSSGGLLDVWHDMEALARFSGAYWRDLFDSRIGRTTWPYGSGVWSKKEFVLPEIEPDHIVSLFEGNSNLFWAERLGRDHQGRMNDLWVKHCGISHMGSFKDLGMTVLVSQVNRLRRAPLSRPIAGVGCASMGDTSAALSAYCAAAGIPTIVFLPTNRISLEQLIQPIANGATVLSLDTDFDGCMRLIREVTAELLSSSLCIIFTAFLEQKLVEFDRTERLNHFVLTDSDIAVVDDLGHIFEKYPHFHLAVTFRNNKEQPLNSGFVAVRGTRDGITK

SEQ ID NO: 3035 - protein, 314 aa, Zea mays
  VARIANT 14: note = Ancestral polymorphism is A, Derived polymorphism is P
  VARIANT 73: note = Ancestral polymorphism is P, Derived polymorphism is L
  VARIANT 75: note = Ancestral polymorphism is G, Derived polymorphism is S
  VARIANT 80: note = Ancestral polymorphism is L, Derived polymorphism is P
  VARIANT 82: note = Ancestral polymorphism is M, Derived polymorphism is I
MARPCDLPPVRQAAALLLACALALLAVQLRPCRAQQQQQPPSPGYYPSGMFRPLGFSEAYRTLWGAQHQTLSPDGKSLTLWMDSSSGSGFKSARAYRNGYFGASVRVQPGYTAGVNTAFYLSNSEEYPGHHDEIDMELLGTVPGEPYTLQTNVYVRGSGDGTIVGREMRFHLWFDPTADFHHYAIIWNPDQILFLVDDVPVRRYERKAEATFPDREMWAYGSIWDASDWATDGGRYRADYRYQPFVSRFAGLRVGGCAADASADCQPVPASPAAPGTAAISAQQEAAMRWAQRNSMVYYYCLDSTRDRALYPEC

SEQ ID NO: 3036 - protein, 90 aa, Zea mays
  VARIANT 20..90: note = Derived polymorphism lacks residues 20 to 90
  VARIANT 17: note = Ancestral polymorphism is E, Derived polymorphism is D
MPGDSVLISNYCMGRMEGVWGKDCMEFRPERWFNDEGGLRYEPSYKFISNAGPRTCLGKEIAFVQMKTVAAALLWNFAVEVVPVIPKLQE

SEQ ID NO: 3037 - protein, 211 aa, Zea mays
  VARIANT 65: note = Ancestral polymorphism is P, Derived polymorphism is L
  VARIANT 41: note = Ancestral polymorphism is F, Derived polymorphism is S
MVMGLTANACSYDYLLHRDICFVSPHGGRPDMDPVLLLLEFFTSLCFLALYYRRLQSKKTSPLEPTEWPIVGQLPGLAANLHHFHDWATALLAGTGYNLEAKRRPRPAVLRHLRVCDPANVRHIFTSNFANYPKGHEFAEIFDVLGAGILNSDGESWRRQRVKPKCSWPLHGSAPSRHGAAAAKWIRASCLCSPSPPTREGRAICMTCSLG

SEQ ID NO: 3038 - protein, 292 aa, Zea mays
  VARIANT 80: note = Ancestral polymorphism is R, Derived polymorphism is C
  VARIANT 108: note = Ancestral polymorphism is D, Derived polymorphism is E
  VARIANT 141: note = Ancestral polymorphism is R, Derived polymorphism is H
  VARIANT 151: note = Ancestral polymorphism is P, Derived polymorphism is S
  VARIANT 161: note = Ancestral polymorphism is I, Derived polymorphism is T
  VARIANT 175: note = Ancestral polymorphism is G, Derived polymorphism is S
  VARIANT 258..292: note = Derived polymorphism lacks residues 258 to 292
MLAGLLVELHDTTRLVAFVTDQFGITFFTAAHDASVTARCLFMPMNLHALSLVLHLPEQASFMPGEFRDLAEAVSSVQLRDDLLSMLVAGHETTGSVLTWTIYLLSKDPTALRRAQDEVDRVLQGRLPKYEDVKELKYLMRCINESMRLYPHPPVLLRRAIVDDVLPGNYKVKAGQDIMISVYNIHRSPEVWDRADEFIPERFDLEGPVPNESNTDFRFIPFSGGPRKCVGDQFALLEAIVALAVVLQKMDMQLVPDQKINMTTGATIHTTSGLYMNVSLRKVQQEAELALR

SEQ ID NO: 3039 - protein, 158 aa, Zea mays
  VARIANT 71..158: note = Derived polymorphism lacks residues 71 to 158
  VARIANT 63: note = Ancestral polymorphism is A, Derived polymorphism is V
  VARIANT 55: note = Ancestral polymorphism is R, Derived polymorphism is G
  VARIANT 38: note = Ancestral polymorphism is G, Derived polymorphism is R
  VARIANT 36: note = Ancestral polymorphism is T, Derived polymorphism is I
MKKIYFLLNEIDKEKTIEVDNLEKAVMSLTVQLSSTHGEQENSMLDTIREASILRADKAKLHANLHDVNEQLRRCESWLEDINKESKSKIGSLADSLNVSKQNEEMLKTDAEDIRRLIEATKSNEENLRIASNELELRYKSSDYEKQQIMEENSRLQI

SEQ ID NO: 3040 - protein, 88 aa, Zea mays
  VARIANT 20: note = Ancestral polymorphism is G, Derived polymorphism is R
  VARIANT 34: note = Ancestral polymorphism is R, Derived polymorphism is C
MASRPKLSGIQKQVLALYRGFLRTARLKAPEERRRIESVVFAEFRDNARSVDRRNFVHIEYLLRRGKKQLEQLKNPDITGLATLVVKK

SEQ ID NO: 3041 - protein, 230 aa, Zea mays
  VARIANT 162: note = Ancestral polymorphism is D, Derived polymorphism is A
  VARIANT 129: note = Ancestral polymorphism is G, Derived polymorphism is S
  VARIANT 106: note = Ancestral polymorphism is G, Derived polymorphism is C
MGSLQPNNAVAVAVAAAVVLAALATGGSCWTDDRLKAVPPGPNITADYDGKWLAAKATWYGSPVGAGPDDDNNGGTCGFTGVNLPPYSGMAACGNSPIYKDGKGCGSCYEIRCTSPQECSDEPVVYAPGKNIVFHVEHGSDPSHLALLAKFVAGDGDIVQMDLKQGASLKWEPMNHSVGAIWRIETAPHKPLKGPFSIRLTSESGQEVVAADVIPEDWKPDTTYQSNVQF

SEQ ID NO: 3042 - protein, 142 aa, Zea mays
  VARIANT 111: note = Ancestral polymorphism is T, Derived polymorphism is N
  VARIANT 110: note = Ancestral polymorphism is I, Derived polymorphism is V
  VARIANT 81: note = Ancestral polymorphism is A, Derived polymorphism is T
  VARIANT 69: note = Ancestral polymorphism is T, Derived polymorphism is S
  VARIANT 68..142: note = Derived polymorphism lacks residues 68 to 142
  VARIANT 66: note = Ancestral polymorphism is A, Derived polymorphism is S
  VARIANT 61: note = Ancestral polymorphism is D, Derived polymorphism is E
  VARIANT 57: note = Ancestral polymorphism is L, Derived polymorphism is M
  VARIANT 55: note = Ancestral polymorphism is I, Derived polymorphism is T
  VARIANT 39..142: note = Derived polymorphism lacks residues 39 to 142
  VARIANT 31..142: note = Derived polymorphism lacks residues 31 to 142
  VARIANT 19: note = Ancestral polymorphism is D, Derived polymorphism is N
  VARIANT 13: note = Ancestral polymorphism is R, Derived polymorphism is P
  VARIANT 6: note = Ancestral polymorphism is V, Derived polymorphism is I
MQNWDVALEELNRLKEIINSKNFSSPLNQLQNRIWLMHWALFIFFNHENGRNGITDLFFQDRYLNAIQTNAHHLIRYLATAVVVNKRRRNMLKELIKVIQQEHHSYNYPVTEFLECLYVNCDFDGAQEKLIECEQVTLEQLE

SEQ ID NO: 3043 - protein, 617 aa, Zea mays
  VARIANT 35: note = Ancestral polymorphism is V, Derived polymorphism is A
  VARIANT 55: note = Ancestral polymorphism is R, Derived polymorphism is W
MMLSQKSLFRGRVFVAVPEEPRDGKSILSWVIDRVSDSAEIIIVHIVTSPDFESRQQILDCYLDQCSRKKVRAEKRVFLFTDIDEGLIHLINLYGVTELVIGAAADRHYRRKMKAPQSKTALSVMQKAHSHCNMWFICKGKLMFFREANYCLLTKSRSARPTCGVGNRKMDLRSLLQPNLEAKRLEYMYTKDIEIRKEIEAEISQQREETETLKKATLMLQNELDWYRYQWNKNANALQQASKQKRLLEHRISELDSVASHLGESMRASDSLVLSLKLEYSKVKRERDDAVKEARDMRMEKELTEPRAYGAMSSEFSLAELEQATQAFSSSLNIGEGGFGSVYKGLLRSTTVAIKILNTESLRAQSQFKQEVAILSRVRHPNLVTLIGASPEASALVYEFLPNGSLEDRLNCVNSTLPLSWQVRIQIIAEVCSALIFLHKHKPHPVVHGDLKPGNILLDANLVSKLSDFGISRLLLESSATGSEAHFTTQPMGTPAYMDPEFFGTGELTPQSDTYSFGITILRLLTGRAPLRLARVVQQAVVMRDPHMAADGFTYEADALRYWLDSGHATSPVTNRSLSNRDTIPNHALRSAIQEYLRQNELQEPFSQWQEDFGVVN

SEQ ID NO: 3044 - protein, 290 aa, Zea mays
  VARIANT 26: note = Ancestral polymorphism is T, Derived polymorphism is M
MGIRRARRFLFLAAAVLLLHAPLPATSADLYALIYKGCANQSFPGGVAPPSVAALSTTLSAQSASAKFYKTSSSSSAASSSTSVFGLFQCRGDLSASDCAACVSRAMSSWPGVCGASVAARVQLAGCLALYEVSGFPQVSGVQMLFKTCGTGSGGGGGDFEMRRDTAFSALEGGVATSSGGFVATSYQAVYAMAQCEGDLSTGDCSQCVTQAVQHVEVECGGAPSGQVYLDKCYISYSYYPHGVPHGGGTGGQQTAKTVAIVLGGAVGLGFVVICLLFARSLVKKKDGDY

SEQ ID NO: 3045 - protein, 400 aa, Zea mays
  VARIANT 222..400: note = Derived polymorphism lacks residues 222 to 400
MPRLRLPLVLLLPIALTIILLILFPFSPSPRSPPPQPLPCGAALSDAADGRWVPTPSPAPPPLYSPSCPFHRNAWNCLRNGRPQLAALSWAPARCGGAVVPRVDAAGFLAAARGRRIGLVGDSLSENLVVALLCALRSADDGARKWKRRGAWRGGYFPKEDVVVAYHRAVLLAKYTWLPVENSEVRKDGIKGTYRVDVDIPANDWINVTKFYDVLIFNTGHWWDRYKFPKDTPLVFYKGGKPIEPPLDMHNGLKVVLKSIASYIEREVPRKTLKLWRTQSPRHFYGGEWDHNGSCVSDRRLEEHELNSWFDPQFGGVNKEARTVNLAIQEALAGTEIQLLNLTYMSEFRADAHPAIWLGKKDAVAVYGQDCMHWCLPGVPDTWVDILAAQIMHHFKQEKG

SEQ ID NO: 3046 - protein, 960 aa, Zea mays
  VARIANT 344..960: note = Derived polymorphism lacks residues 344 to 960
MFTAAVKSYGRAIELDSSRVFALIESGNIQLMLGYYRKGVEQFRSALEMAPCNHSAYFGLASALLAWARNCVTTGAFGWAASLLKEASEASRICTSLTGNLSCVWKLHGDVQLTLARCFPWVDGKIKRVMDAQMFKNSVQEWRNTCLLAANGAKLSYQRALHLTPWEANVHNDMAICLDLICSMDDKNRFNPNVWELPEKMSLGALMLEPVNKDFWVTLGSMSSYLALKQHSFIRALHLDMSFSEAWACLGKIYRQSGDKQLAKQAFDRARSIDPSLALPWAGMSAENYHQSGSSPVNESFESCLRAVQILPLPEFQIGLGTIAARSSNLLSPQVLMAVRQAVQRAPHYPESHNLNGLISEVRLDFRSAITFYLQARFALGMMYNSMSDNRQAFADVSVNLARALCKIYALALWKIGQSKEALSVSGSLAENLSGIKVESATAAWGFICTLTYGISGKDSAAAMIQKLPDQLNYNSQLKFIISALDALHPTKRLQLPQLNMPPKRTAYEVMSEVHSNIALGKAIGVGFDKPLRVDGSLSYLKKVLHMYPDCSLVRNQLGSLLLWSGDWMASHKAIRVTSLSHGHTSSMGLRSPHHIQACAMVSCYATCCTYTKFSFATCEHQYLSGPDAIHHLQRWVHCEPWNQDARYLLVLAIFQKAHEEKYPKHTCVILKKLIMQVLSNISNPHEKEAMQYQVFLLLLLSSEVCLQSLDYENCITEAKEALKLTPSSRVDTFFANLQLCRAYVVHGDLLNSRNEYMKCLRNHTNTEIGWVMLKQLESACSLEGFSDEIDIKLHECVKRNGSDSSKWTSLFNLACAQCFLWGGNFESAEKALAQACSQVDPDSCILFLNASSLRKAQQKSHASLPLVSLLLAQAEGSLGSKTKWERNLRLEWFSWPPELRPAEVYFQMHLLSRQSSAAVSQQNQLVETIQSPELWLLRAIHLNPSCPRYWKALLQQIYV

SEQ ID NO: 3047 - protein, 68 aa, Zea mays
  VARIANT 49: note = Ancestral polymorphism is V, Derived polymorphism is L
  VARIANT 31: note = Ancestral polymorphism is L, Derived polymorphism is Q
  VARIANT 21: note = Ancestral polymorphism is K, Derived polymorphism is R
MSTYPRTYDLIHADSMFTLYKNRCEMDRILLEMDRILRPRGTVIIREDVDLLVKVKSLANGISRRTVK

SEQ ID NO: 3048 - protein, 277 aa, Zea mays
  VARIANT 47..277: note = Derived polymorphism lacks residues 47 to 277
  VARIANT 58: note = Ancestral polymorphism is A, Derived polymorphism is G
  VARIANT 130: note = Ancestral polymorphism is D, Derived polymorphism is G
  VARIANT 136: note = Ancestral polymorphism is D, Derived polymorphism is V
MSGGVGPTAGGGITLPSMGAPPPPLHPTPTSPTTRPHHHYYLFSIKQLNTLGAAAVLAFSTTVPLSEIAFAVLLPPYLLVLAWLAFPQRPGKPNPAAPVFPGVGGRLRLALHTAVGFVVGAALPALYILDGLRAGDTAGVAAAAPHAFLLSAQVFTEGIAAAWPGTFSLPVRAAVPVMYSARRMFAASEWLRQELQERDDLGRGPPVPPRRVVAGRALAAANLAFWGLNLFAFLLPFYLPRALRRYYLGNDHEDDGGARAHSKQQQQQQQGEAKKDS

SEQ ID NO: 3049 - protein, 168 aa, Zea mays
  VARIANT 92: note = Ancestral polymorphism is V, Derived polymorphism is D
  VARIANT 96: note = Ancestral polymorphism is R, Derived polymorphism is L
MPRRNPPLPPREQSNSFLPHASSKAGDAPLGAFWATQHAQGAQAVVNRNPLFDGESIKASLSSKQNQSWVDTSISIPGNRHDHSGQMSLTKVSLTLRYKILGKVEHNNLNPSQNASELELEVSNLKEQLKKTTLEKAEMTGPTDIENHIRHDCIILTVYVHLVESACQ

SEQ ID NO: 3050 - protein, 108 aa, Zea mays
  VARIANT 3: note = Ancestral polymorphism is S, Derived polymorphism is F
  VARIANT 5: note = Ancestral polymorphism is A, Derived polymorphism is V
  VARIANT 8: note = Ancestral polymorphism is A, Derived polymorphism is V
  VARIANT 36: note = Ancestral polymorphism is Q, Derived polymorphism is L
  VARIANT 43: note = Ancestral polymorphism is L, Derived polymorphism is I
  VARIANT 81: note = Ancestral polymorphism is P, Derived polymorphism is L
MDSVAENAEYKDRDIKSLSLCCYVPGPRGRGFVDVQIFILIELLFDCRTRWRRWTSMKGNMASLVGSILKRCLLCYTLKKLNLLLCYLLNLKRYISSLLHYLLLIFRI

SEQ ID NO: 3051 - protein, 459 aa, Zea mays
  VARIANT 25: note = Ancestral polymorphism is P, Derived polymorphism is R
MASASAAPAPDREEIVFLDVETSTPPCVLLEFGAVVVCSRRLVDVSSFATLVRPANLDALPDPTARSNGITRGTLADAPPFRDVADMVYDVLHGGCRMPTPWTGRVWAGHNIVHFDSMIIMDAFAEIGRPPPQPKAMIDTLPLLTQCFGPRAGDMKLASLANYFGLGKQRHSNFCFKSPKILFWQEESLRGVRVPTVQNMSSGGATIRTQGITSDPAPNRDNPNESLLVGSSTVHVEEMMLDTTVTVQTDTRSSGAFSGFVELDDVSTESIKISAPLFLRPFGPRAIVQHKGSPLQLICPGLEVLWVNTKGFPNSPHRPKVGIKVDIPENLSKVLGFCDDLAQSSSSSPGPGAICSNSRWKSLIERDADRRPTVWLKIPTFGSGDTAACRTHVYEKECDGVVPRLVSERVDPSELASMLQGNKVVDAFVSVETFDHYQSAGIRLVANRLDVHFKRQQQA

SEQ ID NO: 3052 - protein, 334 aa, Zea mays
  VARIANT 33: note = Ancestral polymorphism is V, Derived polymorphism is D
  VARIANT 216: note = Ancestral polymorphism is L, Derived polymorphism is P
MRWFYRKGSSGFSSASTAEDVTAGVDGQGLVAVITGASSGIGLETARVLALRGVHVVMAVRNVSAGLKAREAIVAKIPVARIDVLELDLSSIASVRRFASNFDSLNLPLSILINNAGVMTRSCTRSCDGLELHFATNHIGHFLLTNLLLENMKKTCRDSGIEGRIVNLTSSAHSITYREGICFDKIHDPSSLNDFVAYGQSKLANILHSNELSRILKEDGVNISANAVHPGVIMTNLFRNRTIVSGISSSLAISFIYHMSSRIGKALLNSIGRIICRTVEQGAATTCYVAMHPQVRGISGKYFTNCDVANPSSQASDAELAKKLWQFSLQIVSS

SEQ ID NO: 3053 - protein, 225 aa, Zea mays
  VARIANT 204: note = Ancestral polymorphism is P, Derived polymorphism is L
  VARIANT 158: note = Ancestral polymorphism is L, Derived polymorphism is I
  VARIANT 64..225: note = Derived polymorphism lacks residues 64 to 225
  VARIANT 17..225: note = Derived polymorphism lacks residues 17 to 225
MEVVSGHWNYHGKPVVQNVLHKASEKSAHAKKWAEPHIETAKMKWIPVKEKLVVLKKNAEPYVQKVSTRSVEFYESSRDAVTPHVVKVKEFAHPYYQEAKKFSKPYIDQIAEITKPHVEKVRTTLKPYTKRAVHAYGSFLASATTYHRQAQATIMDYLHQHGVPKSLATKELVWFLASALLALPVFVIYRLVVETFCTKKNRRPRGGNGNGNHGQKRHKRRYADK

SEQ ID NO: 3054 - protein, 210 aa, Zea mays
  VARIANT 186: note = Ancestral polymorphism is P, Derived polymorphism is L
MPAAAMRGDITYSGRARRVAVLRCLVAAVVVTILLAGLTALIFWLVVRPKPIDYTVTRAVARHFNVTPPPDATANATFYLTLAAANPNRRVSVLYEWVEFRVLYGEEAQLAVEDAPAFRQPRRNETLLDVRAVARSVPVGGQAARELRHDLAAGEVGVDVRMRARVRFETGGVRSRRYSLQAFCSPVVIALPPPSSARPFQSVPCDVAIS

SEQ ID NO: 3055 - protein, 563 aa, Zea mays
  VARIANT 467: note = Ancestral polymorphism is I, Derived polymorphism is M
  VARIANT 87: note = Ancestral polymorphism is P, Derived polymorphism is Q
  VARIANT 59: note = Ancestral polymorphism is L, Derived polymorphism is P
MLAVAASLRASASAVAEAGGDPAVLHAVLIKTASSSRAAYNLLFSRYHPSLSLHLLSHLPFCFRPTAGSLTSSLSSLSASSPASALPLLRRVLGMSPALLCDGPLSSLLRSMPPSIAPHVHALAFKLALSSSPYSASCLITLYSRARSPACARHLFDEIPVANRDSVCYSSTIVGLAQNGWYEESLSVFAGMRANGVDSTMHALSGSLRAAAGLAVLEQTCGIHAHAVVVGLDGNVAVGTALVDAYGKAGDVDDAAKVFEGLGGDRNLITWNAVLSAHAQQGDVQEVTGLFNQMMKLGFAPDGLTFLAVLTSCSNAGAATEAKFWLEAMQSKYGVKPDLEHYTCVVGAMARVGHLEDAESFACTMPCKPDAAVWRTLLMGCVVHRRVDMAESMGQRLLEINPKDDSAYVMLANVYSTAGKTNEEAEAWTAMRDHGVRKEGGRSWIEVRGLVHVFVANERRHEQLLEIYDKLHELIQEVEKLGYKEADERLWHHSERLALAYGLISGAAPSGKVLRIVKNLRICAHCHEFFKYASMVIDRVIVVRDVNRYHTIKKGDCSCRGCW

SEQ ID NO: 3056 - protein, 501 aa, Zea mays
  VARIANT 1: note = Ancestral polymorphism is M, Derived polymorphism is I
MLMPPPPCPPTLPHLLRHLRGRMLTTQLLDHLIRSTSSSPFPSLSFSVFILLLRSSLRPSHFTFPFLARAAARLSSASLASALHAHPLRLGLLPADLHVANSLVHMYAACALPDHANRVFDEIPRPNLVSWNALLDGYAKCHDLPAARKVFARMPQRDVVSWSAMIDGCVKCGEHREALALFEMMENAAARSAEEEDGGGGARANDVTMVSVLGACAQLGDLERGRRAHRCLRERGFALNLRLATSLVDMYAKCGAISEAMEVFWAVPVESTDVLIWNAVIGGLAVHGMATKSVEIFLEMQRAGVAPDEITYLCLLSACAHGGLVDEAWEFFRSLEAQGLRPHVEHYACLVDVLGRAGRLEEVYGVVKSMPMKPSVSVLGALLNACHLHGWVELGEVLGRRLVQLQPDHDGRYIGLSNIYAVARRWQEAKKARKVMEDRGVKKVPGFSEIDVGGGLSRFTAQDKTHPGSVKIYELLNLIAIEMKMKDDATIPDYLLCTLLE

SEQ ID NO: 3057 - protein, 510 aa, Zea mays
  VARIANT 300..510: note = Derived polymorphism lacks residues 300 to 510
  VARIANT 166: note = Ancestral polymorphism is G, Derived polymorphism is R
  VARIANT 32: note = Ancestral polymorphism is G, Derived polymorphism is R
MAAAVVDKVFVALPAEVKAGQSTLAWALDRFGGGGGGRTTVVIAHVHVPPQMIPVMGVKFHSSKLSPEQVKLFRRIEHERVDKQLDGYVRQCSKMKVKCEKLVFEKDDVVAGLVELVVLHKVTRLVIAAAADRQYSRKMDRPKCRTATEIMQRADPSCKIWFVCKGQLICTRGVEEEVAPSATPFVPDDLDHQALQLVVSHQKEDEAKSELGLYDELKEACIAAENLMKRALNESSRRQKADGEVASALQKAKEYQELYFEETRKREELEGALARAHREIARLMQAKQVFVVERNTAADELQEAMSERSSLEGHDVDEDAVLRTAGGQATEQQEEEEEHVQTQHDLGTGERDLELEARLNQSKLAAFSPSSVIQSPYDEDRVPACFLCPILQVWVLALHPPQALSTVHAWRSCLNVVEFTYMQEPMRDPHVAADGFTYEGDAIRGWLDGGNGASPVTGQPLAHRELAPNLALGAVIQDYTVMRRRQCRFCDSHDGVAALQFFPSPVGCQR

SEQ ID NO: 3058 - protein, 417 aa, Zea mays
  VARIANT 73: note = Ancestral polymorphism is G, Derived polymorphism is D
MEYGAVLAAAPLVARPNWLLLSPPPLAPSIQIQNRLYSISSFPLKAGPVRACRALASNYTYDISIIVIACLVGIYLQTSETVDLDWENLGFGIVQTDYMYIAKCGTDGNFSEGEMVPFGPIALSPSSGVLNYGQGLFEGLKAYKKTDGSILLFRPEENAERMRTGAERMCMPAPSVEQFIDAVKQTVLANKRWIPPTGKGSLYIRPLLMGSGAVLGLAPAPEYTFIIFVSPVGNYFKEGLAPINLIVEDKFHRATPGGTGGVKTIGNYASVLMAQKIAKEKGYSDVLYLDAVHKKYLEEVSSCNVFVVKDNVISTPAIKGTILPGITRKSIIDVALSKGFQVEERLVSVDELLDADEVFCTGTAVVVSPVGSITYQGKRVEYGHQGVGVVSQQLYTSLTSLQMGQTEDWMGWTVQLN

SEQ ID NO: 3059 - protein, 942 aa, Zea mays
  VARIANT 99..942: note = Derived polymorphism lacks residues 99 to 942
  VARIANT 419..942: note = Derived polymorphism lacks residues 419 to 942
MGKRGHRRSASQDDDNVGCVWGLMRMLYFRRDPKLLLDAKQLSGRHAFREVSGRGHSAKRPNDFDGIEEDGAPCLGHYYASGTSFSELAQCPINIQFLQHTHASEHFLPFLIQNIEDRTLQKPTVKNLMEDELEKLMLLKKFPNDEVQRRKADLGIDVSLDTISEHTNKSTDNSYHQAGISTPSTPSMDYGVLNYTEEYNLESVLVNFLGEIYSCHNECPHSDCKNKNELCPSLKSLIHKKVNELNNLPHNIGRGQSQEGSDAKPSDQNNLYNTMAAQSKQFKDALEILGSNSELFVKLLQKPNQHIADSIQQHENSKVSAGLEPDKIHGQTNFVGGRGSSKQHPLATKEQAKERKYMFFWRKSKSNRRQMLDATDGAQTVSKIVILKPNPERGINQKAATARTLHQQPCTSNAPGCSGRENSKFSIKEVKKRFRFVTGERSERNLSPAEDLQGDPRKIKDSVVAINKYFRHLPEGSLANKSASDIENGIKPFISSKQKNQNGSITEISGHIVAPKGASVFYEEARRHLSEMLKGNDCSINYPEVQISKSLEGILSLPHGNVSTTGSSLRGKDYLDPSPGETDVYDACEVEREECTQERSQSQEDFGSIAHCTCTTVDDQVTVREGYYTNEAQEGPRHAHDEPDTLYIEGLDKFICRENIRNEESSPAEQSRDDIRQEILEEINQGKEHVKMSLASVEGIDEKLGQQEPETPEPRASAKLISDGSPNQSDEKQERPSPVSVLESSFEDIGSPDCINKKECELHGLQRTLYFPDNEPDVNVLWEDKNVRLDYIKLVLELSELCAEQNLEVWYLEDELISPCLFEELQSQGDQTDDRMLLFDCICEALTEIQERYFRLSSWLTFLKHDIRTPPTGENLITEVDRYVNGYIIQYSLPSTLEQTIKRDLEVQTWMNIRSKTEGIIMEMWEFVLDELIDETVSDLWI

SEQ ID NO: 3060 - protein, 715 aa, Zea mays
  VARIANT 535..715: note = Derived polymorphism lacks residues 535 to 715
  VARIANT 209: note = Ancestral polymorphism is C, Derived polymorphism is Y
MEAALSFSKDSPPISIICAAKIVGLPLTINHSLAAGSAPTLQFASGESLHGVNPIILYIARGASIASLSGKNDIEFGHVVEWLEYAPTFLSGSEFENACLFVDGFLASRTFLVGHGLTIADIAVWSNLAGIGQRWESLRKSKKYQNLVRWFNSIDSEYKEALNEVVAAFVGKRGIGKSPAPSLKEKVHDSKDPSAPEVDLPGAKVGKVCVRFAPEPSGYLHIGHAKAALLNKYFAERYQGRLIVRFDDTNPSKESNEFVENLLKDIETLGIKYDAVTYTSDYFPKLMEMAESLIKQGKAYIDDTPKEQMRKERMDGIESRCRNNTVEENLSLWKEMVNGTERGMQCCVRGKLDMQDPNKSLRDPVYYRCNTDPHHRVGSKYKVYPTYDFACPFVDALEGVTHALRSSEYHDRNAQYYRILQDMGLRRVEIYEFSRLNMVYTLLSKRKLLWFVQNKKVEDWTDPRFPTVQGIVRRGLKVDALIQFILQQGASKNLNLMEWDKLWTINKKIIDPVCARHTAVLKDQRVIFTLTNGPEEPFVRILPRHKKFEGAGKKATTFANRIWLDYADAAAISKGEEVTLMDWGNAIVKEIKVESGVITELVGELHLEGSVKTTKLKITWLADIEELVPLSLVEFDYLISKKKLEEDEDFLDNLNPCTRREIPALGDANMRNIKRGEVIQLERKGYYRCDAPFIRSSKPVVLFAIPDGRQQASLS

SEQ ID NO: 3061 - protein, 645 aa, Zea mays
  VARIANT 614: note = Ancestral polymorphism is M, Derived polymorphism is T
  VARIANT 524: note = Ancestral polymorphism is T, Derived polymorphism is M
  VARIANT 502: note = Ancestral polymorphism is R, Derived polymorphism is W
  VARIANT 414..645: note = Derived polymorphism lacks residues 414 to 645
  VARIANT 410..645: note = Derived polymorphism lacks residues 410 to 645
  VARIANT 404..645: note = Derived polymorphism lacks residues 404 to 645
  VARIANT 362: note = Ancestral polymorphism is K, Derived polymorphism is M
  VARIANT 312: note = Ancestral polymorphism is P, Derived polymorphism is T
MRGMLFAGSAREGHAGTLLQLQLQHQRQGLAAGKVSGAGDLWEPTSVLDRRHSPSPSPPTSVPTLSSPLGAATAGVAALAGANAKNVSPPPVAAAAWPGGGGAEEAVAGGKEEWQLTPLDMGLGAGEGWDAADAAAPPGLAPDHTFLRWIIGGEDASAAMGSVMDPPVLELDHAPSMMSPAFGSTMPFAPAMEDAKPVPFGHTPNFLLHHCHQHHPQPHAAFFGSHPSLDAAPQPKRPHPMAGAPAPKLPSFPGPVAQAGGGFASALKPKAEAGNDEAAAAVDQLAEAARLAEAGDAFGAREILARLNYRLPAVPTAGTPLLRSAFYFKEALRVALSPTGEALAPPAVSTPYDVVLKLGAYKAFSEVSPVLQFAHLTCVQAVLDELGAAGRIHVLDLDIGMGEQWASLMQELAQRSPAATLKVTALVSPASHHPLELNLIHENLSGFARELGVFLQFAAYNVDALDPAELVAITSGDAVAVHLPVGSAHVAAMPAVLRLVKRLGAKVVVSVDRGCDRTELSFSTHLLQAFQSCVSLLDSIDAVGGADAEAVGRIERFMVQPDVERRVVSRHRAAVAVDKPPPLPWRTVLASAGFVPVQASTFAESQAEALLKRMALMGFRVEKRGGALCLYWQRGELVSVSAWRC

SEQ ID NO: 3062 - protein, 125 aa, Zea mays
  VARIANT 10: note = Ancestral polymorphism is S, Derived polymorphism is F
MAGRLTAAGFRVLGGGGARAAAAAAALRHRAGMGLPVGRHIVPDKPLPVNDELVWDNGTPFPEPCIDRLAPHIGKYEALAWLCGGLGFFAALGVAAVVNDKASKIPYTPKVYPYDSLRAELGDRP

SEQ ID NO: 3063 - protein, 79 aa, Zea mays
  VARIANT 20: note = Ancestral polymorphism is C, Derived polymorphism is G
MNRHTGIQVPRVNALKLGACASVLGGLVSLELGQQRPASSMSSSMQPCCQLLGGLADLDAAVCLCTALRDNVLGSVQLS

SEQ ID NO: 3064 - protein, 142 aa, Zea mays
  VARIANT 27..142: note = Derived polymorphism lacks residues 27 to 142
MAARLALLILATTFLLSAAADGGSTNCPSPPMTPTPTTPQPPPSDGGGGGGGNGSAGSCPIDALKLEVCANVLNLLRLNIGVPDDEQCCPLLQGLADLDAAVCLCLAIRANILGIVLNVPIDLTLLLNYCHKDRVASFTCPA

SEQ ID NO: 3065 - protein, 133 aa, Zea mays
  VARIANT 54: note = Ancestral polymorphism is D, Derived polymorphism is N
MAARAALLQLAVSLVILAAVASASATDCPPPPLPPAPKPPTPGGHHGHGSCPRNALKLGVCANVLGLVKAKVGSPPYEPCCSLLDGLVDLEAAVCLCTAVKANILGINLNLPIDLSLILNNCGKNCPNDFHCA

SEQ ID NO: 3066 - protein, 406 aa, Zea mays
  VARIANT 186: note = Ancestral polymorphism is S, Derived polymorphism is F
  VARIANT 181: note = Ancestral polymorphism is P, Derived polymorphism is S
  VARIANT 94: note = Ancestral polymorphism is S, Derived polymorphism is N
  VARIANT 83: note = Ancestral polymorphism is N, Derived polymorphism is K
MPRLAAAAAVSRRAGEALRRGAFGGLRPLSSLQPLNAASSDEVLVEGKTSARAAVLNRPGYLNALTTTMGARLNKFYQSWEDNPDIGFVMMKGSGRAFCAGGDVVRLHELISEGKLEECKDFFKTLYMFIYFLGTYLKPHVAILDGITMGGGGGVSIPGTFRVATDRTVFATPEVHIGFHPDAAASFYLSHLTGHVGEYVALTGEKLNGTDMIALGLATHYFMSGHLDLIDERLAKLVTDDPSVIDSSLAQYGDMVYPDKKSIVHRLEVIDKCFSHDTVEEIVDALESEAASSNEEWCILALKRLKEASPLALKVSLRSIREGRYQTLDECLVREYRMSMNGISKQFSHEFCEGVRARLVDKDFTPKWDPPALEYVTNDMVDAYFAPLGDSEPELKLPIESREAFV

SEQ ID NO: 3067 - protein, 455 aa, Zea mays
  VARIANT 90..455: note = Derived polymorphism lacks residues 90 to 455
  VARIANT 157: note = Ancestral polymorphism is S, Derived polymorphism is L
  VARIANT 169: note = Ancestral polymorphism is G, Derived polymorphism is R
  VARIANT 177: note = Ancestral polymorphism is A, Derived polymorphism is V
  VARIANT 211: note = Ancestral polymorphism is L, Derived polymorphism is R
  VARIANT 221: note = Ancestral polymorphism is Q, Derived polymorphism is L
  VARIANT 241: note = Ancestral polymorphism is A, Derived polymorphism is T
  VARIANT 326: note = Ancestral polymorphism is D, Derived polymorphism is V
MVNPLLIFLPFLSVAALPGNADAAGPDPCAGRRIHIRGLPPRFNTDLLRHCGANAFPLADPSAAATSVPPCESLANHGLGPRTHPRSRSWYRTDARLLEAFFHRRILERDCLADDPADADAVFLPYYAALDALPYVIDPALLDESARHGVALAEFLSRDQAHILSRRHGHDHFLVVAGSAWDYAQSPVAEPRLWGSTSLLRLPELANFTFLTLESRTWPWQEHAIPHPTSFHPSSLGHLRAWLARARRSRRATLMLFAGGASRPSRPNIRGSILSECANRTDACVVVDCSGGKCAHEPVRYMRPMLRSKFCLQPPGDTPTRRSTFDAILAGCVPVFFEDLAARRQYGWHLPPVRYDEFSVHMPKEAVVFGGVRIVETLEAVPEEEVRRMRQRVLEVAPRVVYRRHGSTPELREAVKDAVDLAVDGVLQRIRWRTRALEDGPPERIYAQEEDSVDR

SEQ ID NO: 3068 - protein, 242 aa, Zea mays
  VARIANT 171: note = Ancestral polymorphism is R, Derived polymorphism is H
  VARIANT 66..242: note = Derived polymorphism lacks residues 66 to 242
  VARIANT 24: note = Ancestral polymorphism is R, Derived polymorphism is W
  VARIANT 23..242: note = Derived polymorphism lacks residues 23 to 242
MVPNFSSYYHSYIISNAAYAHDWRLPEQDDGIRLCIGLPAPAAAHHVVDVDTNHYSSNTIVGAAFQTSSDPAATYDLGESTQRRSGTPRATASACGSAPSTAPGPPRSPTTKPPTPCAAPPRCSTSPSSAWRSRCARWDWGSAALGLGLGGGAVEDSPVLALKRRHCIRKRLRTNKSKAATADKEGCHVEAEAREQVAVTARHGQGKRKDKVTAGVLELKDLGPEYLEELLAQSDQCNEEFH

SEQ ID NO: 3069 - protein, 573 aa, Zea mays
  VARIANT 365: note = Ancestral polymorphism is W, Derived polymorphism is S
MMALNLSHQTGAAVAAAPAAPRAAVVAAAATAPRSAVVAAAATVAPPPASAPAPAPALQLQTMTVDPAPAQAPDAVKPDLAMACQALVEAAPEAEHADVAAELRSRAGVPVFVMMPLDTVRKDGNSLNRRKAVEASLAALKSAGVEGIMVDVWWGIAEADGPGQYNFNGYMELMEMAKKTGLKVQAVMSFHQCGGNVGDSVTIPLPGWVLEEMDKDQDLAYTDRSGRRNYEYVSLGCDAMPVLKGRTPIQCYADFMRAFRDHFATFMGNTIVEIQVGMGPAGELRYPSYPESDGTWSFPGIGEFQCYDRFMLSSLKAAAEAVGKPEWGNAGPGDSGSYKDWPEDTGFFRREGGWSTEYGEFFMSWYSQMLLEHGERILSAATGVFTGSPGVKISVKVAGIHWHYGTRSHAAELTAGYYNTRSHDGYAPIARMLARHGAVLNFTCVEMRDHEQPQDAQCRPEALVQQVAAAAREAGVGLAGENALPRYDDTAHDQVVATAADRAAEDRMVAFTYLRMGPDLFQPDNWRRFAAFVKRMTEPGAREACREQVEREAEGVAHATQPLVHEAAVALTN

SEQ ID NO: 3070 - protein, 404 aa, Zea mays
  VARIANT 301..404: note = Derived polymorphism lacks residues 301 to 404
MAADSTMGFHQGITASLYNHHMLWFQSNNDVGIDGGDDATGGMVMAPGSVSGGSGNAGLFLSPNTGVVGNAPGVAPSRNSSGDAFRGTGTPKYKYVTGSPSDWSDCEVGDFGLSRIKRNTQVSGGVCGTLPWMAPELLNGSSNKWRGLLRPASSLIQLQRSGFMSEREDRGEGHARRPSRSSSFGGHRGGGVGGAGKGGAGSLGQPPLSSNRRGWILIALCLCLARLVDLARVDRVLMRTLDLDCSIRKPGNGHGRHQRVVNQPDTTGYQPAPAPGLLQTPARSPPAPQNAAMHVPVSASWLQHQDPHVSSSLSASEKPANPLLPLPKATHAAPRALPKNSNTALPQGGSQGETSKGFNFQFGSINMNGLPQFPARTSSTPPNLDEQKLLFYWTARTYKNIEVP

SEQ ID NO: 3071 - protein, 380 aa, Zea mays
  VARIANT 11..380: note = Derived polymorphism lacks residues 11 to 380
MVIAGYVRKPWQQNSPFLNCVLKFICCGKIAEPIGSSLRQFDLLKATEKQTCLPECIVKLYHVVRSFVLLTGNEEFRIRQCKTIRPVPADIEKVLCRTLAKNRNGLVGGQESLMKRTELEGNDQLASHCRAQTHIERIMLWHVATSTLELNDGVAADRHPCVGGSNKRLEGKCKCNSNKELNDLEDGQSGEGTTCQNSGRTGSKEGSGSRRDLVDYRLVATMLSKYCAYLVFYKPKLLRVDSNSVRYMCKELLKEAKAADGGGEKAANGKQGPAHDSEVEDGGMVSRGRELAQVLLKSVLAHGSDDGNMLWKALAELWCELLVSMAPHGSIDAHQKELGKGGEFITHLWALLYHAGIDDKFSGSRARTPPLPLQRQPLRS

SEQ ID NO: 3072 - protein, 748 aa, Zea mays
  VARIANT 157..748: note = Derived polymorphism lacks residues 157 to 748
MEGPEQSNPCAICLGAMGADGGQAMATFTAECSHTFHFHCISASVAHGHLVCPLCNAQWRELPSVRPSQPSSMPPMLPRQPLPRMEPMHGVQPLPRMEPMHGVQPRPVPATQPARQPAEPEVFDDDDELELLSGEGDQRQAAGSGGTLAVKTHVESSAVASGSSHDNFAVLVHVKAPGVIGSEAADGDGNRDRDRDAPRAPLDLVTVLDVSGSMRGNKLALVKQAMGFVIGSLGPHDRLSVVSFSSGARRVTRLLRMSDTGKGLASEGVESLRAGGGTNIAEGLRTAAKVLGERRHRNAVSSIILLSDGQDNYSMPRLGRGSVPSNPNYEVLVPPSLVPGTGSTSEGSAPIHTFGFGNDHDAAAMHVVAEATGGTFSFIENEAVIQDAFAQCIGGLLTVVAQEARVAVACGHPGVRIRSVKSGRYESRVDEDGRSASIAVGELYADEERRFLLFLSVPTAEATGGGESERESETLLLKVRCSYIEAAGGGARVDVAADDTVVARPEHAAAADAERSAEVEQERARVEAVEDMAAARAAAERGAHQEAAEILGNRRRAMARAAGPGGGGGGGPSNAVLRAEVRRMSRRVANRESYERSGRAYVLASLSSHAQQRATTRQLSPQRGVLQPSAGSAGGGEATNSVAAAFAPAQAQVACAAAMDLDDADSMEFFGVGGGPAGGAATSNAASADVASDEAADADAAASYLTPAMRAMLLRSRQAREASGVEQQRPKGAEGAGSSGSKEVPPEQ

SEQ ID NO: 3073 - protein, 290 aa, Zea mays
  VARIANT 141: note = Ancestral polymorphism is V, Derived polymorphism is I
MASLTTVEKLILFHKLERDLFHRLVHDLAQDPVPMRWVIAFWLWLESDGHHDFIRRVSALPGPVVLRFVEEAIECLRGLACRGHGPAAGTGDGDGDGRERRCLPCTNALLTKPIDDAGYFEGQREILDGVRYQYRTVCLAVCDVDSNITACVPTNTSGGVLVAPPMVGSPVLAVPTAASFPLNPMASPWIPLKSPPPDDYRSLFITFSRGYPISRDDIVEFFNSAYGPCVETVMIEKVAPGQLPVYGRMVLRSAAMIPAVLNGRQTAKFLIKGRHLWARIYVPSSRLSYA

SEQ ID NO: 3074 - protein, 98 aa, Zea mays
  VARIANT 65..98: note = Derived polymorphism lacks residues 65 to 98
  VARIANT 48: note = Ancestral polymorphism is G, Derived polymorphism is R
  VARIANT 34: note = Ancestral polymorphism is I, Derived polymorphism is T
  VARIANT 29: note = Ancestral polymorphism is R, Derived polymorphism is K
  VARIANT 21: note = Ancestral polymorphism is P, Derived polymorphism is T
  VARIANT 18: note = Ancestral polymorphism is G, Derived polymorphism is E
  VARIANT 4: note = Ancestral polymorphism is D, Derived polymorphism is N
  VARIANT 3: note = Ancestral polymorphism is A, Derived polymorphism is V
MAADVWSYGIILFVLMAGYLPFDDANLMRLYKLICHATFSYPPWFSSGARKFIKRILDPNPDTGWKSGAVTTLGQGGSDLIATTIGKALGPREIYVYV

SEQ ID NO: 3075 - protein, 216 aa, Zea mays
  VARIANT 25: note = Ancestral polymorphism is D, Derived polymorphism is N
  VARIANT 50: note = Ancestral polymorphism is S, Derived polymorphism is F
  VARIANT 56: note = Ancestral polymorphism is G, Derived polymorphism is V
  VARIANT 61: note = Ancestral polymorphism is E, Derived polymorphism is Q
  VARIANT 76: note = Ancestral polymorphism is T, Derived polymorphism is I
  VARIANT 78: note = Ancestral polymorphism is D, Derived polymorphism is N
  VARIANT 85: note = Ancestral polymorphism is T, Derived polymorphism is R
  VARIANT 120..216: note = Derived polymorphism lacks residues 120 to 216
  VARIANT 123: note = Ancestral polymorphism is P, Derived polymorphism is L
  VARIANT 143: note = Ancestral polymorphism is S, Derived polymorphism is A
MKRHADFMVAETKKEALIVKTTIHDIMNQMIRELPITNPVYLMLGTSFGSSAKGTGLKALEFALSICDSFDMYGFTVDLGYKEWTRYFSEVRKGHTPLHGRAYYQMMECLGLVKIHSPMRGDPGRTVRWLPTKATIEAARVASEKLLKRPGAGSDDPLGTCTMIKKRRKGKAPNRSSLRDAAMKHLEDMKGATRYPLERNAGGGYLCMINDRYDRV

SEQ ID NO: 3076 - protein, 266 aa, Zea mays
  VARIANT 73: note = Ancestral polymorphism is K, Derived polymorphism is E
MAQELQETSSSSATTTTSSCTTSCCSSTVTDSSSSPPSPAAANAAPAPRKAEAETGGDEDGCAGKAAPAKKRERSSEGKHPTYRGVRMRAWGKWVSEIREPRKKSRIWLGTFPTAEMAARAHDAAALAIKGRATQLNFPVLAGVLPRAASAAPKDVQAAAMLAAAFTSPSSAPSELDAGAPAPREVPATKNGSPSEDEAGAEAPVPPAAASQPGTPSSGVDEERQLFDLPDLLLDVRDGFGRFPPMWAPFHDVLEVNAEEEPLLWE

SEQ ID NO: 3077 - protein, 283 aa, Zea mays
  VARIANT 141..283: note = Derived polymorphism lacks residues 141 to 283
MSAASSATCRVCGGAGECACRHGHGIGGARCGGVVAVADLNRGFPALWHQPEEEPSGAGAAPGLHEFQFFGHDEDHDSVTWLFTDPSPHLHRGPAAAEVGNGVAEAEQRRPPPVFDGGYAHAQYGELPGHGLTFDVPLSGRRGGEVASVAPVLEAGLGLGGGGGGDLATSSSATIMSFCGTTFTDAASAVPGDAAAAAPNGSASGAADPAVDREAKVMRYKEKRKRRRYEKQIRYASRKAYAEMRPRVKGRFAKVPDGEAPSPPAPAAACYEPGRLDLGWFRS

SEQ ID NO: 3078 - protein, 229 aa, Zea mays
  VARIANT 66: note = Ancestral polymorphism is S, Derived polymorphism is P
  VARIANT 64: note = Ancestral polymorphism is T, Derived polymorphism is P
  VARIANT 51: note = Ancestral polymorphism is Y, Derived polymorphism is C
MLKCILSQSWKRGAHMLHAGNSAPAVLTCWSQFHSGQVTQITNMNDESLTYIDCISLLLMSQVTDPVADKVLDYVSVFQVWSSSRSFFGVEDFVDEDNSRPYTYKKEKRSKNPHKHISFKQRTIAHMEPFTLDVFISKRFVSASLTHRSTCRQVAVAGTNSKDIKAALRSRSDVPACLAVGRFLAERAKEADVYTCTYTPRERDKFEGKIRAVVQSLIDNGINVKLYLD

SEQ ID NO: 3079 - protein, 96 aa, Zea mays
  VARIANT 87: note = Ancestral polymorphism is T, Derived polymorphism is I
  VARIANT 75: note = Ancestral polymorphism is T, Derived polymorphism is I
  VARIANT 70: note = Ancestral polymorphism is G, Derived polymorphism is R
  VARIANT 64: note = Ancestral polymorphism is H, Derived polymorphism is R
MAEHAYEDRYANVDLVCALCDNGGKIVRGWSTSLATNSSHGEGAFCLYLYLLCWSTGQTINGQHRHHLSGKLEVTEIFNFSQDDLLTEGMMILDTH

SEQ ID NO: 3080 - protein, 249 aa, Zea mays
  VARIANT 225: note = Ancestral polymorphism is D, Derived polymorphism is V
  VARIANT 223: note = Ancestral polymorphism is L, Derived polymorphism is R
  VARIANT 140: note = Ancestral polymorphism is Q, Derived polymorphism is R
  VARIANT 41: note = Ancestral polymorphism is V, Derived polymorphism is A
  VARIANT 20: note = Ancestral polymorphism is A, Derived polymorphism is P
MDAISSLLLQEGWRKGPWTALEDRLLTEYVQQHGEGSWNSVAKLTGLRRSGKSCRLRWVNYLRPDLKRGKITPDEETVILQLHAMLGNRWSAIARCLPGRTDNEIKNYWRTHFKKARPSRRARAQLLHQYQQQQEEERRQYLQSLQLLQQEQQQQQLLLQQQSQQLVVKQQQLEQQSPPEPDHQAVMAMLDSQQSTAECYCSPVPVVPEQCCALPADDDDAMLWDSLWRLVDGDGRGCGDGDDSSGVAY

SEQ ID NO: 3081 - protein, 366 aa, Zea mays
  VARIANT 3: note = Ancestral polymorphism is R, Derived polymorphism is L
  VARIANT 108: note = Ancestral polymorphism is T, Derived polymorphism is M
  VARIANT 175: note = Ancestral polymorphism is P, Derived polymorphism is L
  VARIANT 220: note = Ancestral polymorphism is G, Derived polymorphism is A
  VARIANT 351..366: note = Derived polymorphism lacks residues 351 to 366
MSRAPRIVSVLFLLLGPLPVSLVHVTADGPVTATVHRQDGTAWRSFKQLLDARRGSHVEGLGELKRYLARFGYMPGAGAEHEPTTDAFDAHMEAAVRRYQSMLSLPVTGQLDSTTLDRIMAPRCGVGDGGHAVPVSLSGSAAASPDGAVSRFTFFKGEPRWTQPDPLVLTYAISPTATVDYLPAGTVRAVFRRAFARWARVIPVGFVETEDYEAADIRVGFYVGSHGDGIPFDGPLGVLGHAFSPKNGRLHLDAAERWAVDMDTETVHSAVDLESVATHEIGHVLGLGHSSSPKAVMYPSLSPREKKAELTVDDIEGVQWLYGSNPGFSLSSLYQQDSSMASGGSSWLPASARLVCAVLVMLVTHL

SEQ ID NO: 3082 - protein, 137 aa, Zea mays
  VARIANT 35: note = Ancestral polymorphism is S, Derived polymorphism is I
  VARIANT 44..137: note = Derived polymorphism lacks residues 44 to 137
  VARIANT 53: note = Ancestral polymorphism is V, Derived polymorphism is D
  VARIANT 110..137: note = Derived polymorphism lacks residues 110 to 137
MAMLMASMSDIETTKRGSMWELDQNLDQPKDKDVSQLKDMNIFQILTASSILVMKSAYRSVMFYIGQKELEMQYKMNRIVGQCRKKSELMQAKFTEKLEEVHTAYQKMAKRCQLLEQENENLNRDKHELQEKFAETI

SEQ ID NO: 3083 - protein, 144 aa, Zea mays
  VARIANT 16: note = Ancestral polymorphism is G, Derived polymorphism is R
  VARIANT 41: note = Ancestral polymorphism is R, Derived polymorphism is C
  VARIANT 98..144: note = Derived polymorphism lacks residues 98 to 144
MLVTPCISSIISKKLGPFEQVPVEYVHCYNEVVLLFAVRRRIRGLRLPLWAQGGQGPTKSPLAKESFSSGDLPPPFRLRPSTVSPSKRRIRGYSVGRRGKELRALCWRSRRLRVYGGSIGVHVNGWRVLEQLGVVVELRETCQP

SEQ ID NO: 3084 - protein, 228 aa, Zea mays
  VARIANT 217: note = Ancestral polymorphism is K, Derived polymorphism is N
  VARIANT 115..228: note = Derived polymorphism lacks residues 115 to 228
  VARIANT 19: note = Ancestral polymorphism is R, Derived polymorphism is C
MSKRNLFWVVSQMQAIVERYPCWGDTVEVNTWVSANGKNGMRRDWHIRDSMTGHTTLKATSKWVMMNKLTRKLARIPDEVHTDIEPYFVGRSAIVDEDNSKLPKLPEGQSTCAAKYVRTGLTLTFGEQNTKKQAHGILAYSLDQGVSILDTVEIVIPTNKENRETTDLYIRSVGIDGCLEEDDGKYFPPPAATEEGEINVRYNLVFGSFDVVGVECKKSHASWIVLDK

SEQ ID NO: 3085 - protein, 142 aa, Zea mays
  VARIANT 57: note = Ancestral polymorphism is G, Derived polymorphism is R
  VARIANT 65: note = Ancestral polymorphism is R, Derived polymorphism is H
MQHQQAAGEPTRQQELLSQLVFNNMCSFQEARNGPHIDNRGDTVEVNTWVSANGKNGMRRDWHIRDSMTGHTTLKATSKWVMMNKLTRKLARIPDEVQTDIEPYFVGRSAIVDEDNSKLPKLPEGQSTCAAKYVRTGLTVSN

SEQ ID NO: 3086 - protein, 267 aa, Zea mays
  VARIANT 25: note = Ancestral polymorphism is S, Derived polymorphism is L
MASSSFSKVLALGALIFSLLVTYGSCARPANFTASDFTADPNWEAARATWYGAPTGAGPDDDGGACGFKNVNLPPFSAMTSCGNQPLFKDGKGCGSCYQIRCQNHPACSGNPETVIITDMNYYPVAKYHFDLSGTAFGAMAKPGRNDELRHAGIIDIQFKRVPCNYPGQKVTFHVEEGSNAVYLAVLVEFEDGDGDVVRVDLMEANSGYWTPMRESWGSIWRLDANHRLQAPFSLRITNESGRTLVANRVIPANWAPNTYYRSIIQY

SEQ ID NO: 3087 - protein, 268 aa, Zea mays
  VARIANT 159..268: note = Derived polymorphism lacks residues 159 to 268
MATTLSSTVVVALGAPLFLLLVTCGSCARPVSFNASDLTADPGWDAARATWYGAPTGAGPDDDGGACGFKNVNLPPFSAMTSCGNEPLFKDGKGCGSCYQIRCQNHPACSGNPETVIITDMNYYPVAKYHFDLSGTAFGAMAKPGRNDELRHAGIIDIQFKRVPCNYPGQKVTFHVEEGSNPVYFAVLVEFEDGDGDAVQVDLMEANSASWTPMRESWGSIWRLDSGHRLTAPFSLRITNESGKTLVADHVIPANWVPNTYYRSIVQY

SEQ ID NO: 3088 - protein, 273 aa, Zea mays
  VARIANT 128: note = Ancestral polymorphism is Y, Derived polymorphism is S
MAALAAALVALLAVLAVAHPVAVAQSVANRTSAVRQLRGSSSEGGWLAAKATWYGAPNGAGPDDNGGACGFKNTNRYPFMSMTSCGNQPLFQDGQGCGACYQVRCTAKNNPACSGEVRTVMITDKNYYPVAKYHFDLSGTAFGSMARPGLNDRLRHAGIIDIQFRRVACNHPGLTLNFHVEAGSNPNYLAVLVEYANKAGTVAQMDAMESSSGHWMPMRRSWGSVWRLDSARPLKGPFSMRVRSESGGTLVANNIIPANWRPNTDYRSNVQFT

SEQ ID NO: 3089 - protein, 1426 aa, Zea mays
  VARIANT 1018: note = Ancestral polymorphism is L, Derived polymorphism is V
MGGVRAASPSGAGSGAVAGAGSDHGAPRLAMACVLASEAATVLAVMRRNVRWAGVRYGGGDGGAGDDEHLDHPLVAGLKVLRRRAAAWGQGSWAGVEPLLYLRPFLDIVCSDETGAPITGAALSSLHKILTLDVVGPGAPGAAGAMAAVVDAVTACRFEVTDPASEEAVLARVLQVLLACVRSRAAPALANRHVCTIVNTCFRVVQQAGTKGELLQRVSRQTMQEVIRTVFARLPDINVTLLSDEQVAGCKNPCLGAEETENGKSDYVCLNSSGDEVGDGSGVMQDKDLMEPFGVPCMVEILQFLCSLLNIAEDIELNPRMSPIDFDEDVPLFALGLINSAIEFSASSIHRHQKLLAFVQDELFRNLMHFGLSMSPLILSTVCSIVFTLFYHLRHELKLQIEAFFSCVILRLAQSRYGASYQQQEVALEALIDFCWQKEFMAEMYANMDCDLQCSNIFEELANLLSKSAFPVNSPLSALNVLALDGLVAVIQAMAQRTDNAPQHHDQTVPEISEYFPFWQLKCESSNDPDQWVKFVHQQKSIKTKLMIGVEHFNRDKKKGFEYLQAVHLLPEKLDPHNVALFFRYTPGLDKNLLGDYLGNHDEFSIQVLHEFARTFDFKDMNLDAALRLFLETFRLPGESQKIQRILEAFSERYYEQSPQMFVNRDAALVLSYSVIMLNTDQHNVRVKKKMTEEDFIRNNRRINGGNDLPREFLSELYYSICRNEIRTIPEQGAGCSEMSFSRWVDLMWRSKRTSLYIACDSYPFLDHDMFSLMAGPTVAAVSVVFDNVEHEEVLTGCIDGFLSVAKLAAFYHLDDVLNDLVVALSKFTTLLNTSYIDDPVIAFGEDTKARMATEAVFTIATAYGDHIRSGWRNIIDCILRLHKIGLLPGRLTGDTTDDQESSSDSLPGKHTSSAPQVLPISTPRKTYGLMGRFSQLLYLDADEPRSRPTEEQLAAQRNASETVKKCQIGIIFTESKFLQADSLSNLARALIQAAGRPQKITSSLDDEGVAALCLELLITVTLNNRDRIVLLWQDVFEHITHIVQCTVMPCNLVEKAVFGLLHICQRLLPYKANLVDDLLRSLQLILKLDARVADAYCENITLEVTRLVKANATHIKSQMGWRTIISLLCITARHPDASDAGFEALVFIMSEGVHLSPANFILSVEASRQFAESRLGSAERSIHALNLMADSVNCLVRWSQEVREAGGEADRILEGIAEMWLRLVQALRKVCMDQREEVRNHALLSLHRCLVVDGISVKSSTWLMAFDIIFQLLDELLEIAQSYSPKDFRNMEVSLLHAVKLLCKVFLQSLKDLSGQHSFDKLWLEVLDMIEKFMKVKLRGRRTEKLQEAIPELVKNILMMMKASGILSKTGASENSFWEATWLQVNKIAPSLQLEIFPDNEDGSTTQVEENKLDTQVQSDQNNDR

SEQ ID NO: 3090 - protein, 276 aa, Zea mays
  VARIANT 45: note = Ancestral polymorphism is S, Derived polymorphism is F
MATALSFKALALAALLSMVVASGARAEQQFKRNATTASQDRSLLSYSSGWLPAKATWYGAPTGAGPLDNGGACGFKGTNQYPFSSMTSCGNEPIFKDGKGCGSCYQIRCLKSNHPACSGVAQTVIITDMNYYPVAKYHFDLSGTAFGSMASWGLNDKLRHAGIIDMQFRRVPCNFPGLTITFRVQHGSNPMYLAVLIEHENKDGDVVQADIMQSNSGHWEPMHESWGSIWRIDPNRPLRGPFSMRITNESGRQLVAKNVIPANYIPDVDYRSFVQY

SEQ ID NO: 3091 - protein, 622 aa, Zea mays
  VARIANT 247..622: note = Derived polymorphism lacks residues 247 to 622
  VARIANT 98: note = Ancestral polymorphism is H, Derived polymorphism is L
MAPFSFSSNFRSTISRLASSRRARVGVHLNIRQTAATMPQPTADSSTMVAGEHQQQQQPATARISSSSTSSGRLVTPFWKEKYERDARRYWDIFYRRHEDKFFKDRHYLDKEWGKYFKGRDGEKKVVLEVGCGAGNTIYPLLSTYPDIFVHACDFSPRAVNLVKKHKDFKADRINAFVCDIASEQLTENVEPSSADIVTMIFMLSAVAPDKMPIVLENVRSVLKHGGRVLFRDYAFGDLAQVEFLMRLFGNNKRISLLERLMSKGQQISENFYVRGDGTRAYYFSNEYLVDLFSKCGLTLEEICVHNKQVENRSLELVMNRNWIQATFTLNSASPQGPNGQHDLLAYEGEDDKVVTDTSKKKSSGEEIDLSEDFCNMFGTSHSLDEVQIIGVKAKGHDFKIRMLRKEYQHTCRSTGLMLWESAQFMCCLLAENPSIVASKRVLELGCGSAGICSMVAASFTPFVLATDGDEESLDLLRQNISSNMEPNLLSRIMVRKLFWGNEDDMKAVRELHGNGVGFDCIIGTDVTYNPDAILPLFKTARGVISEKANEDSVPALILCYIQRRVDEDSILSNATSQGFRLVDKWINGVHESNGTISSWFSGNDVCSAFRHTVLSVLYFEL

SEQ ID NO: 3092 - protein, 235 aa, Zea mays
  VARIANT 18..235: note = Derived polymorphism lacks residues 18 to 235
  VARIANT 181: note = Ancestral polymorphism is G, Derived polymorphism is V
  VARIANT 185: note = Ancestral polymorphism is S, Derived polymorphism is F
  VARIANT 195: note = Ancestral polymorphism is A, Derived polymorphism is V
  VARIANT 196: note = Ancestral polymorphism is A, Derived polymorphism is V
  VARIANT 209: note = Ancestral polymorphism is R, Derived polymorphism is G
  VARIANT 215: note = Ancestral polymorphism is L, Derived polymorphism is R
  VARIANT 217: note = Ancestral polymorphism is R, Derived polymorphism is W
MTTAAAVEPAPLVRARACAASASFPPPRRRRAAGAIRASPVPGRTEAAAELPAPLQPNARRRGRDPLWHGGGFSLGVDLGDARTGLAIGRGITFPRPLTVLRLRGQKLELALLDVARQQEADELIIGLPVSADGSETPQSNKVRSVVGRLAVQAAQRGLRVYLQDEYGTSTDALDYMISRGVKKSARDTKSDAYAAVMILKRYFTSSGRGAKIVLPRQPELQDKLMVQSRQDAEV

SEQ ID NO: 3093 - protein, 508 aa, Zea mays
  VARIANT 134: note = Ancestral polymorphism is I, Derived polymorphism is T
  VARIANT 117: note = Ancestral polymorphism is T, Derived polymorphism is I
  VARIANT 115: note = Ancestral polymorphism is L, Derived polymorphism is Q
  VARIANT 68: note = Ancestral polymorphism is V, Derived polymorphism is I
MAGLPPVARRRPLATASSLLLLLLLLVVTAAAREERGLARVQGPPPRHRHAYAAMMYMGTPRDYEFYVAVRVMMRSLPRVRADADRVLIASADVPRDWVRAMNFECKMRNETRHLLTIQGDVCRTEEDGMRVLIVENLRNPYESNLGGTNKRFKLTLNKLYAWTLVDYERVVMIDSDNIFLQNTDELFQCGQFCAVFINPCYFHTGLFVLQPSIDVFRSMLHDLETGRENSDGADQGFLVGCYPDLLDKPMFHPPENGTKLNGTYRLPLGYQMDASYYYLKLHWHVPCGPNSVITFPSAPWFKPWYWWSWPVLPLGLSWHKQRWDDLGYAAEMPVILMELLMYIVIIAVTRLARPGITKLCYNRRPEKQSALVQWLIKLAAIAAMVAAYSIPFFVVPRTVHPIMGWSVYLFGALALSVLVINVFLLPPLDVLTTWLAIVGMLIVMAFPWYHDGVVRALAVFGYAFCSAPILWASMVRMMDSLQTMLERDSFFPRIGEPAQETEFSKLY

SEQ ID NO: 3094 - protein, 479 aa, Zea mays
  VARIANT 64: note = Ancestral polymorphism is D, Derived polymorphism is E
  VARIANT 48: note = Ancestral polymorphism is G, Derived polymorphism is D
MMHWSRPVDRRSHFPVLRAVTPPIPDQSPNYFPLRIPMPRTVAVVGAGAAGLVAARQLLREGLDVAVFEKSGRAGGTWAYDPRADADPLSRDPGSPSAVHGSLYASLRTNLTRDLMGFSDFPMAGWVFAGDARAFPGHQEVLAFLDAFAEECGVAARVRLRSEVLRVAGAPLGQRGRPSASGSGGRSRGAARTARWRRRCSTPSWSATATVRCPGCPAFENVVVVGFSTSGIDIASEISRLAKEVHVADRYSRDRLGKMALYQNVWIHAEVDCIQDDGKVRFAEGSVVDADVILYCTGYRYHFPFLDLDGLTVDDNRVGPLYKHVFPPKYAPNLSFVGLPVKYYNCESKTLCVPSQTIVFQELEQEAKWVAAVLSGRATLPSEEDMMASVRSHYQLMEEAGRPKRHTHALAAQWAEHMNWLADQVGEPPVEPWKCEVFDKVLASILALDEAYRDRWEQEEDGGSSGHQEGIRIRASSIM

SEQ ID NO: 3095 - protein, 793 aa, Zea mays
  VARIANT 2: note = Ancestral polymorphism is D, Derived polymorphism is Y
MDVPRVVLVCHSLFWLLLPAVVLGATAEETMQTYIVQLHPHHDGGSGEATLPASNSKVDWHLSFLERSVAWEQEKRPASRLLYSYHTVFDGFAAQLSDGEAAALRALPGVASVRADRRVELHTTYSYRFLGLGFCPTGAWARSGYGRGTIIGVLDTGVWPESPSFDDRGMPPAPVRWSGACQGGEHFNASNCNRKLIGARFYSKGHRANYPTNPSEAAALLEYVSPRDAHGHGTHTASTAAGAAVAGASVLGAGLGEARGVAPGAHVAAYKVCWFNGCYSSDILAGMDDAVRDGVDVLSLSLGGFPIPLFEDSIAIGSFRATARGVSVVCAAGNNGPARSSVANEAPWVLTVGAATMDRRFPAYVRLGDGRVLYGESMSMYPGETGLKKGGKDLELELVYAVGGTRESEYCLKGSLDKAAVAGKMVVCDRGITGRADKGEAVKEAGGAAMVLTNSEINRQEDSVDVHVLPATLIGYREAVELKKYISSTPRPVARIVFGGTRIGRARAPAVAVFSARGPSLTNPSVLKPDVVAPGVNIIAAWPGNLGPSGLESDARRSNFTVLSGTSMAAPHVSGIAALIRSAHPSWSPAMVRSAIMTTADIIDRQGKAIMDGGGGGGRASVFAMGAGHVSPARAVDPGLVYDIQPADYVTHLCTLGYSHMEIFKITHTGVNCSAALHEDRNRGFFSLNYPSIAVALRNGARSAVLRRTVTNVGAPNSTYAVQVSAPPGVKVTVAPMTLSFVEFGEQRSFQVTVDAPSPPAAKDSAEGYLVWKQSGGQGRHVVRSPIAVTWVE

SEQ ID NO: 3096 - protein, 97 aa, Zea mays
  VARIANT 84: note = Ancestral polymorphism is G, Derived polymorphism is V
  VARIANT 55: note = Ancestral polymorphism is E, Derived polymorphism is K
  VARIANT 25..97: note = Derived polymorphism lacks residues 25 to 97
  VARIANT 4: note = Ancestral polymorphism is G, Derived polymorphism is D
MATGQLFSKTTQALFYNYKQLPIQQMLDLDFLCVLKLSTVHTQQLMYLSTLHPSEEMLSRREKATNFKPDYDIDIHMKVLAMSVQESGILTGYKMKC

SEQ ID NO: 3097 - protein, 193 aa, Zea mays
  VARIANT 24: note = Ancestral polymorphism is L, Derived polymorphism is P
MENGNDYAIEGDVYFSVDSFPEYLLLSGRKLDQNRVGERIIQESTLYDCEEMLSKYREEGISVPVPAEEQNLVNRHHKAFLDSMSDDLKTTEVLDGEDGFTDLLKAINSNLNDLKKLQQKLKQQQQTQKQPEDYVQGLIALETEIKDKLSLLGLEVLKPPWPRYSAHLGDYAKSRSPGDPVGVRSRAAETETH

SEQ ID NO: 3098 - protein, 150 aa, Zea mays
  VARIANT 3: note = Ancestral polymorphism is A, Derived polymorphism is T
  VARIANT 8: note = Ancestral polymorphism is A, Derived polymorphism is T
MDAERMNTLEQMFKRLTLADDTSLKPMLAHIPPLHPHFASMFWSIYTACNFYPKTVFEFFACDAYLEKCTITMFICLGDEAFVDSVKISGAQTPILFQLVAQFGKEKTVLCTEVDRGFTFYALRLITVSLQKYLACILCHFVSFGTKVGK

SEQ ID NO: 3099 - protein, 47 aa, Zea mays
  VARIANT 37: note = Ancestral polymorphism is Y, Derived polymorphism is H
  VARIANT 35: note = Ancestral polymorphism is P, Derived polymorphism is S
  VARIANT 4: note = Ancestral polymorphism is S, Derived polymorphism is L
MGSSGSNRFESDGWGETQATSPMDQLVAQLLLQKPSHRKTAPPHRVT

SEQ ID NO: 3100 - protein, 588 aa, Zea mays
  VARIANT 179..588: note = Derived polymorphism lacks residues 179 to 588
MADVQPESGPDGKALMDAWDYKGRPASRATTGGWACAAMTLGVELFERMTTLGIAVNLVPYMTGTMHLGNAAAANTVTNFIGASFMLCLLGGFVADTYLGRYLTIAIFTAVQATGVVILTISTAAPGLRPPACGAASPNCVRANKTQLGVLYLGLYLTALGTGGLKSSVSGFGSDQFDEAHDVERNKMLRFFNWFYFFVSIGALLAVTVLVYVQDNAGRRWGYGVCAAGILCGLAVFLLGTRKYRFRKLVGSPLTQVAAVTVAAWSKRALPLPSDPDMLYDVDDVAAAGSDAKGKQKLPHSKECRLLDHAAIVGGGESPATASKWALCTRTDVEEVKQVVRMLPIWATTIMFWTIHAQMTTFSVAQAEVMNRAIGGSGYLIPAGSLTVFLIGSILLTVPAYDRLVAPVAHRLTGNPHGLTPLQRVFVGLLLSVAGMAVAALIERHRQTTSELGVTITVFLLMPQFVLVGAGEAFTYMGQLAFFLRECPKGMKTMSTGLFLSTCAFGFFFSTLLVTIVHKVTGHGGRGGWLADNIDDGRLDYFYWLLAVISAINLVLFTFAARGYVYKEKRLADAGIELADEECVAAGH

SEQ ID NO: 3101 - protein, 241 aa, Zea mays
  VARIANT 196: note = Ancestral polymorphism is R, Derived polymorphism is W
MAMLREHLDLIRAHLLDDNHDAVSSDDSAPSPSPSPPGRRPLPALSVSLPPRPAVVLQQQHLRAAAAPLQIPQQEQHCCPEPEEDDFRRYRGVRQRPWGKYAAEIRDPARKGARVWLGTYDTAVEAARAYDRAAFRLRGSKAILNFPNEVALSTAAWWATPAPPPQPSATVAGNKRARSPQEQDARCMVREVKKERIQEPASGGADYFWEDESLKGAICSLPPLSPLSPHPHLAVPQLYVS

SEQ ID NO: 3102 - protein, 1041 aa, Zea mays
  VARIANT 350: note = Ancestral polymorphism is H, Derived polymorphism is Y
MAIPVEEAIAALSTFSLEDEQPDVQGLAVLLSSERYATNSPIEYSDVAAYRLSLGEDTKAINQLNTLIKEGKEMTSLLYTYRSCVKALPQLPDSMKHNQADLYLETYQVLDMEMSHLREIQRWQASAASKLAADMQRFSRPERLVNGPTITHFWSMLKLLDVLLQLDHLKNAKASIPNDFSWYKRTFTQVSTQWQDTDTMREELDDLQIFLSTRWAILLNLHAEMFRTNTVEDILQVLIVFCVESLELDFALLFPERHTLLRVLPVLVVLATSSEKESESLYKRVKINRLLNVFKNDPVIPAFPDLHLSPAAILKELSSYFQNFSSQTRLLALQAPHEIQGRELQEYPRHYLILNHMGTIRADHDDFSIRFASAMDQMIRLKSSDGVYNDWSRDIKGNMYDIVVEGFQLLSRWTGRIWEQCAWKFSRPISDSQQNSMTCFDYEKVVRYNYTAEERRALLELIGYIKSIGLMMQHCDTLVSEALWETIHMEVQDFVQDKLDTMLRTTFRKKKDLSRILSDMRTLSADWMASTSKADPEQHSLHQETEEMRQNTFYPRPVAPTAAQIHCLQFLICELVSGGNLRKVGGLFGNSGSGIPVEDLKQLETFFYKLSFFLHILDYTATIGTLTDLGFLWFREFYLESSRVIQFPIECSLPWMLVGHVIESEDAGLLESILIPFDLYNDSAQHALTSLKQRFLYDEIEAEADLCFDLLAQKLNEIIFTYYKSCAASTLLDSSFTYACDDGDKYFVKPLRFDAIFKLRRVMVLGRTIDLRSIITQRMNKIFRENIDFLLERFENGDLCGVVELQQLLDILELTHQSISRFLELDSYSLMLSEMQENLSLVSYSSRISSQIWSEMQTDFLPNFILCNTTQRFVRSAKGTHHSSHRSSASTGKPYFYCGSHDLTMAYQGLAGLYRDFFGVPHMFAVVKLLGSRSLPAIIRALLDHISSKITGLLPKINALQEALPKSIGLLSFDGGIAEYGLAAISSFGCQKIVHEILTWEAKSEVKTEVLHDLKEIGSALYWMSILDIVLRGLVDLKELS

SEQ ID NO: 3103 - protein, 306 aa, Zea mays
  VARIANT 104: note = Ancestral polymorphism is A, Derived polymorphism is V
MASVQVEANHGHGAAGSPPWKLYHNPHYTPRGRGTHLSSSCCSPSPCQVRRSPEPPPMIIALDDEEVDQGYGYGAMSSELELCVARIRDLRAELEFERRMRRKAEALSEALAAELADERRRSEAAEAECRALREEAGAARAEAERALEGVEEERRMLRVAELWREERVQMKLADARAALDEKLREIDDAVAQLQATADANKSSCCSSPNGSKSASQHGGQQSPQHGKPHRREPGGGGENPHIRRGIKGFVEFPRAARLRLRPRPREERVDLVSNLECQRAQLRVLMRHRSPAAGMGLIGAAENLVV

SEQ ID NO: 3104 - protein, 655 aa, Zea mays
  VARIANT 92..655: note = Derived polymorphism lacks residues 92 to 655
MQRSRTQHAEHHPGGTATHTPFRTQELEAPLDPGSDPEYRDFQFRFIPEVFELQMGGGVRNGDGKVTAEKVLGFEFDKVRISIASSDDEVDGEAPPRSSFSGASHPPEPVDEIDTVFVAVDGREKPVQKPIISWDASPPPSGAASPHSSIDSSGAAATTVTITSLAPSCTVTSRSAKTSVSSSAASDGSGWSNGTGTGAGGSAGKPHKGGDPRWKAILAARARDGPLAMGSFRLLRRLGCGDIGTVYLSELSGGGAGNGGAARPCWFAMKVMDKASLESRRKLSRAQTEREILQLLDHPFLPTLYAHFETDRFACLVMEFCPGGDLHALRQRQPGKHFPEHAARFYAAEVLLALEYLHMLGVVYRDLKPENVLVREDGHIMISDFDLSLRCAVSPTLVRSSLNSDSRNAQAACIQPTCFMPKLFGQRSKKSSSAKKSKSKGGEPRQQQAPTGLPELVVEPTGARSMSFVGTHEYLAPEIIKGEGHGSAVDWWTFGIFLHELMYGKTPFKGQTNRATLFNVVGQQLRFPDCPGTSNASRDLIRGLLAKEPQSRLGVKRGAAEIKQHPFFEGVNWALIRCSTPPGVPRAVEPVALAPPAPAKPAPVERAEINSSSNSKRMEINSSSNSKRMEINSSSKRMAGTGSESGGKFLDFEFF

SEQ ID NO: 3105 - protein, 332 aa, Zea mays
  VARIANT 27: note = Ancestral polymorphism is S, Derived polymorphism is F
  VARIANT 72: note = Ancestral polymorphism is G, Derived polymorphism is S
  VARIANT 168..332: note = Derived polymorphism lacks residues 168 to 332
MAPPRRYLAALLALLCACTTTMPPAGSVVAAANVPITTCRSFCGNITVDYPFALHPGCGHAGLRDLLFCINGALMLHLPSGSYRVVDVDYAYRGLTLHDPAMSDCRALDLAPAGRGNGFVLEPWREPYLSPDPDNVFLLLGCRATSPLFQGFPDRHLPCRNVSGMGCGDYLGCLAWDDYYAGGGGRRGPSSGDAAGQPPECCALPWGAIRAVNVSRLECEGYSSAYSLAPVRAEGAAAGWAYGIRVSWTLPESNRGFCGACRATGGACGHDTESHADLCLCGDWNSTSNCDSSADAARSVAATLPAVAALRWAILASGLTSLWYYASTTSNM

SEQ ID NO: 3106 - protein, 103 aa, Zea mays
  VARIANT 79: note = Ancestral polymorphism is S, Derived polymorphism is G
  VARIANT 53: note = Ancestral polymorphism is E, Derived polymorphism is D
  VARIANT 35: note = Ancestral polymorphism is G, Derived polymorphism is D
MAGVIICRSFLLSNFLNTARYRITNRQQVFDLIIGKYNETCHNIVTKYISEWDAMVTRTRRWIDFKNDYKTMDLNFMESVWWVFAKLWEKDLIYKGVKVASLT

SEQ ID NO: 3107 - protein, 523 aa, Zea mays
  VARIANT 238: note = Ancestral polymorphism is Y, Derived polymorphism is H
MSAAVTAPPCHSRPSPLNPSSRATPSPSSNGGKPNAVSTTRRHLANLDRLLVKPPPLPLPAQPRKQPTGVPVPGDGEASPDNRSGHGGLLNALNLSTFLPFTRKAAVDELSPRSLAYMQRLLTLSPRLSPKGSIAGEWRRYHGEGGWEGLLDPLDQNLRRELLRYGDFVQAAYTAFHSMPAAAEASSSSGQQRTLVLPDRTYHPTRSLFASSSLSIPPWAQRRSAPNWLTQRTSFVGYVAVCDNEQEVRRMGRRDVAIVLRGTATCPEWAENLRASLVPLTADDDASAPKVAKGFLSLYKTPGDHAPSLSAAIVEEVKRLMEVYKGEELSITIVGHSLGASLALLAADELSTCLAADTDGTTDHRPPPIAVVSFGGPKTGNRAFAERLQRERGVNVLRVVNAGDVVTRVPAPIAREGYVHAGGAELRLHSSDSPCLRPDAGPACCHDLEAYLHLLDGFAGSGRPFRPDASRSVARLLTYQRPNVKLAYVERARMLGFEQASPRTATANGAAADGQYGYLASPT

SEQ ID NO: 3108 - protein, 282 aa, Zea mays
  VARIANT 22: note = Ancestral polymorphism is A, Derived polymorphism is V
MSSFFPFPSAPLAVLLIVTLHASAIHAQIPASATTGAAVAATNPQPGGSGTGGGVVGAGGPDAPLELYMHDILGGSSPTARPITGLLGNIYNGQVPFARPIGFSAPRNGVAIPNANGQVPTYNGNTGIPLDTGLSGAGFLQPGTGNGGGAAAAAPAQVQLGPDGLSLGFGTITVIDDVLTSGPDLGAQPLGRAQGVYVASSADGSSQMMAFTAMMEGGEYGDTINFFGVYKVGTPLCRLSITGGTGKFKGACGFAEVRPLIASGQHVTDGAETLLRITVHLA

SEQ ID NO: 3109 - protein, 187 aa, Zea mays
  VARIANT 57: note = Ancestral polymorphism is P, Derived polymorphism is L
  VARIANT 56: note = Ancestral polymorphism is R, Derived polymorphism is S
  VARIANT 39: note = Ancestral polymorphism is K, Derived polymorphism is N
  VARIANT 13..187: note = Ancestral polymorphism lacks residues 13 to 187
MQTSEQVACNFMCAGEGKDALNKTNSKNKMMGVDQDMEKIIISNDCSKVEEKKRKRPANTSTEKETAPITSLVKEKKLRMTESVEFKMRHDKQNRINVLLDISDENMGTSSGSNYKIRKKKLPHTLFKGKKMWCNDSDKIHGGRMNEMKIFSGIKERNNQTPIAFLKFVCSNAEKFLVIPPNVAPRL

SEQ ID NO: 3110 - protein, 500 aa, Zea mays
  VARIANT 40: note = Ancestral polymorphism is D, Derived polymorphism is G
  VARIANT 45: note = Ancestral polymorphism is A, Derived polymorphism is T
  VARIANT 78: note = Ancestral polymorphism is T, Derived polymorphism is I
  VARIANT 80: note = Ancestral polymorphism is K, Derived polymorphism is N
  VARIANT 93: note = Ancestral polymorphism is R, Derived polymorphism is S
  VARIANT 109..500: note = Derived polymorphism lacks residues 109 to 500
  VARIANT 227: note = Ancestral polymorphism is P, Derived polymorphism is L
  VARIANT 266: note = Ancestral polymorphism is N, Derived polymorphism is D
  VARIANT 280: note = Ancestral polymorphism is T, Derived polymorphism is I
  VARIANT 285..500: note = Derived polymorphism lacks residues 285 to 500
  VARIANT 289: note = Ancestral polymorphism is P, Derived polymorphism is L
  VARIANT 380: note = Ancestral polymorphism is A, Derived polymorphism is S
  VARIANT 385: note = Ancestral polymorphism is R, Derived polymorphism is H
  VARIANT 400: note = Ancestral polymorphism is M, Derived polymorphism is I
  VARIANT 439: note = Ancestral polymorphism is T, Derived polymorphism is I
  VARIANT 444: note = Ancestral polymorphism is A, Derived polymorphism is V
  VARIANT 453: note = Ancestral polymorphism is R, Derived polymorphism is H
  VARIANT 457: note = Ancestral polymorphism is S, Derived polymorphism is F
MADGAFCVTKAMQHELAQNWGIRTPDEDFSILLEAVLMYDRRVSAALGEDDSTDEEQLWIDIKNGKQFVYPRLLFIVTGKGPDRKKYEDQIKRLKLRRVALRTMWLASEDYPLLLDWFTSCLCARAGTDAESEEFPLPNHKREECYTSSPLEDRAKWPYSEGPHIRRTSNTTRCLNLGSYNYLGFAAADEYCTPRVIESLKKYSASTCSVRVDGGTTKFHNELEELPARFVGKPAAILFGMGYVTNSAIIPCLIGKGGLIISDSLNHNSIVNGARGSGATVRVFQHNSPAHLEEVLREQIAGGQPRTHRPWKRIIVIVEGIYSMEGELCKLPEIIVVSKKYKAYTYLDEAHSIGAVGQSGRGVCELLGVDLADVDIMMGAQKLARIRENSNFFRSELKKMGFEVLGDNDSPVMPIMLYNPAKIPAFSRECLRQKVVVVTVAFPATPLLLARARICISASHTREDLIKALDVISRVGDLVGIKYFPAEPPKIAGADHDKLE

SEQ ID NO: 3111 - protein, 260 aa, Zea mays
  VARIANT 26: note = Ancestral polymorphism is N, Derived polymorphism is D
  VARIANT 40: note = Ancestral polymorphism is T, Derived polymorphism is I
  VARIANT 45..260: note = Derived polymorphism lacks residues 45 to 260
  VARIANT 49: note = Ancestral polymorphism is P, Derived polymorphism is L
  VARIANT 140: note = Ancestral polymorphism is A, Derived polymorphism is S
  VARIANT 145: note = Ancestral polymorphism is R, Derived polymorphism is H
  VARIANT 160: note = Ancestral polymorphism is M, Derived polymorphism is I
  VARIANT 199: note = Ancestral polymorphism is T, Derived polymorphism is I
  VARIANT 204: note = Ancestral polymorphism is A, Derived polymorphism is V
  VARIANT 213: note = Ancestral polymorphism is R, Derived polymorphism is H
  VARIANT 217: note = Ancestral polymorphism is S, Derived polymorphism is F
MGYVTNSAIIPCLIGKGGLIISDSLNHNSIVNGARGSGATVRVFQHNSPAHLEEVLREQIAGGQPRTHRPWKRIIVIVEGIYSMEGELCKLPEIIVVSKKYKAYTYLDEAHSIGAVGQSGRGVCELLGVDLADVDIMMGAQKLARIRENSNFFRSELKKMGFEVLGDNDSPVMPIMLYNPAKIPAFSRECLRQKVVVVTVAFPATPLLLARARICISASHTREDLIKALDVISRVGDLVGIKYFPAEPPKIAGADHDKLE

SEQ ID NO: 3112 - protein, 259 aa, Zea mays
  VARIANT 59: note = Ancestral polymorphism is G, Derived polymorphism is R
MPPLLTSPASLPSASPLLVSCIGALHRPGPFLHQRAAASVHFLAPHRKTRPPPAMSWLGKLGLSGLGGSPRASEASAALAQGPDEDQPAPGNEFAQFGAGCFWGVELAFQRVPGVTRTEVGYSQGNIHDPTYEDVCTGTTNHNEVVRVQYDPAACKYDDLLDTFWARHDPTTPNRQGNDVGTQYRSGIYYYNPEQEKAARESLEKQQKLLNRKIVTEIVPAKRFYRAEEYHQQYLEKGGRFGFGQSAAKGCNDPIRCYG

SEQ ID NO: 3113 - protein, 144 aa, Zea mays
  VARIANT 88: note = Ancestral polymorphism is E, Derived polymorphism is K
  VARIANT 87..144: note = Derived polymorphism lacks residues 87 to 144
MASGSGSVCASTGASPASHGTPVGTSQSQSAPKPPLPIVMKETSTDPTKVVVGGGSALVIHVDKNVDEPLEPAAKKIREKKATSEVWEHFTKSIVEKREIMATLRRKYGQNARSARSKLVEENLADDEDNGKDSDIDDYMEMDI

SEQ ID NO: 3114 - protein, 149 aa, Zea mays
  VARIANT 33: note = Ancestral polymorphism is K, Derived polymorphism is N
MESTFIMIKPDGVQRGLIGEIISRFEKKGFYLKALKLVNVERSFAEKHYADLASKPFFQGLVDYIISGPVVAMVWEGKSVVTTGRKIIGATNPLASEPGTIRGDFAVDIGRNVIHGSDSIESANKEIALWFPEGPADWQSSQHPWIYEK

SEQ ID NO: 3115 - protein, 226 aa, Zea mays
  VARIANT 70: note = Ancestral polymorphism is R, Derived polymorphism is L
  VARIANT 90: note = Ancestral polymorphism is L, Derived polymorphism is V
  VARIANT 129: note = Ancestral polymorphism is A, Derived polymorphism is V
  VARIANT 130: note = Ancestral polymorphism is R, Derived polymorphism is L
MTTGEGAEAAAVPRVVSILSALLQRVAERNDAAAAAPPPAAAAGPPVLSAFQGLTKPAISIGGYLERIFRFAGCSPSCYVVAYIYLDRFLRRRPALAVDSFNVHRLLITSVLTAVKFVDDICYNNAYFARVGGISLVEMNYLEVDFLFGIAFDLNVTPAAFASYCAVLQSEMAYLDDAPAPVVEAPPRLHYCYGAAGTSDRHDDPAAVAAAAAACHRHSSQPQLTV

SEQ ID NO: 3116 - protein, 448 aa, Zea mays
  VARIANT 140: note = Ancestral polymorphism is A, Derived polymorphism is V
MAESSAAAEVGSPASLPPLVAEEADAAAMEEAAAVAKRWPGWPGDSVFRLVVPVLKVGSIIGRKGELIKRLVEETKARVRILEGPVGATERIVLVSGKEDPDLELPPAMDALMRVFKRVTGITDGAAEGTQAAATPDVCAARLLVPGAQAINLIGKQGATIKAIQESTSATIRVISVDEHERPFYVTDDERIVEIQGDTEKVLKALQAVSNHLRKFLVDHSVLPLFEKTNTTVSQDRNGDGWSDMSRPSIGSAQVNQLPSVLDDYILQVKRDPLYLERESLVDHNIHRSGVSLYGRDPALSTLRPSAVHGAGSLLTQITQTMQIPLTYAEDIIGVKGANIAYIRANSGAVVTIQESLGSPDDITVEIKGTSSQVQAAQQLIQDSLAAHREPVRSSYVGAGLDSVYRSSYSQYGSSIYPSSSLPSYSSIDDVSRYPSSGLGGYGSSYRY

SEQ ID NO: 3117 - protein, 333 aa, Zea mays
  VARIANT 268..333: note = Derived polymorphism lacks residues 268 to 333
  VARIANT 211: note = Ancestral polymorphism is R, Derived polymorphism is W
  VARIANT 39: note = Ancestral polymorphism is G, Derived polymorphism is D
MEERYEALKELGAGNFGVARLVRDKRTKELVAVKYIERGKKIDENVQREIINHQSLRHPNIVRFKEVCLTPTHLAIVMEYAAGGELFEKICSAGRFSEDESRYFFQQLISGVSYCHSMEICHRDLKLENTLLDGSPTPRVKICDFGYSKSALLHSKPKSTVGTPAYIAPEVLSRKEYDGKVADVWSCGVTLYVMLVGSYPFEDPEDPRNFRKTISRILGVQYSIPDYVRVSSDCRRLLSQIFVADPSKRITIPEIKHHPWFLKNLPREISEREKANYKDADAAEPAQAVDEIMRIVEEAKTPGDMSKVVDPALLAEMAELESDEEEADADDTY

SEQ ID NO: 3118 - protein, 399 aa, Zea mays
  VARIANT 246: note = Ancestral polymorphism is S, Derived polymorphism is L
  VARIANT 254..399: note = Derived polymorphism lacks residues 254 to 399
MMMLIDCSRCRTPLQLPHGAPCIRCAICGAITHVAPAPPVEPNRGAVQPPPGWGPPPPPVHGRKRAVVCGISYRHSRYELKGCINDVKCMRHLLMTRFNFPDDSIIMLNEEQTDPYKIPTKHNIGMAMYWLVQGCQPGDSLVFHYSGHGAQQRNYNGDEVDGFDETLCPLDFETQGMIVDDDINTALVRPLPRGVKLHAFIDACHSGTALDLPYLCRMNRSGQYVWEDHRPPSGVWKGTSGGEAISFSGCDDDQTSADTSVSSRSTLQFTAAVSMFYSLNYEVSLFRGLLADHLFMQFFCFVYYLFDQALSKVTSTGAMTFGFIQAIERGQGTTYGSILNSMRSTIRNTDDSAGVGGGAVTSLITMLLTGGSLSAGGLRQEPQLTACEPFDVYAKPFSL

SEQ ID NO: 3119 - protein, 551 aa, Zea mays
  VARIANT 182: note = Ancestral polymorphism is P, Derived polymorphism is L
MALTLRSSTSFLSPVDPTSKLLHKPADEAQPCCVAVPPAPGRRPRALRAAAAAATSPATGRAPAEAGELLHGGGADQHHGLPRGGVPVYVMLPLDTVGPGGQLSRQRALAASLMALRGAGVEGVMVDVWWGVVEREGPGRYDWEAYAELVRMVERAGLRLQAVMSFHQCGGNVGDTCNIPLPPWVLEEMSSNPDIVYTDRSGRRNPEYISLGCDTLPVLKGRTPIQVYTDYMRSFRERFRDYLGNVIAEIQVGMGPCGELRYPSYPEANGTWRFPGIGEFQCYDKYMRASLEAAAVAAGHQEWGRGGPHDAGEYKQMPDDTGFFRREGTWSTEYGHFFLAWYSGMLLEHGDRVLAAAEAVFGGTGATLSAKVAGIHWHYRTRSHAAELTAGYYNTRDRDGYAPIARMLAKRGAVLNFTCMEMKDEQQPKHASCSPELLVQQVKTAASAAGVELAGENALERYDEAAFSQVASTARGAGLAAFTYLRMNKTLFDGDNWRQFVSFVRAMADGGARPALPRCDTGHSDLYVGFLDAAKKSKAPEAEGAATAAAL

SEQ ID NO: 3120 - protein, 97 aa, Zea mays
  VARIANT 34: note = Ancestral polymorphism is R, Derived polymorphism is C
  VARIANT 50: note = Ancestral polymorphism is R, Derived polymorphism is H
MIPTDPYEELDVARKITSMAIASRVSRLEDDAARLRRDLADRDRAEANLRACLDDSDARLAAALDENAKLAKERDSLAATVKKLTRNLAKVRPLLAF

SEQ ID NO: 3121 - protein, 484 aa, Zea mays
  VARIANT 331..484: note = Derived polymorphism lacks residues 331 to 484
MEKAAANALPPLRFLAVLAVTAWTFFLYFHFSVLSGSTVEVSHGDDGGADPCRGRYIYMHDLPPRFNADIIRNCRKTEDHWGDMCGALSNAGLGRPLADRTDGVLRSEAGWYATHQFALDAIFHNRMKQYECLTNRSAAAAAVFVPFYAGFDFVRYHWGYDNAARDAASVDLARWLMARPEWRRMGGRDHFLVAGRTGWDFRRSNNVDPDWGNDLLVMPAGRNMSVLVLESAMLHGGDYPVPYPTYFHPRSDADVARWQDRVRGQRRTWLMAFVGAPRPDVPINIRVRDHVIAQCTASSACTMLGCARATGSTQCHTPGNIMRLFKKTTFCLQPPGDTCTRRSAFDSMVAGCIPVFFHPGSAYKQYRWHLPRDDHLRYSVYIPDADVRERNVSIEAVLRAIPPAAVQRMREEVVRLIPRVLYADPRSKLETVKDAVDVAVEGVLDTVARIRNGEYVDSGGPVTEDPPNLFASTESRFRPAQADR

SEQ ID NO: 3122 - protein, 503 aa, Zea mays
  VARIANT 269: note = Ancestral polymorphism is A, Derived polymorphism is S
MERTGAHSGKRWLPGLLVLAATSWLFVIYFHLAVFRGPPIVSAPRGPLAEDASGGGGGGGDGQRFLLLHHEERLRKVKAPPATRGDALRTARDDDCQGRYVYIHDLPPRFNADILANCRHWYPWMDMCVYLENGGLGRPVDNADGVFADEGWYATDHFGLDVIFHSRMRQYECLTGDSSRAAAVFVPFYAGFDVVQHLWGVNSTAREKDALALDLADWLTRRPEWRAMGGRDHFFLSGRTAYDHQRQTDSDSEWGNKLLRLPAVQNMTALFVEKLPWTSYDFAVPYPTYFHPASDAQVAEWQRRMRATRRDWLFSFAGGARGDPYSIRHQLIGQCASSSFCRLVRCGKNQRNCLVPSTFMRVFQGTRFCLQPTGDTMTRRSAFDAIMAGCVPVFFHPDSAHTQYRWHLPDAHDTYSVLIPEAHVRAGNVSIEETLRAIPQDVAERMTETVIGLIPRLVYADPRSKLETLRDAVDVTVEAVIGRVNKLREEMGRGQGHLLQMQT

SEQ ID NO: 3123 - protein, 237 aa, Zea mays
  VARIANT 69: note = Ancestral polymorphism is P, Derived polymorphism is L
  VARIANT 78: note = Ancestral polymorphism is D, Derived polymorphism is N
  VARIANT 87: note = Ancestral polymorphism is A, Derived polymorphism is T
  VARIANT 97: note = Ancestral polymorphism is A, Derived polymorphism is T
  VARIANT 98: note = Ancestral polymorphism is A, Derived polymorphism is S
  VARIANT 100: note = Ancestral polymorphism is A, Derived polymorphism is G
  VARIANT 205..237: note = Derived polymorphism lacks residues 205 to 237
MLHPTTHLRRLTSKSSRSTTTTTGRHSLSYPSVSSSTSDDESPLAAELFPTAGAPTLLSVARSLAVASPAPSAAAVLNFLRRLPHDASPHVFPHLIAALARSPLPILALRLFLSPPTSAATTHHCFNSSLLRFSLPQHLLPAFFAHSLRRFSGLTPTLLSFNLLLKCICSSDKFTYSTIVSALADAGRVDDALALVHEMVVDGILAAEAFNPVLKAMLRTGEVDRALKVWETMVAAK

SEQ ID NO: 3124 - protein, 321 aa, Zea mays
  VARIANT 1: note = Ancestral polymorphism is M, Derived polymorphism is T
  VARIANT 27: note = Ancestral polymorphism is R, Derived polymorphism is L
  VARIANT 48: note = Ancestral polymorphism is D, Derived polymorphism is Y
  VARIANT 72: note = Ancestral polymorphism is P, Derived polymorphism is L
  VARIANT 82: note = Ancestral polymorphism is L, Derived polymorphism is I
  VARIANT 95: note = Ancestral polymorphism is A, Derived polymorphism is V
  VARIANT 111: note = Ancestral polymorphism is L, Derived polymorphism is P
  VARIANT 114: note = Ancestral polymorphism is A, Derived polymorphism is V
  VARIANT 151: note = Ancestral polymorphism is T, Derived polymorphism is N
  VARIANT 186: note = Ancestral polymorphism is A, Derived polymorphism is V
  VARIANT 189: note = Ancestral polymorphism is A, Derived polymorphism is D
  VARIANT 190: note = Ancestral polymorphism is E, Derived polymorphism is K
MGAQIDNSVNDGHGPPLFKICGHVHHRIGSLLPPDGSSPKFIQLYIYDTANEIQNRMNSLGNDDRNDGGLDLVVVNGLIKMIDDHNPFAKKFRMVRDRLADKESEDFIIRLIGVKEGDPVQYNLPTTDQLAMFIVGDFSLDTFKRDIIIETETKELKRISSLHPAYMALQYPLLFPFGERGFQGNVIYAEIPGNLAEQKATNIEKGGVYDINRFRVCATKTVFKIVDGDKMIQFTFHTIVKRATSPPTTFPLYVYRLTSFYQIEPHVQTTNIFVDVLGVITEIHELTHVHVRSQLTPTVTRTIIIKDLTYYTTILIVPYFM

SEQ ID NO: 3125 - protein, 325 aa, Zea mays
  VARIANT 20..325: note = Derived polymorphism lacks residues 20 to 325
  VARIANT 196: note = Ancestral polymorphism is D, Derived polymorphism is A
MPSINSRIIRWELGSSWLQQLQKKNSPASVNVKRNATKADKESAVKGLGKHFEQLKKIKKKECNIDGSSSEKEECNSNCSSMNGMQVSDKIFVVETNKGADVSKLMSEDAFFRLKSLGAGLHEKSLEELTKMAHNFYDETALPKLLSCPDLFFNYPIKTLVMVHDVELRDRLVKIVTDYQTETSLRNGGNDILKADCVHLLVKYYHEARRGVYMVSMDEEVHGNRADDGSSRGHERSSSVQALDIKYRTRCGARCCLCFDPLPIQDISVIVFYCCHAYHLSCLEGGLDSMRSNSGQDSDGGMDDEDGSPSGQSRMRCVLYTTAAS

SEQ ID NO: 3126 - protein, 134 aa, Zea mays
  VARIANT 34: note = Ancestral polymorphism is G, Derived polymorphism is R
MAPSLLAAMSTSPFLASSGSSRRPLGAAHTRRAGLRVAALKYDPAKVAPQNDRVLVRLEQIPEKSAGGVLLPKSAVKFERYLMGEILSIGAEVSEVEAGKKVLFSDINAYEVELGTDEEKHCFCRESDLLAVVE

SEQ ID NO: 3127 - protein, 332 aa, Zea mays
  VARIANT 60..332: note = Derived polymorphism lacks residues 60 to 332
  VARIANT 76: note = Ancestral polymorphism is G, Derived polymorphism is R
  VARIANT 93..332: note = Derived polymorphism lacks residues 93 to 332
  VARIANT 105..332: note = Derived polymorphism lacks residues 105 to 332
  VARIANT 109..332: note = Derived polymorphism lacks residues 109 to 332
  VARIANT 168..332: note = Derived polymorphism lacks residues 168 to 332
  VARIANT 214: note = Ancestral polymorphism is R, Derived polymorphism is C
  VARIANT 228..332: note = Derived polymorphism lacks residues 228 to 332
  VARIANT 238..332: note = Derived polymorphism lacks residues 238 to 332
MPDLARLSQHSKSYLSAANGGIADGVRPILGGHWEAVAASAASVAVLLLLPLFMLTALAYLAIYFATLAFIAAATGLEPLRFVHAASPAAYAWTQAAPSLGFMAYLVLQMVDLVTVFSGTASSEDDGNRDVAKALELAQMVVGLAADVHYYVAVFHRTAAGATPRANWRVYAMYAACFAIVCACARREEQESYLAIYFATLALTTAATWLEPLRFVHAASPAAYAWTQAAQSLSFMAYLVLHMVDLVAVFSGTASPEDDDNGDIAKALGLAQMVMVDLVTVFSSTASPEDDGNGDAAKALGLTQVVVGLAAGVHYYTAVFHRTAAGVAPRAN

SEQ ID NO: 3128 - protein, 361 aa, Zea mays
  VARIANT 1: note = Ancestral polymorphism is M, Derived polymorphism is I
  VARIANT 159: note = Ancestral polymorphism is D, Derived polymorphism is G
MHCAVLCWSSITKYSSSSGGGRIIATTTDRPIGRPEMQPACSAALLAAFLVVLACSAVSCRGQLADNFYAGKCGNFSVEAIIHDAVKARLAWDKRMVAGLLHLQFHDCFVAGCDASILLDGPNTEKTAVENSGIFGYDFIDDVKTALERACPGVVSCADIIIAATRDAVGMCGGPSYQVQLGRRDGMVSQASMASILPGPGVDIPTAINLFARKGLNSFEMVSLMGAHTVGVTHCSVIHDRLFNFNGTGLPDPAMDPVYVWILSTFACPKGQAFDNIVYLDDPSSILLVDKSYYSQIMKRHGVLSVDQALGDHSATAWMVRFLATTDFFPSMFSYALNKLAALDVLTGTAGEIRSNCRRTN

SEQ ID NO: 3129 - protein, 432 aa, Zea mays
  VARIANT 7: note = Ancestral polymorphism is G, Derived polymorphism is E
MEHFRRGVEFGMASFQRCHPLSCQMAESAPVDAQKADNTRCKEKSRHSKRCHCHLEEMPVIPEQAMEFLSRTWSPSSTDLFQILSPSSLGSSLEDPEQDEARGDGGDDDDKEKHLGTVRLNGGTNQLFNQTCRLVAGGRPNCGQRRHKLVQPAWLRVGNMKAMLRGFLLDSVPVTGSRRRRRRDELRLHSAQAHAAVSVAQLAAAVAGIVSACDLRPAASAGAGGDRRLGTVLASAAALVATVCAEAAETTGANRGRVTSAVRTGLESRTSADLLTLTATAATCLRGAAALKQRTADLRGISTSSSDAMAMSVSAGIHKGTTLAVCLPCGRVRVRTVSVFPRRGDGGAAVLRLGKKRLRGAFATFNDYVVTAVGDGGGEAVVEGRPVFPVSVVTSEGSTVQLLFEHQTHCKVWKAAIEGMLAEQKLRRGTTN

SEQ ID NO: 3130 - protein, 468 aa, Zea mays
  VARIANT 332: note = Ancestral polymorphism is E, Derived polymorphism is V
  VARIANT 322: note = Ancestral polymorphism is E, Derived polymorphism is Q
  VARIANT 285: note = Ancestral polymorphism is G, Derived polymorphism is R
  VARIANT 284: note = Ancestral polymorphism is A, Derived polymorphism is V
  VARIANT 216: note = Ancestral polymorphism is E, Derived polymorphism is K
  VARIANT 24..468: note = Derived polymorphism lacks residues 24 to 468
MHSGMKTECFSSDSISNLFSFKWQSNQKLQGLREEMNAIVPYLEEMRKKKVERWDQFVDVIEQIKKVASEIRPADFVPFRIPMDQSDLSLRKLEELTKELQSLQKEKSDRLKQVMEHLNTLHSLCEVLGVDFKQIVNELQDLASSMLELWNLMDTPLEEQQMFQNVTCNIAASEHEITEPNTLSIDFLSYVESEVLRLEQHKASKMKDLVLKKKTELEEHRRRAHLIGEEGYAAKFSDEAIEAGKDHILLDDTIIKTIETAPNNELKKAKEIIQRIRRRELYKAGKKLLLITNSDFHYTNKMMNHAFSRFLPNDVGWRDLFEMVIVSTRKPEFFQLSHPLYEVVTDDGLMHPCFKAVELMLVDALIEANDYLGISLHAHDPEDFWKLDDTIIKTIETAPNNELKKAKEIIQRIRRRELNKKSSEVLLKEEDVAVSNVKIDLTRGKDNPLERFLIFEWYLVLLLICLKH

SEQ ID NO: 3131 - protein, 304 aa, Zea mays
  VARIANT 186: note = Ancestral polymorphism is A, Derived polymorphism is G
  VARIANT 113..304: note = Derived polymorphism lacks residues 113 to 304
MPSASLARRLLSTISSPAIPSRSTSTSASNSNSCGFSTRRARKKRSCVSWTVSAATPADMATNSGSALAKLAPLEAILFDIDGTLCDSDPIHFCAFRELLQQAGFNGGVPITEEFYSANISGGHNDDLARSLFPGMDHQKAMRFMDDKEAMFRKLAPGQLKPVDGLQELCGWMEGRDLKRAAVTNAPRANAELMLSLLGLTDFFPVLVIGSECDRAKPFPDPYLKALQLIGASPQHTFIFEDSASGVRAGVAAGVPVVGLTTRNPGKVLKDAGASLLVKDFQDPELMSVLQQVEVEPAAANAQG

SEQ ID NO: 3132 - protein, 233 aa, Zea mays
  VARIANT 65..233: note = Derived polymorphism lacks residues 65 to 233
MATLARWHLQPPTARPLAHRRRIPRRAATVVSPRAFSRADFDGFVRRAWQGANAGAERFAFEARQAAQRLDSRFSISRRLADASRAARARAVEIDAEFGIGRRWRSFSVDFSRNWPRYRRDINDFMGTPIGRALATIFFLWLALSGWLFRIFIFGTFVLPFAAPLLLGTFANRVAIEGTCPACKRRFVGYRNQVIRCMSCQNIVWQPNNSPSGGARSSRSSEPDVIDVEYEEK

SEQ ID NO: 3133 - protein, 103 aa, Zea mays
  VARIANT 73: note = Ancestral polymorphism is R, Derived polymorphism is W
  VARIANT 67: note = Ancestral polymorphism is G, Derived polymorphism is R
  VARIANT 26: note = Ancestral polymorphism is V, Derived polymorphism is M
MATLPVAFSPVSSRRAHPPRGQVLRVCSSGSMAHPFLQALDAPLLLRLERPLEEGVAAVEAAVTVARQQLDARVAALVRMLFAKGRAGMLAEALAEFATICML

SEQ ID NO: 3134 - protein, 969 aa, Zea mays
  VARIANT 714..969: note = Derived polymorphism lacks residues 714 to 969
MAEGVVGILILKLGSALFLEACRLGTKQLYHEASALGRLFGEIRDIKEELESMQSFLQGAERFKDTDNNTANFIKKIRGLAFDIEDVIDEFIYKMEDKHGSFATKMNRRINRIWTWRRLTSKLQKIKLKLENVDKRNVRYDMRGIAREDGSSDAHHRSTDQISYFPKEENLVGIDENKELLMNWLRGDLHQQSVITTVWGMGGVGKTTLVAHVYNTVKVDFDSAAWITVSKAYQVEDLLKQIIRGFQKSDLKGELRVDIIDMEKRSLVEIIRDYLHGKSYVLVLDDVWGVDIWFKIRDAFPTNSTSRFIITSRIHEVALLANGNCIIELKPLEAHHSWELFCKEAFWKNENKMCLLELNNLAQRFVDKCNGLPIAIACVGRLLSCRSPTYSDWESFFKELELQMTNNVILNVNVLLKVSLEDLPYILKNCFLHCTIFPEDHLIKRKRLIRHWVAEGFIRETEHKTMEEVAEGYLYELVNRSLLQVVERNESGRVQSCRMHDIIRLLALTKANEEGFCKVYDGMGSYSAEKTRRLSIHSANIKLSTQPTKLTVRSIYVFSNGLTIESLRSFLKHFYLLSTLDLQGAQIVELPDEVFNLFNLRFLSLRNTEVTNIPSTVGRLQKLEVLDVYNAKLLALPESVSKLRKLRYLHVATVPKINTKGVVTWIGIQVPKSIKYLTGLQTLRLVEASSETLFHLGALTQLRTFAITNVQRDQCADLCTVIMSMKHLVSLAIMAISEEEILQLEELCLPPTLSKLELGGQLDKKAMPQIVSSFSDLGNLTLLALAFSKLDEDSFSCLLTLHGLRGLWVDKAYEGKRLHFNAMSFPNLRQLAISDAPQLNSVVIERSALQSLVQLTLVDCPELKALPDGIEHLRTLEKLYLRGASKELTKLFQCNEETHETCLHLVVSMMTAMMSCRPQYVLRERRNNLRGHARMRRVVAPPMGVFVACLGIGRIVSRKEEATHDTIKD

SEQ ID NO: 3135 - protein, 119 aa, Zea mays
  VARIANT 17: note = Ancestral polymorphism is A, Derived polymorphism is T
  VARIANT 29: note = Ancestral polymorphism is A, Derived polymorphism is V
  VARIANT 33: note = Ancestral polymorphism is V, Derived polymorphism is A
  VARIANT 35: note = Ancestral polymorphism is D, Derived polymorphism is N
  VARIANT 41: note = Ancestral polymorphism is F, Derived polymorphism is C
  VARIANT 59: note = Ancestral polymorphism is S, Derived polymorphism is I
  VARIANT 78: note = Ancestral polymorphism is R, Derived polymorphism is G
  VARIANT 82: note = Ancestral polymorphism is A, Derived polymorphism is V
MPNNGGSLANMWGRASAKPKPPSTTNSTAVESVADLMLLICSTTLDAQICAKEEADGDSSDDEQGIKYKRESTNANNRKRRAVFDFSDDEEVDNIISIASPEVPKQHTPDPIIETAEDT

SEQ ID NO: 3136 - protein, 210 aa, Zea mays
  VARIANT 1: note = Ancestral polymorphism is M, Derived polymorphism is L
MQNSPTPLDSGTTAPAEEPTGRRSGMGAMAAARGQKALVALPQLVKSLRSDPVSGSARLRHLPSLRRTFSLYDQINLIDSVPEDELRFQSYDDTGFKINNIKYEGSLLIVENKIMTWAPKTFSEITAESMQLEFGAVSLLPFVCHCVDEILILGCGRHIQPVSPELRKFIRSTGMKLEAVDSRNAASTYNILNEEGRPVAAAVLPYGVAC

SEQ ID NO: 3137 - protein, 415 aa, Zea mays
  VARIANT 323: note = Ancestral polymorphism is D, Derived polymorphism is Y
MQSAAAAAPSSLPLSVFPKDSRPLPCLLLTSLLLLLTLHFLSSSPTPSPPPPQPRLAPLPSTASAGPAPSALAFLLTGSAGDADRLQRLLLATYHPRNVYLLLLDRAASAADRARLARSARAAPGRDNVHVVGDPGFANPRGASALAATLHGAALLLRVDQGWDWFVHLDADEYPLVTPDDLLHVFSYLPKDLNFIQHTSYIGWKEERQIRPIIVDPGLYLSSRNDIFYATQKRDIPNAYKLFTGSSSVILSRKFIEYCIVGMDNLPRTLLMYYTNMPLPHRKYFQTVLCNSAEFNKTVVNHDLHYSTWDARSKNEPRLLTIDDVENMTESGAAFGTRFPKDDHALDRIDEEILHRHPGELVTGGWCIGVGHDSPCDISGNPDVLRPGPKAIKLAKFLSERLSYRNFYSQQCIWD

SEQ ID NO: 3138 - protein, 361 aa, Zea mays
  VARIANT 299: note = Ancestral polymorphism is S, Derived polymorphism is L
  VARIANT 122: note = Ancestral polymorphism is S, Derived polymorphism is L
  VARIANT 92: note = Ancestral polymorphism is P, Derived polymorphism is L
  VARIANT 2: note = Ancestral polymorphism is S, Derived polymorphism is Y
MSVAAALGRADELRALDDTLAGVRGLVASGAKQVPRIFRVPYPEELLHHEQPPAAATVPVIDLSGDRAAVIDAVRGAAAGWGFFQVTGHAVPEQVMSAAVAAMRAFHEADGGEGSDKARLYSREPGRAVKYHCNFDLYQSPVANWRDTVYLRMAPDPPAADDLPEICRDALFEYAKQVKDLGQRLFGLLSESLGLKPSYLTDIECDQGQIILGHYYPPCPQPELAIGTSRHSDSGFLTILLQDKVGGLQILHDGQWVDVAPTPGAFIVNIGDLLQLVSNDKFSSVEHRVVAKNAEPRVSIACFFSTHFHPASTRTYGPIKELLSEENPPLYRETLVREYVARYYSVGLDGKQKTALADFRL

SEQ ID NO: 3139 - protein, 255 aa, Zea mays
  VARIANT 30: note = Ancestral polymorphism is N, Derived polymorphism is S
  VARIANT 27..255: note = Derived polymorphism lacks residues 27 to 255
  VARIANT 23: note = Ancestral polymorphism is R, Derived polymorphism is G
MKILVAVKRVVDYAVKVRVRPDGRGVETANVKMSMNPFCEIAVEEALRLREAGVAAEVVAATVGPAQSADTLRTALAMGADRAVHVLHDPDPARPLLPLAVAKILRAVALQEKPGLVILGKQAIDDDCNQTGQMLAGLLKWPQGTFASKVTLDTEKQKATVEREVDGGIETICLDLPAVITTDLRLNQPRYATLPNIMKAKSKVIKKVAAEDLGVDIRSDMEVIEVNEPPKRKAGVILSCVDELLDKLKNEARVL

SEQ ID NO: 3140 - protein, 176 aa, Zea mays
  VARIANT 158: note = Ancestral polymorphism is E, Derived polymorphism is K
MSSSSSDLVLYNLVPAPQTLNPPPPHVTAAPDLSISTAVAAAPEPVIRGRVRRTVGSSSADRHAKVAGRGRRVRIPAMVAARVFQLTRELGHRTDGETIEWLLRQAEPSIIAATGTGVTTEEAPSSLVPVSSIASSVSLTPVPYYTALLMQPPPTANESPVASASVSGTVAEENNN

SEQ ID NO: 3141 - protein, 441 aa, Zea mays
  VARIANT 338..441: note = Derived polymorphism lacks residues 338 to 441
  VARIANT 320..441: note = Derived polymorphism lacks residues 320 to 441
  VARIANT 250: note = Ancestral polymorphism is L, Derived polymorphism is F
  VARIANT 210: note = Ancestral polymorphism is L, Derived polymorphism is P
  VARIANT 203: note = Ancestral polymorphism is P, Derived polymorphism is L
  VARIANT 201..441: note = Derived polymorphism lacks residues 201 to 441
  VARIANT 100: note = Ancestral polymorphism is L, Derived polymorphism is P
  VARIANT 60: note = Ancestral polymorphism is R, Derived polymorphism is L
MGSTSATGTTSSSSSAAHGGGAAHVLLLPYPGAQGHTNPLLQFGRCLAYHGLRPTLVTSRYVLSTTPPPGEPFRVAAISDGFDDGGAAACPDLDVYWRQLEAVGSETLAELIRSEAADGRPVRVLVYDPHLPWARRVAQAAGLAAAAFLSQPCAVDVVYGEVWAGRLPLPVVDGKELFARGLLGVELGPDDVPPFAAKPDWCPVFLRASLRQFEGLEDADDVLVNSFHEIEPKTYGFNLFNSSESCLAWLDKQLPCSVVLVSYGTVSDYDETQLEELGNGLYNSGKPFIWVVRSNEEHKLSDELRDKCKERGLIVSWCPQLEVLAHKATGCFFTHCGWNSTLEAIVNGVPMVAIPHWADQPTISKYMESMWGLGVRVRKDEKGLVTRDEVERCIKDVMDGDSKDKYRKSATMWMQKAKSAMQNGGSSDKNITEFVAKYSLS

SEQ ID NO: 3142 - protein, 352 aa, Zea mays
  VARIANT 66: note = Ancestral polymorphism is K, Derived polymorphism is N
MATHYSSAFVLLSVVAWACALSGSLAARDLADQDQAMVARHEEWMAKYDRVYSDAAEKARRFEVFKANMALIESVNAGNHKFWLEANRFADLTDDEFRATWTGYRPKTAAASSKGRSRTATTGFKYANVSLDDVPASVDWRTKGAVTPIKNQGECGCCWAFSAVASMEGVVKLSTGKLVSLSEQELVDCDVNGMDQGCEGGEMDDAFDFIVGNGGLTTESRYPYTASDGTCNSNEASGDAASIKGYEDVPANDEASLRKAVANQPVSVAVDGGDSHFRFYKGGVLSGACGTELDHGIAAVGYGVASDGTKYWVMKNSWGTSWGEAGYIRMERDIADEEGLCGLAMQPSYPTA

SEQ ID NO: 3143 - protein, 230 aa, Zea mays
  VARIANT 17: note = Ancestral polymorphism is P, Derived polymorphism is S
  VARIANT 18..230: note = Derived polymorphism lacks residues 18 to 230
MDADLAHARRLPAPPCPCPGPDLADYDAVYGRLPPLLFGCLTMETPFLQVLELLSVWHGHMVTLSVPHTFIWHFYAIQYRFLVDGVWRCDETKPFVRDEYGLISNEVLVENNVQPVVQPEPSIIGTNMDKGTILKTMPPEPSSQNPSMQIAVIRHVVSGILLHNTIYDVVPLSSKLTVLDTQLPVKQAFKIMHDEVCMLLCLLELLQIVHFPSMVLVCSHFNFALFLLSF

SEQ ID NO: 3144 - protein, 104 aa, Zea mays
  VARIANT 1: note = Ancestral polymorphism is M, Derived polymorphism is L
  VARIANT 4: note = Ancestral polymorphism is S, Derived polymorphism is G
MAGGQVAMTIVLVLLVVVVAAVLPSAPELASTGSTEVAGERRPPSLVPFRPRQHGGRRQPLFHGPAAGGCMPRGFRVPPSAPSRYVNYHTLDAGACAHGRAGKP

SEQ ID NO: 3145 - protein, 36 aa, Zea mays
  VARIANT 2: note = Ancestral polymorphism is L, Derived polymorphism is I
  VARIANT 18: note = Ancestral polymorphism is P, Derived polymorphism is L
  VARIANT 19: note = Ancestral polymorphism is T, Derived polymorphism is M
MLLLSGYPMLKLVKFLLLTSKERDHIGWLWSRTRML

SEQ ID NO: 3146 - protein, 257 aa, Zea mays
  VARIANT 217: note = Ancestral polymorphism is Y, Derived polymorphism is H
  VARIANT 171: note = Ancestral polymorphism is G, Derived polymorphism is W
  VARIANT 133..257: note = Derived polymorphism lacks residues 133 to 257
  VARIANT 51: note = Ancestral polymorphism is T, Derived polymorphism is R
MSAPLVDAEYMAEIERARRDLRALVASKNCAPIMLRLAWHDAGTYDAKTNTGGPNGSIRFPQEYSHSSNAGIKIAIDLLEPVKQKHPKITYADLYQLAGVVAVEVTGGPTVDFVPGRKDSSICPEEGRLPDARRGASHLRQVFYRMGLSDRDIVALSGGHTLGRAHRERTGFDGPWTRDPLKFDNSYFLELLKGDSEGLLKLPTDKVLVEDPEFRQHVQLYAKDEDAFFRDYAESHKKLSELGFTPPSLLSLIQICE

SEQ ID NO: 3147 - protein, 436 aa, Zea mays
  VARIANT 324: note = Ancestral polymorphism is A, Derived polymorphism is V
  VARIANT 144: note = Ancestral polymorphism is G, Derived polymorphism is S
  VARIANT 8: note = Ancestral polymorphism is N, Derived polymorphism is D
MLFPKRINYVAPMLASAAILLLLLSGYFELPSISTPAPLLAGAARFPTALDSVGSRDRDPFTSLLEAFASWDAAVGCPRVRAKLAAAGLGLGPGLPLPSASASASANGTAEDPAAASVSGGAAWRGAARCEDLAARHVGVLVKGWTWIPDALDGVYTCRCGVSCVWSKSAAAVDRPDALLFEGATPPPQRMKGLPLRVYLDLEASRKPTGFEDIFVGYHASDDVQVTYAGKSFHTSRSYHISTEKRNDALIYWSSSRCLPHRDKLAKDFLSLVPHHSFGRCLNNVGGPDMALSMYPVCSTNDNGTPHWWDHLHCAMSHYKFVLAIENTKTESYVTEKLFYALEAGSVPIYFGAPNVWDFVPPNSIIDASKFSSLRKLASYVKTLANDPVAYAEYHAWRRCGALGNFGRAREMSLDTLPCRLCEVVSKRGGKGADAL

SEQ ID NO: 3148 - protein, 804 aa, Zea mays
  VARIANT 725: note = Ancestral polymorphism is S, Derived polymorphism is L
  VARIANT 687: note = Ancestral polymorphism is A, Derived polymorphism is V
MQERRHPQRGIDDGRLQSVQKCANARLNEAWLEVVEPMVVGTALLRGVSSAWILLFLSSLLLSPSAASVDFGHCGGCDDADDGALSSTYNILQCQKVSDFLIAAAYFSIPLELLYFATCSDLFPLKWIVLQFGAFIVLCGLTHLITVFTYEPHSFHLVLALTVAKFLTALVSFATAITLLTLIPQLLRVKVRENFLMNKARELDREVGRMKRKEEASWHVRMLTQEIRKSLDRHTILYTTMVELSKALELQNCAVWMPDETRSTMILTHQLRERDIMDPQKHSIPIDDPDVQEIKATKDAKVLGPDSALGVSSRSKHEAGPVAAIRMPMLRVSNFKGGTPEVMQTSYAILVLVLPNDGSLGWGRRELEIVEVVADQVAVALSHAALLEESQLMREKLAEQHRDLLQAKDEAMRAGDARNSFQTAMYDGMRRPMHSILGLVSMMQQESMNPEQRLVMDAIAKTSSVASTLMNDVMQTSTMNCEHLSLVRRPFNLHSFIKEVVGVVRCLTGCKGVEFEFQVENSLPERIIGDEKRVFHIVLHMVGTLTDRCNAGCISLYVNVHNEVEDRHNHDWMLRRANFSGGYVCVKFEIRIRKSKGYLLSSSSSQISQGSKPNNSEMGLSFNMCKKIVQMMNGNIWSVSDSKSIGETIMLVLQFQLEPVTPVSGASSDLYRSSAIPNFNGLRVLLADSDCTNRAVTHRLLEKLGCRVLSVASGVQCISSFAAESSFQLVVLDLDMQTMDGFEVARAIRKFSSNSWLPLIIALAARIDDNIRDRCQRSGVNGLIQKPVTLAALGDELYRVLQNN

SEQ ID NO: 3149 - protein, 520 aa, Zea mays
  VARIANT 397..520: note = Derived polymorphism lacks residues 397 to 520
  VARIANT 376..520: note = Derived polymorphism lacks residues 376 to 520
  VARIANT 329..520: note = Derived polymorphism lacks residues 329 to 520
MLREVSLTNATFNSQLISIGALGLISRLNIGALELGDYLALGAIFSATDSICTLQVLSQDKTPFLYNHVFGEGVVNDATSVVLFNAIQNFDPRNISGAKLLNFIGSFLYLFGSSTILGVASGLLSAYTIKKLYFGRKFEGHNQVSSFIPSVWTFAFDHAFFGNAYANVIVWWAGLMRGAVSIVLAYNKVLWQCEAFWEVVSASLGTFIFVMMLSFRLQCHTGSFGVGAAWFLAVHVGCSTMFPRFCGSARHFGRDIIMPNLKSSVTTTASAVEYRDEVLKALPPDLKGGSGETPFSVGQAINSPELVPHSLPSYREKTLAILHEFQVLQVVAIGECGLDYDRLQFCPADMQKKFPVGVTHSFTDLAEDWDRLLSFENMFIGVNGCSLKTNENLEVLRGIPVERLMIEIDSPYCDIINTHARSPYVKSVWPSKKKEKYEPDSTVKGRNEPCLVRYVATVCHQFLGFLARQVLEVVVGSKGISGVEGLSRTLYHNTCRLFFPQDLDASANAQLESGTAVQDC

SEQ ID NO: 3150 - protein, 239 aa, Zea mays
  VARIANT 55: note = Ancestral polymorphism is M, Derived polymorphism is T
  VARIANT 102: note = Ancestral polymorphism is A, Derived polymorphism is G
  VARIANT 122: note = Ancestral polymorphism is G, Derived polymorphism is C
  VARIANT 127: note = Ancestral polymorphism is A, Derived polymorphism is V
MLSHAYDRSLGGRDFDEALFKHFAAKFKEEYKIDVYQNARACLRLRVACEKLKKTLSANPEAPLNIECLMDEKDVRGFIKREEFEHISAPVLVRVKGPLEKALAEAGLTTENVHFVEVVGSGSRVPAIIKIITDFFGKEPRRTMNASECVARGCALQCAILSPTFKVREFQVIFVDADQIISENEEALWFRLMVVRQGHFLEGGHHPLLPERDHPQGLGHRPAVLHLPLWTSEREAGQD

SEQ ID NO: 3151 - protein, 443 aa, Zea mays
  VARIANT 347: note = Ancestral polymorphism is R, Derived polymorphism is Q
  VARIANT 302: note = Ancestral polymorphism is D, Derived polymorphism is H
  VARIANT 292..443: note = Derived polymorphism lacks residues 292 to 443
  VARIANT 288: note = Ancestral polymorphism is N, Derived polymorphism is I
  VARIANT 236..443: note = Derived polymorphism lacks residues 236 to 443
  VARIANT 231..443: note = Derived polymorphism lacks residues 231 to 443
  VARIANT 223..443: note = Derived polymorphism lacks residues 223 to 443
  VARIANT 198: note = Ancestral polymorphism is N, Derived polymorphism is I
  VARIANT 191: note = Ancestral polymorphism is R, Derived polymorphism is C
  VARIANT 160..443: note = Derived polymorphism lacks residues 160 to 443
  VARIANT 100..443: note = Derived polymorphism lacks residues 100 to 443
MDARGTTRRELGCCCLSDGPADGGPAIDSTAADNEVDDVPIDNANVGMGNNSDNLNTSASMNDGDSFQPDIFDPRYWDSLGSKQIDILAQKGPKRDLSIQKDVNDTTGQGLFDVLQDQLKDLDLDIDDVRGQGYDNGSNMEGCKNGVQKKLLDLNPRAFYSACSCHSLNLTLCDMAKTCGKAKDFFGIIQRIYTIFANSTKKWQILKDNITRLTPKSVSATRWESRVESVKAIRLQCADIREALLQVSDIDSDPKTSSEAKGLANNELGEYEFIVAIVIRYEVLYAVNLVSKQLQSKDMLIDVAIEKVQGLIVFFQNYRETGFLEALETAKGIALEMDIGTSFRKRRKIKRKRHFDENPDVPDIATLSPEESFRISYFIPIVDQAISSLTRRFEQYQGYQKMFGFLFTSETLQSLDNESLKSSCDNLEAALEKDGKSDIDANE

SEQ ID NO: 3152 - protein, 313 aa, Zea mays
  VARIANT 35: note = Ancestral polymorphism is L, Derived polymorphism is V
MAGVSASIPCVVLNTGHAMPVLGFGTGSSSTPEDLPATILHAVRLGYRHIDTASMYGTEGAVGAAVSDAVAAGAVTSRADLFITSKLVMKDAHPDRVLPAIRESLARLGLDYLDLFLVHWPVAADENNKPVPFDMEGVWHAMEECHRIGLARSVGVSNFSAAKMSRLLAFAAVPPAVNQVEVNVGWRQEKVREACAKNGVVVTAFSPLGAIGTAWGSNAVMESGALEDIAARRGKTIAQVALRWLHEQGVCFVARSFNKERLKQNMELFDWELSVDDKEKIMGIPQRRACRAEFFLSPDGPYKTLEELWDGEI

SEQ ID NO: 3153 - protein, 227 aa, Zea mays
  VARIANT 217: note = Ancestral polymorphism is W, Derived polymorphism is C
MASLVALLAVALVAQLASWQQAAVAYDPSPLQDFCVADKNSPVRVNGFPCKDPMAVTPDDFFNPAMIIGKRRDTNNKVGSNVTNVNVESFPGLNTLGISLARIDYAPLGVNPPHIHPRATELLTVLEGTLYLGFVTSNPNRLFSKVVKKGDVFVFPKAMIHFQMNLDHEKPAAALSSLSSQNPGVITIASAVFGSKPPISDDVLAKAFQVEKKLIDWLQSQFWDTNY

SEQ ID NO: 3154 - protein, 390 aa, Zea mays
  VARIANT 215: note = Ancestral polymorphism is R, Derived polymorphism is P
MQPDPQGSGRGKAGGANAHARLPPPVTAASAGRPASVLPHKTDNVRDHYRIGKKLGQGQFGTTYQCVGKADGAEYACKSIPKRKLLCREDYEDVWREIQIMHHLSEHPNVVRIRGAYEDALFVHLVMELCAGGELFDRIVAKGHYTERAAAQLTRTIVGVVQGCHSLGVMHRDLKPENFLFASTAEDAPLKTTDFGLSVFYKPGADMWGKRLALRLVIAESLSEEEIGGLKEMFKMIDTDNSGTITYDELKDGLKKVGSDLMEPEIQALMDAADIDNSGTIDYGEFLAATLHMNKLEREESLVSAFAFFDKDGSGFITIDELSQACGQFGLSDVHLEDMIKDVDQNNDGQIDYSEFAAMMRKGNTGGAGRRTMRNSLHVNLGELLKPAET

SEQ ID NO: 3155 - protein, 268 aa, Zea mays
  VARIANT 82: note = Ancestral polymorphism is A, Derived polymorphism is S
  VARIANT 46: note = Ancestral polymorphism is C, Derived polymorphism is R
  VARIANT 23: note = Ancestral polymorphism is Y, Derived polymorphism is H
MRPVFVGNLDYDTRHSELDHLFYRYGRVERIDMKSGCPPLLLPTPRFVVVFGRFRCSTFLILLGFAFVYFEDERDGSDAIRALDGYPFGPGRRRLSVEWSRGDRAARRDGNKPEVNTKPTKTLFVINFDPMDTRVSDIERHFAPFGNISSVRIRKNFAFVRFETLEEARKALEATHATMLLDRVISVEYAFRDDDERSDRYDSPRRGGGYGRRGDSPAYRSRPSPDYGRPASPVYGSYGRSRSPVRDRYRRSPAYRSRSPPANRRAYD

SEQ ID NO: 3156 - protein, 719 aa, Zea mays
  VARIANT 48..719: note = Derived polymorphism lacks residues 48 to 719
  VARIANT 166..719: note = Derived polymorphism lacks residues 166 to 719
MDGAVASMRPVLENSANLYRTLFGFYTTDGHSFVLSVVFLGPKAPVIWSANPDSPVSSSAVLNFTREGDLLLHEAGGGTVIWSTGTSGMSVAVAGMKLDDLGNLVLFDRKNSSAWQSFDNPTDTLVLGQSLCRGNSSLSAKPSITKWPGARVYLSAELDGLQYSFKPAAYTQLFKATAASTNATPNCYAFVNGSFGFPDKVFSLPLAGSMQLMSDGQCSCPSSSYFRLRSERHPDAGCVPLASSASCDHRLIPLDNVSYFSYTTFQSSATPGISQALCLRSCLLDCSCRVVLFQRSLSFGEDGMSFGGDAGNCLLLSEQKLIMFAEGSANNVSALFSIQDGHSAERRNIVIITSTVAGISVASVLGFAVLWKKWREEEEPLFDGIPGTPSRFTFHELKAATGNFSTKLGAGGFGSVFRGTIGKQTVAVKRLEGVNQGMEEFLAEVKTIGRIHQLNLVRLVGFCAEKSHRLLVYEYLSNGSLDTWIFGASLVFSLSWKTRRGIMLAIARGLSYLHEECEEKIAHLDIKPQNILLDSKFNAKLSDFGLSKMIDRDQSKVVTRMRGTRGYLAPEWLGSTITEKADVYSFGIVMVEMICGRRNLDESLPEQSIHLVSLLQERAKSGQLLDLVDSGSDDMKSNNVEEVMRTMKLAMWCLQVDSSSRPSMSTVAKVLEGAVAMEATPGCIFVPSFASGDDAAAAVAGSNSNSSYVPSESHLSGPR

SEQ ID NO: 3157 - protein, 229 aa, Zea mays
  VARIANT 86: note = Ancestral polymorphism is A, Derived polymorphism is V
  VARIANT 74: note = Ancestral polymorphism is A, Derived polymorphism is T
  VARIANT 61: note = Ancestral polymorphism is A, Derived polymorphism is V
  VARIANT 44: note = Ancestral polymorphism is A, Derived polymorphism is T
  VARIANT 41: note = Ancestral polymorphism is G, Derived polymorphism is S
  VARIANT 33: note = Ancestral polymorphism is A, Derived polymorphism is V
  VARIANT 28: note = Ancestral polymorphism is R, Derived polymorphism is W
  VARIANT 22: note = Ancestral polymorphism is G, Derived polymorphism is D
  VARIANT 19: note = Ancestral polymorphism is A, Derived polymorphism is V
  VARIANT 11: note = Ancestral polymorphism is P, Derived polymorphism is L
MELWLLAKHNPDNRVRIAAAGDVRSLVWLLSHADPLLQEHGVTALLNLSICDENKATIVEAGAIRPLVHALKSAASPAARENAACALLRLSQLDGASAAALAPSRCWSPCSRPGSARQEGRRHGAIRALQRGVETGAVRPLLDLMADPESGMVDKTAYVLHSLVPSGEGHAAAIEEGDIPVLVEMVEVGTSREKEIATLSLLQIEIDRDGADGDHRAEGGGFASSPRPR

SEQ ID NO: 3158 - protein, 110 aa, Zea mays
  VARIANT 73: note = Ancestral polymorphism is R, Derived polymorphism is W
MPHSFGLSSLLAEGCGGGVPVPVPGRAMAPRQSAPVRVPAAWPAGGWRAGGRKADEDEEDGEEVVPPHVVAARRHARSSSVLEGAGRTVKGRDLRSVRNAVLRQTGFLDL

SEQ ID NO: 3159 - protein, 111 aa, Zea mays
  VARIANT 11: note = Ancestral polymorphism is R, Derived polymorphism is W
  VARIANT 23..111: note = Derived polymorphism lacks residues 23 to 111
  VARIANT 24: note = Ancestral polymorphism is R, Derived polymorphism is K
MMDKVEQVRQRRKAEKSLLSLQRRLATTSAEELENSGCQKTYASPGKSGEASFANASMMDMQKEAKIEKMKYEHLTREAALTENELLEEEYKKKLDEANKELSLENDLAGM

SEQ ID NO: 3160 - protein, 388 aa, Zea mays
  VARIANT 352..388: note = Derived polymorphism lacks residues 352 to 388
  VARIANT 190: note = Ancestral polymorphism is R, Derived polymorphism is M
  VARIANT 186: note = Ancestral polymorphism is I, Derived polymorphism is T
  VARIANT 169: note = Ancestral polymorphism is R, Derived polymorphism is M
  VARIANT 111: note = Ancestral polymorphism is P, Derived polymorphism is L
  VARIANT 63: note = Ancestral polymorphism is G, Derived polymorphism is R
  VARIANT 56: note = Ancestral polymorphism is D, Derived polymorphism is Y
  VARIANT 47: note = Ancestral polymorphism is L, Derived polymorphism is H
  VARIANT 45..388: note = Derived polymorphism lacks residues 45 to 388
  VARIANT 32: note = Ancestral polymorphism is R, Derived polymorphism is C
MCQVSGMDFVLEPVLSPCYARPKLVERALKGRYQVAMNILGPQGREHDLLIVILPDNNGSLYGDVKRICETNLGLVGGRNIVLVDALARRIPLVSDITTIIFGADVTHPHLGEDSSPSIAAVVASQDWHEVTKYAGLVSAQAHRQELIHDLFKVWQDPERGTVSGGRIRELLISFSRATGQKPKRIIFYMDGVSEGQFYQVLLYELDAIRKACAPLESDYHPPVTFVMVQKRPHTRLFANNHNDNRAVDKSGNILPGTVVDSKICHPTEFDFYLCSHAGIQVGEQAALPITMFCGMRTTLRLMGCKLSPITCVTRNVLLLPSIAFVLLIDFKAEDEPFSVPPAYYAHLVAFRDRFYMEPDTSDSGSMASRGPPLGGATPRLPVLGMLL

SEQ ID NO: 3161 - protein, 147 aa, Zea mays
  VARIANT 74: note = Ancestral polymorphism is V, Derived polymorphism is M
  VARIANT 61: note = Ancestral polymorphism is V, Derived polymorphism is F
  VARIANT 57: note = Ancestral polymorphism is Q, Derived polymorphism is K
  VARIANT 56: note = Ancestral polymorphism is L, Derived polymorphism is R
  VARIANT 49: note = Ancestral polymorphism is G, Derived polymorphism is R
  VARIANT 36: note = Ancestral polymorphism is T, Derived polymorphism is I
  VARIANT 31: note = Ancestral polymorphism is R, Derived polymorphism is W
MSSCHRRPIFTDEGPIGSRWLRALTRPDALRPTAVTVVDERLRDSKEFGLPLDGTLQGVLVVGVADNGGHMVSVKASFAGDGADDSISFFGVRRDDQEESHVAVVGGTGRYTGASGFAVVRAAGVPETSGNNNVSLSRALSFSVHLK

SEQ ID NO: 3162 - protein, 718 aa, Zea mays
  VARIANT 1: note = Ancestral polymorphism is M, Derived polymorphism is I
  VARIANT 13: note = Ancestral polymorphism is P, Derived polymorphism is T
  VARIANT 24: note = Ancestral polymorphism is P, Derived polymorphism is L
  VARIANT 158..718: note = Derived polymorphism lacks residues 158 to 718
  VARIANT 362..718: note = Derived polymorphism lacks residues 362 to 718
  VARIANT 387..718: note = Derived polymorphism lacks residues 387 to 718
MEVYAVGVLRLLPWLALAAALLPLARAASQQPPVRGCRRQCGNVTVPYPFGIGAGCHRGATTGGFRLQCDDAGGRGRPPRLTVAGYGHEVAAISLPTAEATVLLKASRACYDRPGDADGRVVSLQEHPMALNGSAFLFSSMKSKFISIGCPGLAYVLQRRRRSTIPLGLNSYRPYLGSFGRRRRRDQEATFLANSTACSYAFMVDAWWFWFAGSHFNRTGDFAVPVVLDWAIRDAPSCAAAERDSETYACRSAHSVCLESSNGPGYVCNCTGGYQGNPYVTDGCTDVDECRHRDEFPCYGVCVNTPGSFLCTCPNGSSGNATVQDGCRRDDDNKFGLPLKIVTGVSAGVLLLLLASFSSHLWVQKRRLLQAKRRFFEQNGGVLLQQQLGSLASSGVAFSIFSGEEIGRATDGFAEARVLGRGGHGVVYKGVLADGSAVAVKKSRVVDARQVKEFAREMLILSQINHRNVVKLLGCCLEVEVPMLVYEYVPNGSLHAYIHGDGDGGGGGGEAKLNLPPGARLRIAAESADALAYMHSSASPPILHRDVKSANILLDGDLAAKVSDFGASRLAPAGEEAVATLVQGTLGYLDPEYLLTSQLTSKSDQGRAWLNSMSDVYSFAVVVLELLTGRKAFVPVEDEEEEEEGGLAFCFVTAAQAGRHREIMDQRVIEEVGAEVLDEASELLMRCLSIIGDERPTMKEVADKLQKLRRHACSSSRL

SEQ ID NO: 3163 - protein, 352 aa, Zea mays
  VARIANT 1: note = Ancestral polymorphism is M, Derived polymorphism is I
  VARIANT 16: note = Ancestral polymorphism is G, Derived polymorphism is E
MVIYPLQTTSGLCGHGTLAAAHYLISSGSDAIEFVAKSGRLTAKEVVGPEDASNLYYTAQYTRSKFFCRIGFPCYLGGTVPISVDLEAPIDDVTGLPLIMCPDCKDGTCDRFWFEEEYLVFLQDNGYLPSASSTIAAGSTSKVPELVGKIDSLEQNLNKVTEMEKSAKNKANRGNVQLHQRTGARSYIAHRYSLRTKYNNMEPDAVDFFGECMNSPRNGRTPLANEIYERELEEGEAQKSPSKIVADSLSQISRSSTFLPNIGVPTTSKTSRSTSLAAQARMHAQFEEKLQAEREEAARKQEELQAQLQAQQAALEENQSLLRQTQEEVKGMHTKFEETNALLRAVLKLQKD

SEQ ID NO: 3164 - protein, 283 aa, Zea mays
  VARIANT 7: note = Ancestral polymorphism is R, Derived polymorphism is G
  VARIANT 14: note = Ancestral polymorphism is D, Derived polymorphism is Y
  VARIANT 57: note = Ancestral polymorphism is L, Derived polymorphism is R
MSEEMKRLIAYVKDLYEDTNSCNMVKVQWFDKVDEVGVPLPMDFDDTEIFSLDRQDLNVECIDGLAAVLSVQHYEKFKGDTRYNLWQPYFCCRQIDNGDIKPFDRHKDKIKVRYLELQDADETGNLEEWVMLTRVAKPDQLGVCFLGRPMVRPQRVEQSKASCFDVGAIVDAWWHGGWWEGIVLCQVGSGRLQVYFPGENRTAEFGEDELRCSLEWVGNKWNPLKGRKDVTSKLTSTADCGSECLIGKQDPLNFYVPKNSKPQLERHQYDKGGIEKSSVSTIS

SEQ ID NO: 3165 - protein, 149 aa, Zea mays
  VARIANT 13..149: note = Derived polymorphism lacks residues 13 to 149
MSFYEPSKERSRETVFHVPAMSPRVVLLFLAALRPCAALVRLHSTTFSFTFLDAPARFGPRVSGDGICGSLRAADPAEACETIKDRGGRRGAGRKAFVLIARGNCSFEEKVRAAQQAGFDASIVYDDEEKASLYSNSIDDGSVYAYTSV

SEQ ID NO: 3166 - protein, 161 aa, Zea mays
  VARIANT 5: note = Ancestral polymorphism is I, Derived polymorphism is T
MRSATLLTICTLSALLLVARGSEKPSAAPPPVVAVGVAAASDLIRSGGHRYLDVRTEEEFRSGHVEDSLNVPYLFFTSQGKSIFSSNSGREKNPKFIAQVAAGFDKEDNIVVGCKSGVRSELACADLMAAGFRNVKNIEGGYTAWVESGLAVKKSQAQDEL

SEQ ID NO: 3167 - protein, 625 aa, Zea mays
  VARIANT 114: note = Ancestral polymorphism is S, Derived polymorphism is Y
  VARIANT 144..625: note = Derived polymorphism lacks residues 144 to 625
  VARIANT 471: note = Ancestral polymorphism is A, Derived polymorphism is G
MPPGLLPRGCLLLVVPHLRRHLPALCSTLRSSHSHKRPAVIFSPVRAVSGYSAMAAGSPEQQQRSVVVKETVELTETEERIFRRLLEVVRHFSLGTQLRVAGGWVRDKLLGKDSADIDIALDNMTGQNFCEKVNEYSKLIGEQQKGIGVIQCNPDQSKHLETARMLILDIWIDFVNLRSETYTENSRIPTMEIGTAKEDAYRRDLTINSLFFNINNNSVEDLTGRGIEDLKKGLIVTPLPAKATFLDDPLRVLRAIRFDEDLKEAASDEKVKSELGTKISRERIGHEIDLMMSDKHPVKAMCDIRDLGLFYVVFSFPEKSNPPVFDKCDWQCVSHIEAAWDLAYSIGSCVFSSGSDSKSQDERRRLYLYSALFNPLRSMFYLDKRSKKAPVSSFIIKDSLKLKTSDAETVVNIHAASEKFAELIPLLESNADVYALKEKLEDEYLEIPGDSVKRVFAGLILREIKEFWRVALLLSILFYRETGTPAGTLDEQDELRRRKEKYIRAERSITDLGKLTNDGCGICGWFFPPYLQAPRFTLFIHTLGQLFWFYWFSAPDLDGVWKLKPILDGKSIMGVMQVKSGGPLIGKWQQRVLKWQLAHPDGTVDECVEWMKQSQSKRQKVESST

SEQ ID NO: 3168 - protein, 118 aa, Zea mays
  VARIANT 44: note = Ancestral polymorphism is A, Derived polymorphism is V
MGNMTTVEHGVVGDMRDAWPNARVRKNVSIIHTYHGFKGEKKGALEFLKLIFRALCLCWDRQTQDLHVDWILFRGRPLVPALCEVINDNIDGVYPSSHFPIFAEFLLPRSVRLAETPS

SEQ ID NO: 3169 - protein, 224 aa, Zea mays
  VARIANT 29: note = Ancestral polymorphism is Y, Derived polymorphism is C
  VARIANT 51: note = Ancestral polymorphism is P, Derived polymorphism is L
  VARIANT 80: note = Ancestral polymorphism is G, Derived polymorphism is R
  VARIANT 88: note = Ancestral polymorphism is P, Derived polymorphism is L
  VARIANT 89: note = Ancestral polymorphism is A, Derived polymorphism is T
  VARIANT 147: note = Ancestral polymorphism is R, Derived polymorphism is Q
  VARIANT 158: note = Ancestral polymorphism is K, Derived polymorphism is M
  VARIANT 159: note = Ancestral polymorphism is A, Derived polymorphism is S
  VARIANT 167: note = Ancestral polymorphism is D, Derived polymorphism is Y
  VARIANT 173: note = Ancestral polymorphism is P, Derived polymorphism is L
MVSPELYGDSRPRLFTYWTSDTYEATGCYNALCPGFVQTSSRIAIGASISPVSSVGGAHYDMRLLVWKDSKLGNWWLRYGDQLVGYWPAQLFTLINSNNTISSPEVHVYTSTVHTAIEGRPKKRISMLSGAACSTSHLPDVVIRQRRAGWRWGSYGWKAEGTSGSADGRELWPKRRKSRKVLRSRRNTGGWRFCRGRRRSARVGFGHERMRVDGDLGDNDGGSD

SEQ ID NO: 3170 - protein, 313 aa, Zea mays
  VARIANT 42: note = Ancestral polymorphism is L, Derived polymorphism is H
  VARIANT 124..313: note = Derived polymorphism lacks residues 124 to 313
MDEIQLVHTDYDLEFQLLLAYYEEKSKSVADAIKRTSQNEELGAVAKVWSSWVESAFAAASGVRVTVAVQLEPKTGLALATTDGACFHVFLLSSASDRASPAPAPRLASGNSYWDTSKQSKPKSMQQDKNNKYPCWGAWRGERRNGRGRETIAMASCEKSTRPHDVSAHHSTSHGGSRWQQLGGKAAERVPPFAPIGEEAATRTRARGPGGSRVVHAEAAVVFLLLIAGAGWGGGGRERERDYLELWSAGGEYRWPDERGKKQCSYELGPSYEISRLRFLALKVTLPNPLCLCVHSDYKYKSFSLSLSDLGFG

SEQ ID NO: 3171 - protein, 234 aa, Zea mays
  VARIANT 223..234: note = Derived polymorphism lacks residues 223 to 234
  VARIANT 169: note = Ancestral polymorphism is R, Derived polymorphism is M
  VARIANT 147: note = Ancestral polymorphism is C, Derived polymorphism is G
  VARIANT 110: note = Ancestral polymorphism is V, Derived polymorphism is I
  VARIANT 102: note = Ancestral polymorphism is T, Derived polymorphism is I
  VARIANT 47: note = Ancestral polymorphism is I, Derived polymorphism is T
  VARIANT 46: note = Ancestral polymorphism is L, Derived polymorphism is I
  VARIANT 38: note = Ancestral polymorphism is I, Derived polymorphism is T
MVKLLASYNKEVKGVVLENAPRNAKYTSSDVQKEILSIVARKVQKITREEIGTSKFCIMVDEARDESKKEQMAIVIRFVNKEGLIKEHFLDLVHVKDTTALTLKNSICVVLTANSLSIEDIRGQGYDGASNMRGERNGLKALILNEGPYAYYIHCMAHQLQLALVASSRKVQEVHNFFQHATFIINVVSSSTKRNDELLAAQAEEIAREIELGELDTGQGANQMSSLQRQGDTR

SEQ ID NO: 3172 - protein, 160 aa, Zea mays
  VARIANT 14: note = Ancestral polymorphism is P, Derived polymorphism is L
  VARIANT 15: note = Ancestral polymorphism is A, Derived polymorphism is T
  VARIANT 23: note = Ancestral polymorphism is E, Derived polymorphism is K
  VARIANT 66: note = Ancestral polymorphism is A, Derived polymorphism is V
  VARIANT 93: note = Ancestral polymorphism is P, Derived polymorphism is S
  VARIANT 136: note = Ancestral polymorphism is A, Derived polymorphism is V
  VARIANT 147: note = Ancestral polymorphism is R, Derived polymorphism is C
MALIESLHVFKPDPTRDGASPSETIERALARALVDYYPLVGRLAVSEGAGGLHVDCSAEGVWFIEAVVRCRLEDVDYLEYPLQIPNDDLLLHPLPRPTHEEESKLILLVQVTAFECGGFVVGFWFSHAVADGLGAAKFMGAVGELARGVDRVSVAPTSLL

SEQ ID NO: 3173 - protein, 561 aa, Zea mays
  VARIANT 165: note = Ancestral polymorphism is L, Derived polymorphism is P
MEHDAHAEASSHAVPPPEDATVDDWARDDAEPMSVESSATPPEVAAVDSGADTPPAPSASAAVAGEGVKEIQSSLQSLELKTNEDAHVVEDDVEETKRHLNVVFIGHVDAGKSTTGGQILFLSGQVDDRTIQKYEKEAKDKSRESCFNHAYDSFAYSFHVFRERLLKLVGPTLRQNTQDSLSWMHRYLFLLYVAYMLLMQGHKSYVPNMISGASQADIGVLVISARKGEFETGYERGGQTREHVLLAKTLGVAKLVVVINKMDEPTVKWSKERYDEIEAKMVPFLKSSGYNVKKDVQFLPISGLVGTNMKTRMDKSICSWWDGPCLFEVLDRIVVPLRDPKGSVRMPIIDKYKDMGTVAMGKIESGTIREGDSLLVMPNKVFFAFPSYSHVKVIGLNLDESKVRRAGPAENVRVKLSGVEEEDVMAGFVLSSVANPVGAVSEFIAQLQILELLDNAIFTAGYKAVLHIHSVVEECEIVELIEEIGMKKKKEEDPKKKKPKRKPLFVKNGAIVVCRIQVNNLICIEKFSDFPQLGRFTLRTEGKTVAVGKVVDIPPAGSPTF

SEQ ID NO: 3174 - protein, 574 aa, Zea mays
  VARIANT 161..574: note = Derived polymorphism lacks residues 161 to 574
  VARIANT 350: note = Ancestral polymorphism is I, Derived polymorphism is T
  VARIANT 517: note = Ancestral polymorphism is R, Derived polymorphism is W
MSLAGAGAAALRKPATWRRPGGRGVARRRVAVAALLLALAYAGGLLMFLLDERLSGGSVGGAAAGGLGPMVTVASSVRRRRPLPSPADAPPHAQPGSVYRSHLVFERLLPAMRDDATLASSLSASASWRRTMLMTSHYQNSGDPWMPCVNGRLTRSELPPSNGYLMIEANGGLNQQRLSVCDAVAVASLLNATLVIPTFHLNSVWRDPSKFGDIFDEDHFIETLKEHVRVVKKLPEDVLLRFNHNISSIPNMRTKAYSSPNHYVQNVLPKLLELGAVRIAPFSNRLAQSVPLNIQALRCLVNYHALRFAEPIRILSDELVGRMTKKSLLTGGKYVSVHLRFEEVSSLLCIHNYDMVAFSCCTYDGGWREKTEMDNARERSWRGKFRRHGRVINPEANRRDGKCPLTPLEVGMMLRGMGFDNTTSLYVASGKIYNSEKYMAPLRQMFPLLTTKDSLALPEELAQFKGHSSQLAALDYTVCVHSEVFVTTQGGNFPHFLMGHRRYMFGGNAKTIKPDKRKLVLSFDDPNIRWDQFKQNMQEILQHSDMRSIALRKPNDSVYTFPMPDCMCKQDGMI

SEQ ID NO: 3175 - protein, 186 aa, Zea mays
  VARIANT 153: note = Ancestral polymorphism is T, Derived polymorphism is I
  VARIANT 100: note = Ancestral polymorphism is Y, Derived polymorphism is C
  VARIANT 61: note = Ancestral polymorphism is H, Derived polymorphism is Y
  VARIANT 58: note = Ancestral polymorphism is W, Derived polymorphism is S
  VARIANT 56: note = Ancestral polymorphism is L, Derived polymorphism is P
MGYAEIAIRPSGSGKKIQRQGGLSRRFSNVSYYGLTTPPYKLDALEPYMSKRTVELHWGKHHQDYMDGLNNQLATSPLYGYTLEDLIKEAYNNDNPLPEYNNTAQDGWVWLVLKRNERKLLVVHTRNAISPLAFGDIHAYYLDYKDDKLTYVTNFMDHLVSWHTVTLRMMRAESFVNLGEPNILEA

SEQ ID NO: 3176 - protein, 120 aa, Zea mays
  VARIANT 49: note = Ancestral polymorphism is R, Derived polymorphism is S
  VARIANT 10: note = Ancestral polymorphism is S, Derived polymorphism is L
MGGARGPPTSWRAVAAAALALWLLPAALALAVLWLPLLCCAVAAVRFLRVRRKLVASGRSRGGCCDGDGDGDGDRDRVPDETATVRAGGRLRLLHRYLDDQVELVVGVGAHDHQEDHEQG

SEQ ID NO: 3177 - protein, 1110 aa, Zea mays
  VARIANT 340..1110: note = Derived polymorphism lacks residues 340 to 1110
MWRKMATCIRKIASEEFGLSQGNRREVKDTWWWNEDVQKAIKEKKDCYKRLHHDKCAENIEKYRIAKKSAKRAVSRARGQAYDDLYQRLDTKQGEKDIYRMAKIRERKTRDVNQVKCIKDEANQLLVKSEEIKNRWKEYFNKLFNGGNERATIELDEPFDDNNRGFVRRIQEYEVKEALKRMKVGKAMGPDGIPIEVWRCLGDIAIVWLTKLFNTIFRANRMPDEWRRSTLVPIFKNKGDVQSCTNYRGIKLMSHTMKLWERVIEHRLRKMTSVTQNQFGFMPGRSTMEAIFLLRQLMERFREQKKDLHMVFIDLEKAYDKVPRSVMWNIFHLLTQREVSPRLKHHAKRMWNESPKYDPDSIELRSADAKLDIFSWAESQSLHSWSAKYCPLLPPPRSTIAAAFSPDGKTLASTHGDHTVKIIDCQTGKCLKVLTGHRRTPWVVRYHPLHSDILASGSLDHEVRLWDANTSDCIGSQDFHRPIASIAFHGSGEILAVASGHKLYIWNYNKRDGTSVPAIILKTRRSLRAVHFHPRGAPYLLTAEVNNIESADSPLTLARSSGYLNYPSALLVTNTNSRFCTLPESNVVSPCLLWPAYLRDGGILHVLGNDSSSTIVQQRSSLVQPSTSDTANVQLEQFATPMDVCPGEPTSSNDIPDAVTVPTSNGNEMHGAGGQSNSRLQGSSSTSNLERFSARDDLQVSSLSRTDPIPLTAGPSGSDLHRAMPLNMLLTGGLDVQMFLRNVGSGQQDHSLFGDSRNWEVPFLQGFLMAPNHAGLHPALVNNSVLEDMSIAGTAGTNNLKSPHMRNFGCPGASSSIPLTTGSSRGPNRRYASRSVPGVGNLLLGPQIDEAEAHAVSLGAGSEITASMLAPGTELPCTVKLRIWRHGTNEPCVPLEPEACCLTISHAVLCSEMGAHFSPCGRFLVACVACLLPQTEDDRGSQLPVSYEGAGSSPTRHPLPSHRVIYELRVYSLEAETFGDILASRAIRAAHCLTSIQFSPTSEHILLAYGRRHSSLLRSIVVEGENGVPVYTILEVYRVSDMELVRVLPSAEDEVNVACFHPSPGGGLVYGTKEGKLRILQHNGADMTNMGVGCFIEENMVEIQRYALEC

SEQ ID NO: 3178 - protein, 183 aa, Zea mays
  VARIANT 116..183: note = Derived polymorphism lacks residues 116 to 183
  VARIANT 108: note = Ancestral polymorphism is S, Derived polymorphism is L
  VARIANT 60..183: note = Derived polymorphism lacks residues 60 to 183
  VARIANT 37: note = Ancestral polymorphism is G, Derived polymorphism is S
  VARIANT 15: note = Ancestral polymorphism is V, Derived polymorphism is L
MAGHLSDVDCVQWHVNCNYIGTGSSDKTVRLWDVQTGECIRMFIGHRSMVLSLAMSPDGRYMASGDEDGTIMIWDLSTGCCVSPLLGHSSCVWTLAFSCEGALLASGSADCTVKLWDVAFSTKAMKTEDTKGSSSANRLRLLKSLPTKSAPVYSLRVRNFSFIQHDFWSENFYPQFCSPAGNV

SEQ ID NO: 3179 - protein, 644 aa, Zea mays
  VARIANT 94..644: note = Derived polymorphism lacks residues 94 to 644
  VARIANT 154..644: note = Derived polymorphism lacks residues 154 to 644
  VARIANT 160: note = Ancestral polymorphism is L, Derived polymorphism is R
  VARIANT 187: note = Ancestral polymorphism is R, Derived polymorphism is M
  VARIANT 201: note = Ancestral polymorphism is E, Derived polymorphism is D
  VARIANT 203: note = Ancestral polymorphism is P, Derived polymorphism is L
  VARIANT 243: note = Ancestral polymorphism is P, Derived polymorphism is L
  VARIANT 264..644: note = Derived polymorphism lacks residues 264 to 644
  VARIANT 297: note = Ancestral polymorphism is L, Derived polymorphism is H
  VARIANT 301: note = Ancestral polymorphism is T, Derived polymorphism is M
  VARIANT 312: note = Ancestral polymorphism is S, Derived polymorphism is L
  VARIANT 333: note = Ancestral polymorphism is G, Derived polymorphism is S
  VARIANT 338..644: note = Derived polymorphism lacks residues 338 to 644
  VARIANT 344..644: note = Derived polymorphism lacks residues 344 to 644
  VARIANT 409..644: note = Derived polymorphism lacks residues 409 to 644
  VARIANT 410..644: note = Derived polymorphism lacks residues 410 to 644
  VARIANT 464..644: note = Derived polymorphism lacks residues 464 to 644
MATIISGARSLHSLALRSRMLGEMTQLGPFNRNVQRRWRKPVDSARTRLEGRTMDHRLDKLMVQLRNLRLALALHEVISQQRNGYASLQLLSRWRHEVGLNIEVGAFLKKYPHVFQTYVHPVKRNHCCKITQKMSDLIAEEDAVVRENEVGVVQRLKKLLMLSVDGTLNMHALWLIRRELGLPDDYRSSILPNHRHDLILESPATLSLFSMDETLAVAKVDEWRKREYTEKWLAESETKYAFPINFPTGFKVQKGFREKLKNWQRLPYTKPYEKNDSHSIRNVERLEKRIVGVLHELLSLTIERMMPLERLSHFRRLYTMEVNLLEFFLKYPGIFYISTKGSTQTVILRESYSKGYLIEPNPVYIVRRKMLDLVLSGSRNVGECQQDSATWSAEEHGLGSSHGCQDNICQAVGAVLEEKVPLIYSLLKGLALQLPDDVPDKNEIIRLRKVASSVGVGDKHDAEWVHSILADAGAANDNSWILLPYLCAAFMVSNIWNGAVYDVNIGGLSNNLHCLARCMNCKRPSYRAVSQQKQISNLAAHRPEADIPGPALRAVPVRAKEHLRSSHPIHHPALDIPPAVRRLSAGLGTGGAVPKAVASHLSGTRVPVRKADAEPTRDNTQVPHLRPRLLQLVGVPARRWLRRG

SEQ ID NO: 3180 - protein, 285 aa, Zea mays
  VARIANT 174: note = Ancestral polymorphism is E, Derived polymorphism is K
  VARIANT 146..285: note = Derived polymorphism lacks residues 146 to 285
  VARIANT 91: note = Ancestral polymorphism is G, Derived polymorphism is D
  VARIANT 64: note = Ancestral polymorphism is R, Derived polymorphism is W
  VARIANT 37: note = Ancestral polymorphism is A, Derived polymorphism is E
  VARIANT 26..285: note = Derived polymorphism lacks residues 26 to 285
  VARIANT 11: note = Ancestral polymorphism is C, Derived polymorphism is F
  VARIANT 2: note = Ancestral polymorphism is A, Derived polymorphism is G
MAPVLPVAQGCGKHIVLVHGGCLGGWSWFKVATALRAAGYRTDKPDLAASGVDPRALREVPTFRDYTEPLLKLLASLPDGERVVLVGHSLGGVSVALAAETFPDKVAAVVFLCAFMPDCAARPSHVLEKFVEGKWLEWMDIEVKPQDGEGKLTTSMLFGPRIIREKFTQLCSPEVRRLYPHMFTVPFVRVELKGKTFVGHSILRRPRVPPFDCFGADILDAAENGVRYPCAEGGCFPALKITTLLAAIPTIGYARILDIGWEWAGVIWIYNVVTFLPMDMFKLAI

SEQ ID NO: 3181 - protein, 187 aa, Zea mays
  VARIANT 101: note = Ancestral polymorphism is P, Derived polymorphism is L
MASTPHPPPLIGKSGNLTVFFTPSAEHESPGSEFSTPPTSPRAEDSPESPPAQTAPPPAPVYSVSTPQLVKMVSPPLPAEKLSRPSLVQVPSPPVKSVSTPLQAPKVSSCSLPPVQVPPLQFGKASAGSDGSLLAFFWDAVARMQEAHASLDEHISRWFGLDQSKYQWALNDYYERTGQVIPYFSFL

SEQ ID NO: 3182 - protein, 228 aa, Zea mays
  VARIANT 208: note = Ancestral polymorphism is S, Derived polymorphism is L
MRASQHHAPPQPLPLPPPPLSLPSPSAAPRRGRHSSTHSSSSSSSSCISGPSPSSAPFPHASTTSSLVPFSWERHAGVPKNSSRHPWRAASPTCTPLPPPPPLRPAPRRRRAKAPATSSSDAKEDPFVAAFAECTRDDDYAADVDGDSNKLAPVPAKKAAVVSPGRAERRRWMAGGGGLVAFLDMHGCKSAMDVVVADGTFQPRAGSSLLRIIDPRPRRPGEPQPQAK

SEQ ID NO: 3183 - protein, 161 aa, Zea mays
  VARIANT 134..161: note = Derived polymorphism lacks residues 134 to 161
  VARIANT 125: note = Ancestral polymorphism is A, Derived polymorphism is V
MRPATSRIRSTEASDEPSNFMTMVNPAWAFLAPDAAAGASSVLRKGAAVDPVWQRIARPLLHLQHCGPEFALARAERRSLPSLGAATGASRDRDSLATPMKHSVADISGRGQRAVGSPVREQVRATWGTGSAEEEVAWDISLSPFDVVAVLHLHLMHVTRD

SEQ ID NO: 3184 - protein, 124 aa, Zea mays
  VARIANT 34: note = Ancestral polymorphism is A, Derived polymorphism is V
  VARIANT 59: note = Ancestral polymorphism is L, Derived polymorphism is M
  VARIANT 66: note = Ancestral polymorphism is V, Derived polymorphism is I
  VARIANT 86: note = Ancestral polymorphism is V, Derived polymorphism is L
  VARIANT 87: note = Ancestral polymorphism is K, Derived polymorphism is N
MLCHDHPTVYELYSSSLGGAPNANGDSMTTRVAVDHHMHQDFQPTSKSSDMSFSHIIALDVKEHPVVIYMKGYPDAPRCGFIALGVKVVHQYGNLSISAAYFKCKLRWYRLQAHLFKQQLPMFK

SEQ ID NO: 3185 - protein, 435 aa, Zea mays
  VARIANT 93: note = Ancestral polymorphism is S, Derived polymorphism is C
  VARIANT 216: note = Ancestral polymorphism is R, Derived polymorphism is W
MCTRIIITQNIMDIKKRHKAEVPCFDFENFSRKGFKELQVSEESGVVIFEGVYTLHPAIRKFLDLWIAVVGGVHSHLIARIQRDKNRAGFSISQTEIMTTVFPLFQQYIEPHLVHAHVGTRNIILKIQNDFDPVLSPESSLFVLKSKKQLPFHLILVRLHLHHHSFVLLSLVLVVLVHLQQENCHVLHVSCQDILKVLDASKVCSSVQNFTDVYLRLPGIPSNAQLTEGECIRVRICEGRFALLIREPIREGNFIIQPKVDFDISASTVAGLLKLGYQAVAYIEASAVIYQDGKILIEVDHLQGVSTPYLQIKGTNKEIVTSAGSALCLDGSYTTKSYLQIILESLPADGNVSIGIHNQQAARLQELVEFIQSQGGSFNSDLSSPIRETSSTDSVIDDMQSRIRKLERWNTINMVLWTILLSALVGYSLYQKKRH

SEQ ID NO: 3186 - protein, 224 aa, Zea mays
  VARIANT 200: note = Ancestral polymorphism is L, Derived polymorphism is H
  VARIANT 171: note = Ancestral polymorphism is R, Derived polymorphism is H
  VARIANT 169: note = Ancestral polymorphism is R, Derived polymorphism is I
  VARIANT 150: note = Ancestral polymorphism is R, Derived polymorphism is C
  VARIANT 142: note = Ancestral polymorphism is L, Derived polymorphism is F
  VARIANT 108: note = Ancestral polymorphism is A, Derived polymorphism is V
  VARIANT 78: note = Ancestral polymorphism is Y, Derived polymorphism is N
  VARIANT 74: note = Ancestral polymorphism is V, Derived polymorphism is M
  VARIANT 61: note = Ancestral polymorphism is E, Derived polymorphism is V
  VARIANT 54: note = Ancestral polymorphism is A, Derived polymorphism is T
  VARIANT 42: note = Ancestral polymorphism is R, Derived polymorphism is H
  VARIANT 41: note = Ancestral polymorphism is C, Derived polymorphism is Y
  VARIANT 7: note = Ancestral polymorphism is V, Derived polymorphism is I
MMWDFTVTEDHTNIPDQQIVFKVTEENLAALFINCGQVVDCHMCGDPNSVLRFTFIEFTDEEGARAALNLSGTMLGYYPVRVLPSKTAIAPVNPTFLPRSDDEREMCARTIYCTNIDKKVTQADLKLFFESICGEVFRLRLLGDYHHSTRIAFVEFVMRYVFSGLKMIRIRCLRFEWIKFGWSVPPSEETNPDGKRHLLLNISGRKCYRCPELQWRDTGILANK

SEQ ID NO: 3187 - protein, 595 aa, Zea mays
  VARIANT 489: note = Ancestral polymorphism is A, Derived polymorphism is T
  VARIANT 479: note = Ancestral polymorphism is H, Derived polymorphism is Y
MVETRRSARRSGSGSLPADGAPSEPASSSPATSLPPRENNGLVISNDNTLKQTVEVEKQGRQGKEVLVVHELDESNEDSGSLDEPPGWLPDGWTMEVCQEDNGSIYKYYTSPMSGYMFTSKMETLHYLFSGVEERMLELQASAEDNELHESHTWLPRGWVIEVRAGGKKMDKMYKVDRCRGYMSWRVSLCLLQFYVHLPTGQRFLSKAEVLHFVNKGMVSTCDMDVLCDTSTDDNILAHVEFNPDGLPDGWVKETISRKFNDGIRKDQYYTDPVSHRVFRTLKSVLSYLGTGEISRHSYLPRRNVIDMYSFDKCADLPKSMVKRLKAKGQAKKKFMRAQVLDKDLSNGQTSNHCEGAIGLTQSDPEGDKFGSMEAACEKGTSSETMKQRIGRPKKILKQTNDSISDRDKGSHQEHIEAKEEVDICGGKDLTHLKTLERTEAQNSTMITKEVNNNDTAEKNLSKIEGDNSDLEPGYFAFHILTDAQNFYAMKHWFARNSYKNAAICVINYEAIILEKLPKYTIRQLYLPEEFRVLIRSIKRPTENTRMKYLSLFSPSHFVIPEIFKYLNLDASTTLEYICTHIRIIEYRLICRKLI

SEQ ID NO: 3188 - protein, 362 aa, Zea mays
  VARIANT 38: note = Ancestral polymorphism is E, Derived polymorphism is K
  VARIANT 39: note = Ancestral polymorphism is R, Derived polymorphism is Q
  VARIANT 43..362: note = Derived polymorphism lacks residues 43 to 362
  VARIANT 48: note = Ancestral polymorphism is G, Derived polymorphism is D
  VARIANT 51: note = Ancestral polymorphism is V, Derived polymorphism is A
  VARIANT 62: note = Ancestral polymorphism is V, Derived polymorphism is A
  VARIANT 67..362: note = Derived polymorphism lacks residues 67 to 362
  VARIANT 68: note = Ancestral polymorphism is R, Derived polymorphism is Q
  VARIANT 77: note = Ancestral polymorphism is R, Derived polymorphism is W
  VARIANT 143..362: note = Derived polymorphism lacks residues 143 to 362
  VARIANT 146: note = Ancestral polymorphism is P, Derived polymorphism is L
  VARIANT 164: note = Ancestral polymorphism is T, Derived polymorphism is I
  VARIANT 170: note = Ancestral polymorphism is P, Derived polymorphism is L
  VARIANT 184: note = Ancestral polymorphism is A, Derived polymorphism is V
  VARIANT 188..362: note = Derived polymorphism lacks residues 188 to 362
  VARIANT 199: note = Ancestral polymorphism is D, Derived polymorphism is N
  VARIANT 221: note = Ancestral polymorphism is C, Derived polymorphism is Y
  VARIANT 223: note = Ancestral polymorphism is G, Derived polymorphism is V
  VARIANT 247..362: note = Derived polymorphism lacks residues 247 to 362
  VARIANT 265..362: note = Derived polymorphism lacks residues 265 to 362
  VARIANT 317..362: note = Derived polymorphism lacks residues 317 to 362
MKQTTSSSSSLCLAGQAGTTAPAPSFLLGGIPLPLLRERRHRRGRGRGGRVPDDRAEELWIVRPRSWRRREEAELGRPVGLLGGRGCLAGPVGRGGLHGPETPEEAARARRKNCIYIENQYFLGSSYGWKHEGIKAEEIGALQLIPKELSLKIISKIEAGERFTVYVVVPMWPEGVPESASVQVILDWQRRTMEMMYTDIAQALKANEIEANPNDYLTFFCLGNREVKQDGEYEPEEHPEPDTDYIWAQEARRFMIYVHTKMMIEVKQDGEYEPEEHAEPDTDYIWAQQARRCANRETLGKHDMHFLADYISMFSGQGPFQTGITRNVVSVSHHTKMELSYLLSLADITSTGVVLPHDAQTK

SEQ ID NO: 3189 - protein, 235 aa, Zea mays
  VARIANT 99..235: note = Derived polymorphism lacks residues 99 to 235
MFGFLKQRRQTPSGFSSSSAAEEVTAGIDGSGLVAIVTGIAFSPFTLSDDGIELQFATNYLGHFLLTNLLLEKMKITAMESGIEGRVVIVASDSYKHTYREGIRFDKLNDASGYKGILAYGQSKLANILRSNELSCRLKEEDAKVVVNSLHPGVVATNITRHLGIIKDILSPIAKLVLRGVEQGAATVCYLALHPQVAGVTGKYFVDFNAVELKPPATDKELSKKLWDFSVSLLQ

SEQ ID NO: 3190 - protein, 279 aa, Zea mays
  VARIANT 241: note = Ancestral polymorphism is G, Derived polymorphism is R
  VARIANT 223: note = Ancestral polymorphism is T, Derived polymorphism is N
  VARIANT 221: note = Ancestral polymorphism is I, Derived polymorphism is N
  VARIANT 217: note = Ancestral polymorphism is R, Derived polymorphism is C
  VARIANT 214: note = Ancestral polymorphism is M, Derived polymorphism is I
  VARIANT 213: note = Ancestral polymorphism is R, Derived polymorphism is G
  VARIANT 212: note = Ancestral polymorphism is A, Derived polymorphism is P
  VARIANT 211: note = Ancestral polymorphism is A, Derived polymorphism is T
  VARIANT 205: note = Ancestral polymorphism is G, Derived polymorphism is V
  VARIANT 200: note = Ancestral polymorphism is G, Derived polymorphism is S
  VARIANT 198: note = Ancestral polymorphism is R, Derived polymorphism is W
  VARIANT 195: note = Ancestral polymorphism is G, Derived polymorphism is S
  VARIANT 104: note = Ancestral polymorphism is S, Derived polymorphism is F
  VARIANT 77: note = Ancestral polymorphism is S, Derived polymorphism is L
  VARIANT 23: note = Ancestral polymorphism is R, Derived polymorphism is C
MSSELLSLLSTNLLALLAFLSPRVHPVPVPAATSNLSSSAAAAISAQVAAIAHELDATRLVPHCVSAGDGTGTTLPSELLLFLSPHALPLGRDARMGHTHMPTSVAHACFRSPSTLALLAAFATYAPHAACPRDATLAHRLVSKACEPLPRRRYLSQGPRAALSASNMGVDGRRWVRSRHDHEFLVDDVLRLAAGKIRTGLDVSGGAANFAARMRERGVTIFTTVLDNAGKPMNEFVAARGLFPLLLSPAHRFPFYDGVFDLVHVGATALAEGGSSVLG

SEQ ID NO: 3191 - protein, 146 aa, Zea mays
  VARIANT 90: note = Ancestral polymorphism is D, Derived polymorphism is G
  VARIANT 104: note = Ancestral polymorphism is K, Derived polymorphism is N
MPKNKGKGGKNRKRGKNEADDDKRELVFKEDGQEYAQVTRMLGNGRCEATCVDGTRRLCHIRGKMHKKVWIAAGDIVLVGLRDYQDDKADVILKYMNDEARLLKAYGELPETLRLNEGVDVDGPEEGEENGDYNYIQFEDEDIDKI

SEQ ID NO: 3192 - protein, 176 aa, Zea mays
  VARIANT 108: note = Ancestral polymorphism is N, Derived polymorphism is S
  VARIANT 81: note = Ancestral polymorphism is K, Derived polymorphism is M
  VARIANT 66: note = Ancestral polymorphism is A, Derived polymorphism is V
  VARIANT 44: note = Ancestral polymorphism is P, Derived polymorphism is A
  VARIANT 18: note = Ancestral polymorphism is A, Derived polymorphism is T
MAAAVPLLQLLILPLLVASAAGGGGGGEKSTHMKLYWHDVVSGPSPTAVQVARAAVTNTSKTAFGAVVVIDDPLTEGPDLKSSKPLGRAQGTYIGAGKDELSLMMSMNFVFQAGKYNGSTVAIMGRNAVFDAVREMAVVGGTGAFRMARGYAQARTHALDLNTGDATVEYNLYIKH

SEQ ID NO: 3193 - protein, 201 aa, Zea mays
  VARIANT 25: note = Ancestral polymorphism is P, Derived polymorphism is L
  VARIANT 27: note = Ancestral polymorphism is A, Derived polymorphism is V
  VARIANT 36: note = Ancestral polymorphism is Q, Derived polymorphism is H
  VARIANT 43: note = Ancestral polymorphism is E, Derived polymorphism is K
  VARIANT 49: note = Ancestral polymorphism is R, Derived polymorphism is C
  VARIANT 72: note = Ancestral polymorphism is L, Derived polymorphism is F
  VARIANT 76: note = Ancestral polymorphism is V, Derived polymorphism is I
  VARIANT 85: note = Ancestral polymorphism is A, Derived polymorphism is T
  VARIANT 87: note = Ancestral polymorphism is A, Derived polymorphism is V
  VARIANT 88: note = Ancestral polymorphism is A, Derived polymorphism is T
  VARIANT 91: note = Ancestral polymorphism is A, Derived polymorphism is T
  VARIANT 101: note = Ancestral polymorphism is S, Derived polymorphism is L
  VARIANT 105: note = Ancestral polymorphism is G, Derived polymorphism is V
  VARIANT 137: note = Ancestral polymorphism is D, Derived polymorphism is Y
  VARIANT 155..201: note = Derived polymorphism lacks residues 155 to 201
  VARIANT 166: note = Ancestral polymorphism is Y, Derived polymorphism is N
  VARIANT 173: note = Ancestral polymorphism is N, Derived polymorphism is S
MQATNAVACYYLCVSINKLNFIQLPVASFLLKLHKQLRFAEAESESARRRSWLHHALLLLLILVAFAAVAGLLQGVGRGGGGASAPAASPADAIQMDAQVSTHCGVPYTASLLAFDPVQRLLAVATLDARIKIFGGDNIEGLLISSKSVPYKFLQVWNLEFRQLFNSSQWDVSITAFAVIERTFMMYLGDENGLLSVLKYV

SEQ ID NO: 3194 - protein, 604 aa, Zea mays
  VARIANT 157: note = Ancestral polymorphism is T, Derived polymorphism is A
MLPSSGSGWGRGRGRHLLLSRALALAALLALASASESDHKYKTEEPVKLWVNKVGPYNNPQETYNYYSLPFCQPSENPTHKWGGLGEVLGGNELIDSQLEIKFLKNVEKGFICTLELDAKKVQQFADAIESSYWFEFFIGFVGESDKNSENKHYLYTHKNILVKYNDNRIIHVNLTQESPKLLEDGKKLEMTYSVKWVATDVSFARRFEVYLDYPFFEHQIHWFSIFNSFMMVIFLTGLVSMILMRTLRNDYAKYAREDDDLESLERDVNEESGWKLVHGDVFRPPRSLMFLSALVGIGTQLAALILLVIVLAIVGMLYIGILITKFPDRGMGTWRGAIITTFIVCYALTSFISGYVSGGLYSRSGGKNWIKAMVLTASLFPFLCFSIGFALNTIAIFYRSLAAIPFGTMVVMFVLWAFISFPLVLLGTVVGRNWSGAPNNPCRVKTIPRPIPEKKWYLTPSVISLMGGLLPFGSIFIEMYFVFTSFWNYKVYYVYGFMLLVFVILLIVTICVTIVGTYFLLNAENYHWQWTSFSSAASTALYVYLYSIYYYHVKTKMSGFFQTSFYFGYTLMFCLGLGILCGAIGYLGSTLFVRRIYRNIKCD

SEQ ID NO: 3195 - protein, 185 aa, Zea mays
  VARIANT 168..185: note = Derived polymorphism lacks residues 168 to 185
  VARIANT 153: note = Ancestral polymorphism is G, Derived polymorphism is D
  VARIANT 136..185: note = Derived polymorphism lacks residues 136 to 185
  VARIANT 108: note = Ancestral polymorphism is P, Derived polymorphism is S
  VARIANT 82: note = Ancestral polymorphism is P, Derived polymorphism is S
  VARIANT 54: note = Ancestral polymorphism is R, Derived polymorphism is C
  VARIANT 37: note = Ancestral polymorphism is V, Derived polymorphism is D
MTKKEANKLLPDGEPQDSGISLQTILELGPTIPIFGVCMGLQCIGEAFGGKIIRAPSRVMHGKSSPVYYDEELGNALFNGLSNLWYVLLSKAFRVDAALAPFASMDNPFTAVRYHSLVIEQETFPHDALEATAWTEDGLIMAARHKKYKHIQGVQFHPESIITLEGKKIVLNFVRFIEELEKQRS

SEQ ID NO: 3196 - protein, 262 aa, Zea mays
  VARIANT 188: note = Ancestral polymorphism is R, Derived polymorphism is H
MDKYWEETQRYLEYEELSIYLEAQEDAMSCYDSSSPDGSISHSSSSAAACGNKNILMERDRRRKLNDKLYALRSVVPNITKMDKASIIKDAIEYIQQLQVEERRVLQELRVLDDDTAAAATAQVECCDVDGGLLRREAERAKKMKRAQSVASGAQSAPPPPPPPHVEVLELRVSEVGDHVLVVSVTCRKRRDAMARVCRAIEDLRLRVITANVTSVAGCHVHTVFVEVDKIDHIQVKNMIEAALTLLDAPGSPHSSMSYYET

SEQ ID NO: 3197 - protein, 58 aa, Zea mays
  VARIANT 18: note = Ancestral polymorphism is S, Derived polymorphism is R
MDKANKLSAGAGEKATKSRSHGSTALFVAVDYAFLLAFAGFLAYLVGSRILPSAAGSA

SEQ ID NO: 3198 - protein, 177 aa, Zea mays
  VARIANT 129: note = Ancestral polymorphism is A, Derived polymorphism is T
  VARIANT 69: note = Ancestral polymorphism is Y, Derived polymorphism is C
MAAEVAGGGAVGAPSSSPRRVVVAVDESEESMHALSWCLSNVVSAGKAAVAPPPSVVLVHARSPRPLYYPTIDGTGERCKQVVDCMEQYMASAADTVVTKAKTICTAFPDVRVETCVEKGDPRDVICGAAEKAGADMLVMGSHGYGFLQWALMGSVSNHCVQNCKCPVVVVKRPDSA

SEQ ID NO: 3199 - protein, 293 aa, Zea mays
  VARIANT 136..293: note = Derived polymorphism lacks residues 136 to 293
  VARIANT 256: note = Ancestral polymorphism is C, Derived polymorphism is Y
MHPQQPGPRISALIVPSHTIAQWAPTVDTVSSPPPPWSILRSRFPHARCACLLPPRPPHLPPALALALAAVTISRRYGATPGRDSLLSIESRFLIPGWVSFGSRSIVQQQHGNYVIARRSIQFISTAKNTAGHGHRPKKKVYHREPGLDRAMDLQKKPALLLCLRDLILAQKTGSLLVRDLEKEVGFVQKWNFLSLIERHPNIFHVSGGSASQEPISVTLTEKARKISSEEAEARELMEPILVRNLRKLLMMSMDCQIPLDKIELIQSELGLPNNFKRNLIPRYPDFFFQSVM

SEQ ID NO: 3200 - protein, 471 aa, Zea mays
  VARIANT 374: note = Ancestral polymorphism is A, Derived polymorphism is V
MAPPPAGLVLVALLALVLALALAPAPARGDKPARGGASSSIAAGAETEPSSAVFPLYGDVYPHGLYYVAMNIGNPPKPYFLDVDSGSDLTWLQCDAPCRSCNEVPHPLYRPTKSKLVPCVHRLCASLHNGLTGKHRCDSPHEQCDYVIKYADQGSSTGVLINDSFALRLTNGSVARPSVAFGCGYDQQVRSGDLSSPTDGVLGLGTGSVSLLSQLKQRGVTKNVVGHCLSLRGGGFLFFGDDLVPYQRATWTPMARSAFRNYYSPGSASLYFGDRSLGVRLAKVVFDSGSSFTYFAAKPYQALVTALKDGLSRTLEEEPDTSLPLCWKGQEPFKSVLDVRKEFKSLVLNFASGKKTLMEIPPENYLIVTENGNACLGILNGSEIGLKDLSIIGDITMQDHMVIYDNEKGKIGWIRAPCDRAPNDINTVHGFEEGYCWPQFLPGIIGLPNEDCPAYYRSNKERFAKAQGGGR

SEQ ID NO: 3201 - protein, 66 aa, Zea mays
  VARIANT 53: note = Ancestral polymorphism is K, Derived polymorphism is M
MAAMGMAKVLLLLVLFVQIINVLTVSASARPFKAEAEAGTTTIQMVVDMFGDKKQSGSNSHTHCCN

SEQ ID NO: 3202 - protein, 130 aa, Zea mays
  VARIANT 7: note = Ancestral polymorphism is M, Derived polymorphism is I
  VARIANT 8: note = Ancestral polymorphism is A, Derived polymorphism is V
  VARIANT 17: note = Ancestral polymorphism is L, Derived polymorphism is F
MAATVGMAKVLLLLVFLIQIINVLTISAAARPLKAGAGIEMVVDMFGDKKQSGSNGSSHCCNYNPRIMASMGMPKVLLLLVLFIQIINVLTISASARPFKAEAGTMIQMVVDMFGGKKQSNSNRSSHCCN

SEQ ID NO: 3203 - protein, 491 aa, Zea mays
  VARIANT 180: note = Ancestral polymorphism is P, Derived polymorphism is A
MDAEAAAAAAATAVEERERLRRSFASGRTRPAAWREAQLRGLLRMATEREDDICAALHADLAKPLTECYVHEISLVISSCKFALKNLKKWMKPRKVPGGLLTFPSAASVAAEPLGVVLVISAWNYPFLLAIDPVVGAFAAGNAVALKPSEVAPATSLLLADLLPRYVDPSCVRVVQGGIAETTALLELQWDKIFYTGNSRVGRIVMSYAAKHLTPVVLELGGKCPVVVDSDVNLHVAAKRIAAGKWGCNSGQACVSPDYVVTTKSFAPKLLESLKRVLFEFYGEEPLRSPDLSRVVNSNHFNRLMALMDDYSVSGNVAFGGQIDERRLRIAPTLLLDVPLDSAMMKEEIFGPLLPIITVDKIGESFAVINSMPKPLAAYLFSNDGQLKQQFERTVSAGGIMFNDTGIHLTNPNLPFGGVGESGMGAYHGAFSFDAFSHRKAVLDRSFLGEARARYPPYTPAKLAILRGVLNGSPLATVQAAAGCTGGASAD

SEQ ID NO: 3204 - protein, 483 aa, Zea mays
  VARIANT 389..483: note = Derived polymorphism lacks residues 389 to 483
MEKLKKIVVNRSFFIFYDEIKNRAQIKDKERIQQMEKNLVVDIEDVTISEAVFVKTFKPYGRLHTSIIETLIRIWNKSWDDRIMLSLLAVEQILGKRKDYLERELKDYDKEKKHTIFVPFIIDQHWSLVVVEPGREVITVLDSFYELRLCEKRHENLMAQLQKNLYPFIGLENATHRFITPPVVQKQNNSHDCGFHMLLYIKRYEDQNYHNISEDEVIMCRIETAMLLLNNEDNKCRDKFTESHAITKEQKKEKVRDKVDDKKGDRKDESSDDDYEDKSEEEEEEEEEGTGDNEEKGNNNGGKDKKKKSGDDKDEEDKDKSEEEEGTDDDEESFEGEKGNNNGGKDKKKKSKTKKKKTNIKDSLKVSVRSKMTKGYKPCDFKIADNWTQNLGNKELRQQLSRKIVDNKDYKSVQFMSPKSDTARRDTDTWNLTGSDIAKSFVDKTLCEDTVVTFYVQCLMYDEGQLGADEKTVFSRIFCKDDV

SEQ ID NO: 3205 - protein, 269 aa, Zea mays
  VARIANT 240: note = Ancestral polymorphism is L, Derived polymorphism is P
  VARIANT 143: note = Ancestral polymorphism is G, Derived polymorphism is S
  VARIANT 97: note = Ancestral polymorphism is A, Derived polymorphism is T
  VARIANT 94: note = Ancestral polymorphism is D, Derived polymorphism is Y
  VARIANT 77: note = Ancestral polymorphism is H, Derived polymorphism is R
  VARIANT 28: note = Ancestral polymorphism is G, Derived polymorphism is E
MEPTVHDVLAFHRVDRAAYEHLLSLGAGRHSSRDAVALLMWFHGKAGLDAVSHVRALVRTQAAAAQLVEEARAVLLHGADAETTTLLSLACGEDDDARVRRFLASCGTADAPRRGVADVLGGVGALVFDDRLHAILRRYEAGGRDGGALPGELAAPYRRRVAAEVQEEDGRSLFITFSKGFPLTRVEVEEFFTERWGGDCVARVMMEKTPAGEPPTYGRIVFRRAATAAAVLAGRPLVKLVVNGRHLWARMYVPRSASGRRQRFCDACV

SEQ ID NO: 3206 - protein, 592 aa, Zea mays
  VARIANT 119: note = Ancestral polymorphism is A, Derived polymorphism is V
MASPPPPPAAAAAPAAAASGPPPPAQVVGNAFVHQYYNILHQSPELVYRFYQESSRLGRPSGTGDDGMETVTSMDVSSSPTPPLLLSRGPDLGAPGPNSHLNGGDFGVACASDCVYVRVRLVLQAINDKIVSMGIDRAEIKAVDAQESLCGGVTVLVMGHLTGRNSVSREFVQSFFLAPQEKGYFVLNDILRYVGEEGGDEGGEQQPATEVAADVVAADVEAATPASILANGTVGGDTVTVPQDASPQPECQVAEPALNPKEEVLNREVVCNPPNDVNPIVEETPVPEVINEVPNNVGVAPPISSPSAPPEEAPKKSYASIVKVMKEYRPPAPAVPSRPAPPKTEKQSSPAPALVADAPAFTPNPQSGSFQDPEVDAHAIYVRSLPLNATPQQLEEEFKRFGAIKHDGIQVRSNKIQGFCYGFVEFEDASAVQTAIEASPVTIGERQCYVEEKRTTGGSRGKKGYAFVCVLWKATIAVVAGEEGFHQLEVVTSEVKVLEAVVHIMEAEGTEGASSIIDLIMEAEVAAGVAHRVVMSATSGSTTLVQPAVVVPGHHQPPLLSQSEFLVGYGLCFMATIIVDQKSGGCGGFEFM

SEQ ID NO: 3207 - protein, 369 aa, Zea mays
  VARIANT 69..369: note = Derived polymorphism lacks residues 69 to 369
MAAASTKTANIPATMRAVQYDSCGGGAAGLKAEKYSLCFENRSFVFLQRNQSTEFQIPLMQHVEVPVPSAKKNELLLKLEAASINPVDWKVQKGMLRPFLPRKLPFIPVTDVAGVVADVGPGINGFQAGDQVVAMLNSFNGGGLAEYAVASENLTVKRPPEVSAAEGAGLPIAAGTALQALRTIGAKFDGTGKPMNVLVTAASGGVGLYAVQLAKRAGLHVTATCGARNVELVKSLGADEVLDYRTPEGATLQSPSGKKYDGVVHCTVGTSWSTFEPVLAATGKVIDITPNLTAILKSALHSVTFARKRLVPLLLSPNKADLEFLVGLLKDGKLETLIDSRFPLSEVSKAWEKSIEGHATGKIIVEMGD

SEQ ID NO: 3208 - protein, 392 aa, Zea mays
  VARIANT 336: note = Ancestral polymorphism is R, Derived polymorphism is S
  VARIANT 337: note = Ancestral polymorphism is W, Derived polymorphism is C
MALRASPVSHGTAAAPLPPFARRRMARGVVVAMASTINRVKTVKEPYTPPREVHRQITHSLPPQKREIFDSLQPWAKDNLLNLLKPVEKSWQPQDFLPEPSSDGFYDEVKELRERANEIPDEYFVCLVGDMVTEEALPTYQTMLNTLDGVRDETGASPTTWAVWTRAWTAEENRHGDLLNKYMYLTGRVDMKQIEKTIQYLIGSGMDPGTENNPYLGFLYTSFQERATFVSHGNTARHAKEYGDLKLAQICGTIAADEKRHETAYTKIVEKLFEMDPDYTVLAFADMMRKKITMPAHLMYDGKDDNLFEHFSAVAQRLGVYTAKDYADILEFLVQRWKVAELTGLSGEGRSAQDFVCTLAPRIRRLDDRAQARAKQAPVIPFSWVYDRKVQL

SEQ ID NO: 3209 - protein, 322 aa, Zea mays
  VARIANT 4: note = Ancestral polymorphism is H, Derived polymorphism is D
  VARIANT 259: note = Ancestral polymorphism is V, Derived polymorphism is I
MAIHYLLRRGVSGGSLLHPIRGLFLASKELGRRPLGSAAAGDAAAELRGAREDVRQLLKATSCHPILVRLGWHDAGTYDKNITEWPKCGGANGSLRFEVELKHGANAGLVNALKLIQPIKDKFSGVTYADLFQLASATAIEEAGGPKIPMIYGRVDVIAPEQCPPEGRLPAAGPPSPAEHLREVFYRMGLNDKEIVALSGAHTLGRARPERSGWGKSETKYTKDGPGAPGGQSWTSHWLKFDNSYFKAIEERRDDHLLVLPTDAVLFEDSSFKSHDDFSYLEIYATKYAKDQDTFFEDYAEAHAKLSNLGAKFDPPKGISLE

SEQ ID NO: 3210 - protein, 366 aa, Zea mays
  VARIANT 203: note = Ancestral polymorphism is K, Derived polymorphism is E
  VARIANT 119..366: note = Derived polymorphism lacks residues 119 to 366
  VARIANT 96: note = Ancestral polymorphism is L, Derived polymorphism is S
  VARIANT 54: note = Ancestral polymorphism is D, Derived polymorphism is Y
  VARIANT 53: note = Ancestral polymorphism is R, Derived polymorphism is I
  VARIANT 41: note = Ancestral polymorphism is S, Derived polymorphism is N
  VARIANT 24: note = Ancestral polymorphism is D, Derived polymorphism is G
MAVTSEITGPMVVEDVVYENADGDQGSMSEKMFRRLIFGRSSGLVQSEALLIRDPPSDEMQPQLFQRQFVYLLGHDRCVIIYMGSSQNCKHHLIYSDNRKNNNNKYLEYKSPSDLLNVGTATGSKNSLRIDHKFLGSSYHSSIISGLSLVASSLSAAASSGEKVSITVVGLGAGCFPMFLRGCLPFVDIEVVELDPLVAELAKKYFGFSMDEQLKVHLGDGIKFIEDSVAANQSVNGSTRNAFKILILDVDSSDLSSGLSCPPENFVEDPFLLIAKEFLLEGGLFVINLVSRSTSVRETVVSRLKAVFEHLYSLQLEEDINEVLFASPSGRYLEINDISAGASKLQDLLKIPVDVESDIQKLQKLQ

SEQ ID NO: 3211 - protein, 183 aa, Zea mays
  VARIANT 100: note = Ancestral polymorphism is D, Derived polymorphism is G
  VARIANT 89: note = Ancestral polymorphism is T, Derived polymorphism is I
  VARIANT 51: note = Ancestral polymorphism is A, Derived polymorphism is D
MATTTPPTAILGTLVDFTSRENWDKFFALRGTGDSFEWYAEWPNLRAPLLDLLGDRGAAAGAAQEILVPACGSSVLSEKLYDAGFCRVTNVDFSRVVVADMLRRHARARPEMRWRVMDMTDMQLLVTGIILIWDIGDGSFDVILDKGGLDALMEPEAGTKLGIKYLNEDALGSGKANFVNFDQ

SEQ ID NO: 3212 - protein, 312 aa, Zea mays
  VARIANT 67: note = Ancestral polymorphism is P, Derived polymorphism is L
MSESNVDSILISVSNDERRNRAYAKISEDEPRHTRMRSLKNKALHASARLTHSLKKRGKRKVDYKVPRIAIEDVRDAEEEQATNSFQFLKARKFDFEKAAQMWADMLQWRKEFGTDTRAGKTLARLQGIWLNALLLLCLCAFPASARSQNTTMAMAAPASVEGFNCTANRTYPCQAYALYRAGFAGVPLDLAAIDDLFAVSRFMVAHTNNLSTTAAPANGSYAPMRYQIGLGDTYWIVSTTKLQNLTHYQAMERVNPTLVPTDLDVGTMVTFPVFCQCPATADNATTLVTYVMQPVDTYVSVAAAFSVAYPQ

SEQ ID NO: 3213 - protein, 212 aa, Zea mays
  VARIANT 75..212: note = Derived polymorphism lacks residues 75 to 212
MYSDQISTGRKRSIHDRLDGDLPAGTGAGGRVRHTVSKRQRQIDEKWKHDLYREDDEPASKSIDPKDLRLKLQRRSSQQSFTSTRSSGVRDLREKLSGIMHPQPSNADPKPKPKPVSEVVNISRRQTADEMPARQSKRAPKQTSLKKTSQPKVESPLSSFLSSLGLEKYSITFQAEEVDMAALRHMTESDLKALGIPMGPRKKIILALEPRA

SEQ ID NO: 3214 - protein, 185 aa, Zea mays
  VARIANT 129: note = Ancestral polymorphism is T, Derived polymorphism is M
MLSVQTYSLTFNVSVSVSIYPLKSIFWRTEAIQVEHSDYHNISHMASFVGFQPFTREKEWCRDMLLFPVVLKACDCVHGCRDDSWFTANRGRVRRRKHPTEATTDGNRANGQPLLVNDLNKYKSMLTHTYSTVWMIRGFAFIIYMGHLYIWAMVVVIQIYMARELFNLLRKSSEEKQLPGFRVLN

SEQ ID NO: 3215 - protein, 343 aa, Zea mays
  VARIANT 333: note = Ancestral polymorphism is R, Derived polymorphism is W
MANSAAPGGMRSFLQAVSTVTEEAPTPLRVVQMEGLAVLKIIKHCEEFAPALVTGQLLGLDVGSVLEVTNCFPFPIREEDDEADADGANYQLEMMRCLREVNVDNNTIGWYQSCLLGSFQTVELIETFMNYQESIRRCVCIVYDPSRSSQGVLALKALKLTDSFMDLYRNNGLTGEKLREKKLSWVDIFEEIPIKVSNSALVSAFMKELEPESPVTQCDLDRLKLSTAPFMERNLEFLIGCMDDLSSEQNKFQYYNRNLSRQQSQQQAWLQKRRQENMARKAAGEEPLPEEDPSNPIFKPIPEPSRLEGYLVTNQISSYCNHINGVAGQNFDRLYLMKALHED

SEQ ID NO: 3216 - protein, 351 aa, Zea mays
  VARIANT 313: note = Ancestral polymorphism is V, Derived polymorphism is D
  VARIANT 194..351: note = Derived polymorphism lacks residues 194 to 351
  VARIANT 153..351: note = Derived polymorphism lacks residues 153 to 351
  VARIANT 147..351: note = Derived polymorphism lacks residues 147 to 351
  VARIANT 143..351: note = Derived polymorphism lacks residues 143 to 351
  VARIANT 134..351: note = Derived polymorphism lacks residues 134 to 351
  VARIANT 91: note = Ancestral polymorphism is Y, Derived polymorphism is D
  VARIANT 86: note = Ancestral polymorphism is D, Derived polymorphism is Y
  VARIANT 74..351: note = Derived polymorphism lacks residues 74 to 351
  VARIANT 11..351: note = Derived polymorphism lacks residues 11 to 351
MQPTYTCNGTQMIAGLTGALSVAFRGNNALLYRRENPLSLRCSFRSLKARNNHSSTVAPKDYCETYIQFLRDKQIVPDSDPPSPKDVDLFYQFIDKSKRLMVVTGAGMSTESGIPDYRSPNGAYSTGFKPLSHQEFVRSIRAQRRYWARSYAGWRRFRRAQPNAAHYALASLERIGRVHSMVTQNVDRYRESFQEEVKNLNLKWAQAIDSLEVGQPGSGKSFGMQQRPDGDVEIDEKFWEQDFEIPSCHQCGGVLKPDVVMFGDNVPQERAESAKEAARTCDALLVVGSALMTMSAFRLARLAHEANAPIAAVSIGETRADSILSLKINARCGEILPRILQMGSLVVPDVN

SEQ ID NO: 3217 - protein, 223 aa, Zea mays
  VARIANT 30: note = Ancestral polymorphism is V, Derived polymorphism is G
  VARIANT 189: note = Ancestral polymorphism is T, Derived polymorphism is M
MSCFDKITRWSVVGIQVVTKCPSGINPLSVHSSTGALLSHILEPLYLSTITIGQLPDGTPERFSIKNNIKKALDARLSSLPTELPPPFKMQKPKVFEAPVPPTEFQQIPGDVRLLTCGYSICWNKSGLHEVVLGTTGRKQGTSSKAAHLPSTESLLCKKRLLEAFVSLEHPLVGQLKCEELSYRALKDTAHEYHHALELLRKAPFFGCWRAKPTFVDSFAVSR

SEQ ID NO: 3218 - protein, 221 aa, Zea mays
  VARIANT 27: note = Ancestral polymorphism is L, Derived polymorphism is P
  VARIANT 40: note = Ancestral polymorphism is A, Derived polymorphism is V
  VARIANT 74: note = Ancestral polymorphism is A, Derived polymorphism is V
  VARIANT 100: note = Ancestral polymorphism is T, Derived polymorphism is M
  VARIANT 104: note = Ancestral polymorphism is G, Derived polymorphism is D
  VARIANT 124: note = Ancestral polymorphism is G, Derived polymorphism is D
  VARIANT 203..221: note = Derived polymorphism lacks residues 203 to 221
MAALDAGLPAEAVRHFTKILEARHGVLPHPFAAACLVGRAAAFQAGGRPADAIADCNRSLALDLAYIPALRAHADLLQSVGAVADCLRDLDHLKLLYDATLRDGKLPGPRWWPQGGVRYCEIAGAYRKLTARIQGLRGRVAAGEACNIDYYLLLGVRRGCPRSELERAHLLLSLKLKPDRAVVFGERLELMDEHRDLEAVRDQACMSALLLYRMLQKGKIY

SEQ ID NO: 3219 - protein, 484 aa, Zea mays
  VARIANT 9: note = Ancestral polymorphism is L, Derived polymorphism is F
  VARIANT 171: note = Ancestral polymorphism is S, Derived polymorphism is F
  VARIANT 173: note = Ancestral polymorphism is V, Derived polymorphism is A
MSASATLRLAIIAMAVAVSHSLAASAPAPRDARDREGPPASTTVRAGFYLAAAARLRPLDRLDASLYTHLYYSALAVHPTTHKLVLPTDPNQAGLLATFCPTLKSKNRALKTMLSVGTPGIAAGADSRADPAFAAMAADPASRAAFGAAAVALASDSGFDGLDVAWWFPASAVEMANFGFLVSEWRAAAPPGFLLTATVYFSNHVFDAPRPGVDYPSEAVARCLDWVNVVAFGLHPLAAGAANATAFDAPLYDRASHFSASYGVVSWIDAGVPASKVVMGLPLYARSWFLRNKANSGVGAPVVAAGPKQRGSNATGVMSYAEVQKIAAAGGGGRRAVTTTFDNASVASYLSIGDVWVAFDGAAVVAEKLAFAAQRGLLGYFLWPVNYDDANLAVSRSALDAWMKNEISSNLKNDTGLRQTQGPVRLPPALQSPAGTPGPAPAPTSGSRSWLPWTKLDAFLRFGCANSCVLLVVTSLIWSCIWDY

SEQ ID NO: 3220 - protein, 553 aa, Zea mays
  VARIANT 30: note = Ancestral polymorphism is V, Derived polymorphism is D
  VARIANT 63: note = Ancestral polymorphism is P, Derived polymorphism is L
  VARIANT 202..553: note = Derived polymorphism lacks residues 202 to 553
MAHEAAIVIDQLAGDSPSVKAVLLLLLVPVLLLWVLLRYFSSGATTNSTKGKKKLPPSPPALPLIGHLHLVGAHPHVSMRGLAARHGGEDLMLLRLGTVPTLVASSPRAAQAVLRTHDQSLASRPRSIFGDILGYGPSDVGFAPYGEGWRQAKKLVTTHLLNTKKVQSYRAAREEEVGVVIDKIRRAAMTGAAVDLSEVLSSFTTDMVCRAVAGRSFRVDGLDKVFKDVMDASMAVLGGFNLENFYPGLAKVAGGVLMWPGRRKAERLRDRWDEVLDKVIDQHASEAAAGGPPATRRLESDFTHVLLAAQEEYGLTRDGIKGIMADMFAAGTDTAYLVLEFTMAELMQHQDVMARLQAEVRSSMPAKGHHQGQGAITEEYLAGMPYLKAVVKETLRLHPPSPLLLPHQSLEECAIDGYVVPAGTTVFVNVWAIGRDPRLWDAAEEFMPERFVVDKGATATAAEGVVDFRGTDFQFLPFGSGRRMCPGMNFALANVEIMLANLVCHFDWRVEGGANDIDMTEVFGLTVHRKEKLVLAPRLWSCSCAAAQPPMEG

SEQ ID NO: 3221 - protein, 326 aa, Zea mays
  VARIANT 92: note = Ancestral polymorphism is A, Derived polymorphism is T
MATAAATAAAAAVSSPAARGAAGAAAASRRGFVTFGGGAARFSPTLRSGRGFSGVQTHVAAVEQAVVKDATKLEAPVVVVTGASRGIGKATALALGKAGCKVLVNYARSSKEAEEVSKEMLTLSFLQIEASGGEAITFGGDVSKEADVESMMKAALDKWGTIDVLVNNAGITRDTLLMRMKKSQWQDVIDLNLTGVFLCTQAATKVMMKKRKGKIINIASVVGLTGNVGQANYSAAKAGVIGFTKTVAREYASRNINVNAIAPGFIASDMTAELGEELEKKILSTIPLGRYGQPEEVAGLVEFLALNPAASYMTGQVLTIDGGMVM

SEQ ID NO: 3222 - protein, 66 aa, Zea mays
  VARIANT 18: note = Ancestral polymorphism is S, Derived polymorphism is I
  VARIANT 20: note = Ancestral polymorphism is T, Derived polymorphism is M
MKLIKHPNVVQLHEVMASRTKIYMVLEFVDGGELFDKISENLLLDSNGALKVSDFGLCAFAPQTNV

SEQ ID NO: 3223 - protein, 315 aa, Zea mays
  VARIANT 23: note = Ancestral polymorphism is Y, Derived polymorphism is C
  VARIANT 32..315: note = Derived polymorphism lacks residues 32 to 315
  VARIANT 96..315: note = Derived polymorphism lacks residues 96 to 315
  VARIANT 149: note = Ancestral polymorphism is G, Derived polymorphism is S
  VARIANT 156: note = Ancestral polymorphism is G, Derived polymorphism is R
MGRPGPQKHAHIARLAEVLAVPYISMGALLRQELNPASQLYRKVGGSCSPVRYEKLENFCKLMDFVIDSAPPELRQEAHFSMVDRMKHRVEKSAFWGHLLRHVMQQGRRTWEFFDLLLSPASKILNTWFESEVLKATLATDAVIGAMTGVHTPGSGYVLLHHVMGETGGQRGVWAYASCFDSLRRLLFLLNLLVSMLGLGLNEEVRPNMDSKTKFSDVKGVDEAKAELEEIVHYLRDPKAALEEILYQFEEKLQAEREEAARKQEELQAQLQAQQAALEENQSLLRQAQEEVKGMHTKFEETNELLRAVLKLQKD

SEQ ID NO: 3224 - protein, 278 aa, Zea mays
  VARIANT 46..278: note = Derived polymorphism lacks residues 46 to 278
  VARIANT 97..278: note = Derived polymorphism lacks residues 97 to 278
MPRYSLLSRHIEATVVPRYNTEERGRKSSVRSGARSSSRVRAAAREWGSCWAVAGKKEPERQMAVAGKKEPENEPTGGEAAGALAGRGGDKELVDCWSWKSAMERVSSALEMDEAASTDQSSRLTKRRAKVWDYVDTEVVDGKEKAVCKYCKVHLSSAVGKGTTHLNRHIFVYCHAIPQEERQMFLATQKTKPGDDHVFDPVVFHGLIAKYFLSAEISFRKCEDPSWKEMIIYYQPSFRLVGRQTVRSDCVLLYEEEKLQLIEQFTKLKSHVSLTADL

SEQ ID NO: 3225 - protein, 209 aa, Zea mays
  VARIANT 54: note = Ancestral polymorphism is S, Derived polymorphism is R
MRKKETAFAETEEHRAPRTQKNPMDGLSMHTDVGTAPTDVGTSGQEPQSWQRKSMGNPKGKEEAEEEEAAKSWLAWECRVAYPLMSCLACLSDLGRSAAANAGSGRCCHHEALELLLRSIAISHEWGDGRTGDRDDGAGVCQCAPAPRTVVVYRLRRACMCRSARVQCRAGSARELSLLLAEGGASYLMIGACRNGWLLVVEHGRMAVR

SEQ ID NO: 3226 - protein, 85 aa, Zea mays
  VARIANT 55: note = Ancestral polymorphism is P, Derived polymorphism is S
  VARIANT 46: note = Ancestral polymorphism is R, Derived polymorphism is M
  VARIANT 43: note = Ancestral polymorphism is V, Derived polymorphism is I
  VARIANT 6: note = Ancestral polymorphism is E, Derived polymorphism is K
  VARIANT 3: note = Ancestral polymorphism is V, Derived polymorphism is F
MKFWSELLCALWDSSSVAKMLLLTISTKSYELGSLDCLEQMIIHEMTITRWIPQSCREQQDKPCKEETNRDRQRQKSCREVLSNE

SEQ ID NO: 3227 - protein, 223 aa, Zea mays
  VARIANT 16: note = Ancestral polymorphism is G, Derived polymorphism is D
  VARIANT 31: note = Ancestral polymorphism is T, Derived polymorphism is I
  VARIANT 40: note = Ancestral polymorphism is K, Derived polymorphism is E
  VARIANT 43: note = Ancestral polymorphism is N, Derived polymorphism is S
  VARIANT 50: note = Ancestral polymorphism is L, Derived polymorphism is M
  VARIANT 109..223: note = Derived polymorphism lacks residues 109 to 223
MCCFIFIFFSFDLIQGGTTYVHCKAGRGRSTTIVLCYLIKYKNMTPEAALDHVRSIRPRVLLTPLQWHAISSFGALTSGQLPIQSTNLACFLEAIEAGCTNTGNDTVVQQDNIDKENDSATKLDVSSSMEKPSGHGPEESILESDVIKQGMSSDDMTKEKDLNTGEATESKKCIGDVPIECDKHGDSEPLSMEGKIISGNVNVKNQILREHLKEAFKNFGTVR

SEQ ID NO: 3228 - protein, 373 aa, Zea mays
  VARIANT 189: note = Ancestral polymorphism is G, Derived polymorphism is R
  VARIANT 44: note = Ancestral polymorphism is R, Derived polymorphism is L
  VARIANT 40: note = Ancestral polymorphism is A, Derived polymorphism is D
MKTRRGACYSCHAAPGEGPEVQRRKRRRTAAEASPAAAEDPGVRLGARDMFEDLPDDLVVSILRDVAASAGSPADLAGAMLTCKRFRELVARSKVVVLARASPRCLSVRAKAWSDEAHRFLQRCADAGNLEACYLLGMIRFYCLGSRGSGAALMAAAAVGGHREALYSLAVIQFNGSGGGKDDRDLRAGAALCARAAARGHVDALRELGHCLQDGYGVRRSVLDGRRLLIQANARELAAASVAHPCLLMSDLGCRAGEAHAANRFLVDWFASRPLGLTPGGNGNGSAGTAGSPEEDGVGGLRLCSQALCGRPETRRHEFRRCSVCGVVNYCSRACQALHWRMAHKAECTPMDRWLDAVQPNAIANADAAAPAP

SEQ ID NO: 3229 - protein, 345 aa, Zea mays
  VARIANT 212: note = Ancestral polymorphism is S, Derived polymorphism is F
  VARIANT 125..345: note = Derived polymorphism lacks residues 125 to 345
MASISEPAAREKPIVVRVKRKPSQNRPDAFWLEINERPAKKAAIDFSRLSISEPSSSSASVKASEEPRVKKILVQHIETVHHSEAVEDVLQSLLLVDSNSKETKSKTKEWNDRIKQDKKPEQLRSAARQRHEDMGRNARFAQIWKSRKGEKADAGDSLREICHLYDAVQVDPDDEKHPAEPRQVFFTIYQAIWNVELYCFMFPYNIHCRITSFEEGAVLCNFLPLIREYLPSTAEEIEADIISLAQSEDSEVYDIYTVKEVDDTMEATSAASYPRLQVDDGEDECYEDCPYDTDDSNAEDNPLFDYPDESSEDEDDGRNDEDPFGDKEGSDSDYEKEEVEVEEDE

SEQ ID NO: 3230 - protein, 169 aa, Zea mays
  VARIANT 140..169: note = Derived polymorphism lacks residues 140 to 169
  VARIANT 95: note = Ancestral polymorphism is D, Derived polymorphism is A
  VARIANT 88..169: note = Derived polymorphism lacks residues 88 to 169
  VARIANT 37..169: note = Derived polymorphism lacks residues 37 to 169
  VARIANT 11: note = Ancestral polymorphism is P, Derived polymorphism is L
  VARIANT 9: note = Ancestral polymorphism is E, Derived polymorphism is K
MSGNYLFGEVLRGVSRLAGLQTLVLDDNMLGGEVPTWIGAQPSLAVLSLRNNTFQGVVPESLGSAPSLRSLVLASNNLSGNLPDMSQQANLQVLDVGGNSLEPAFPKLGRKVVTVVLARNRFVAFLQNPQLVQEFRPDKQYNIHMLQERYQVLNRLATLHGLDIQKVTM

SEQ ID NO: 3231 - protein, 121 aa, Zea mays
  VARIANT 61: note = Ancestral polymorphism is E, Derived polymorphism is D
  VARIANT 78: note = Ancestral polymorphism is I, Derived polymorphism is V
MVTAIAVASAGLGMLAGVAMANRSSPPSAGAALWRPGGGPALRWGGGAPRCEACGGSGKEDCRLCARWSDAGARGKKISRSGCGACAGTRRTPCRCCGGSGTGRRAPVRIATSARTAPTGR

SEQ ID NO: 3232 - protein, 115 aa, Zea mays
  VARIANT 75: note = Ancestral polymorphism is T, Derived polymorphism is K
MVGLGPIVLAASAGLGALVGQAAADGGWCSAWRPPPPLAGAGGGARGSYCAACGGTGKVACPCARWSDGDVGCRTCAGSGRAACRSCRGSGTRRRAAVRVAVRAQRALVAVTKDR

SEQ ID NO: 3233 - protein, 287 aa, Zea mays
  VARIANT 99..287: note = Derived polymorphism lacks residues 99 to 287
  VARIANT 31..287: note = Derived polymorphism lacks residues 31 to 287
MKVLFLRLGFSGVADLKIRRSEWGGALVAPRRSGSLSARISAALSGGLVLAPPAVEEKVEVNSAIFPKGPPVPLPVQKMATHIDTTEVSRGPDDLPGYWVVTGAKLCMEGGKVALKEADGKKIQIQLTGFMEKNTVKFMKELWSLLLSAQQNASGVPQQFLDEKEAEIHQKKLCKGVGFVHGRGVLHRDLKPHNLLMDRKTMALKIADLGLSRAITVPVKKYTHEILTLWYRAPEVLLGATHYSMPVDIWYVGCIFAELVTNQPLFPGDSELQQLLHIFKLLGTPNE

SEQ ID NO: 3234 - protein, 184 aa, Zea mays
  VARIANT 74: note = Ancestral polymorphism is V, Derived polymorphism is A
  VARIANT 139: note = Ancestral polymorphism is G, Derived polymorphism is C
  VARIANT 151: note = Ancestral polymorphism is Y, Derived polymorphism is H
  VARIANT 160: note = Ancestral polymorphism is R, Derived polymorphism is C
MACRALALRFLLLPDPLHRLPATPPSVGRASGSRGGRRPHLRCSSGGGGGEPGQPPQEAVLEAISKIARSKGRVALTTNVVMGGTVMDDASDEWLALDQKVNSYPTDRGFTAIGIGGDDFVQSMVVAVESVLQESIPKGRVSQKLSSGGKYVSVKIGPIRVVSSEQVQAVYRAMRRDNRMKYFL

SEQ ID NO: 3235 - protein, 174 aa, Zea mays
  VARIANT 4..174: note = Ancestral polymorphism lacks residues 4 to 174
  VARIANT 34: note = Ancestral polymorphism is Q, Derived polymorphism is H
  VARIANT 40: note = Ancestral polymorphism is S, Derived polymorphism is N
  VARIANT 60: note = Ancestral polymorphism is A, Derived polymorphism is D
  VARIANT 105..174: note = Derived polymorphism lacks residues 105 to 174
  VARIANT 120..174: note = Derived polymorphism lacks residues 120 to 174
MIVRVGARLNFTDDNSANSRADAIQRNYGGSCVQMRLSFSSLAPLFLYFIQWLDYGCCYALPSYLGLFHILTCKVYADGDSSVSTYERRASLREFYAIIYPILQQLESSLIERDLKGKGRCKDIVSRRRMEDWKQVSSRDVEREDECRICMEACTKMVLPNCSHAMCIKCYRYW

SEQ ID NO: 3236 - protein, 160 aa, Zea mays
  VARIANT 6: note = Ancestral polymorphism is S, Derived polymorphism is G
  VARIANT 14: note = Ancestral polymorphism is E, Derived polymorphism is Q
  VARIANT 16: note = Ancestral polymorphism is D, Derived polymorphism is N
  VARIANT 24: note = Ancestral polymorphism is P, Derived polymorphism is L
  VARIANT 29: note = Ancestral polymorphism is D, Derived polymorphism is A
  VARIANT 38: note = Ancestral polymorphism is R, Derived polymorphism is I
  VARIANT 67: note = Ancestral polymorphism is P, Derived polymorphism is R
  VARIANT 76: note = Ancestral polymorphism is T, Derived polymorphism is I
  VARIANT 77: note = Ancestral polymorphism is D, Derived polymorphism is N
  VARIANT 89: note = Ancestral polymorphism is G, Derived polymorphism is D
  VARIANT 93: note = Ancestral polymorphism is P, Derived polymorphism is R
  VARIANT 94: note = Ancestral polymorphism is T, Derived polymorphism is I
  VARIANT 95: note = Ancestral polymorphism is D, Derived polymorphism is Y
  VARIANT 104: note = Ancestral polymorphism is S, Derived polymorphism is F
  VARIANT 105..160: note = Derived polymorphism lacks residues 105 to 160
  VARIANT 109..160: note = Derived polymorphism lacks residues 109 to 160
  VARIANT 121: note = Ancestral polymorphism is L, Derived polymorphism is F
  VARIANT 126: note = Ancestral polymorphism is G, Derived polymorphism is D
MNAVVSQTMSLLRERDLQLIRDIPDEIKDASAYGDQFRIQQVLADFLLSMAQSAPSENGWVEIQVRPNVKQNYDGTDTELFIFTFACPGEGLPTDIVQDMFSNSQWSTQEGVGLSTCRKILKLMGGEVQYIRESERSFFLIVLELPQPRLAAGRENQLIC

SEQ ID NO: 3237 - protein, 444 aa, Zea mays
  VARIANT 287..444: note = Derived polymorphism lacks residues 287 to 444
MARSPCDLRLLLLAAAAAFIYIQVRLFATQSHYADRLAEAERSENQCTSQLKSLIDQVSMQQEKIVALEEIKVRQDEERAHLRILIKDLEKRSVQKLLDKNVVPVAAVVIMACNRPDYLERTVESILKYQTSVASKFPLFISQDGANGAVKNKALEYKQITYMQHVDLEPVQTERPGELTAYYKIAKHYKWALDNLFIKHNFARVIILEDDMEIAPDFFDYFEAAAKLLDNDKTIMAVSSWNDNGQKQFVNDPKALYRSDFFPGLGWMLTKSTWIELSPKWPKAYPYWDDWVRLKEVHGHRQFIRPEICRTYNFGKHGSSLGQFFEQYLEPIKLNDVHIDWNSEDLSYLGEDKFSTKFGKEVASATPLRGSDAVLKAHNMAEDVRIQYDDQEGFEQIARQFGIFEEWKDGIPRTAYKGVVVFRYNSSQRRIFLVSPDSLRQLGV

SEQ ID NO: 3238 - protein, 159 aa, Zea mays
  VARIANT 38: note = Ancestral polymorphism is L, Derived polymorphism is P
  VARIANT 31: note = Ancestral polymorphism is Q, Derived polymorphism is P
MSRCKPVGGESPAADGPDPRRPMSETPCSVQPGVVPLLGKPYFTCILCKSHVNQPFQVVVPKSLAPFLPGTTVPATVTWHGRSWEMRFTGGRQIQRLEAGWRGFALDNGLKLGDGCVFELVDGRAERVVFRVQVLRADIPAEIRERAGGYTSSSPILID

SEQ ID NO: 3239 - protein, 1003 aa, Zea mays
  VARIANT 214..1003: note = Derived polymorphism lacks residues 214 to 1003
  VARIANT 334..1003: note = Derived polymorphism lacks residues 334 to 1003
  VARIANT 594..1003: note = Derived polymorphism lacks residues 594 to 1003
  VARIANT 611..1003: note = Derived polymorphism lacks residues 611 to 1003
MSQSFDINVLREEARSRWLKPSEVYYILQNHERFPITHEAPKKPPSGSLFLYNRRVNRYFRRDGHTWRRKKDGRTVGEAHERLKVGNVDALSCYYAHGEQNPSFQRRCFWMLEPAYEHIVLVQYREVDVVRNYSSQLSNGLPEPLSSLGYPNAICGNQYHSSSSGASECSESHQSYSNLSSVTEVSSYSGNKEYTKNDGGLLSIPEVGHTCLQQNRTDNGNSKNKSGLNIALKKIAEQLSLGEDDDDYIFSNQAHSVGGKTRKCVELADSSIFVNKVKLVYWPYSGDNQVKHIQQEGTQKGLSRNIAPSWEDVLQSSSGLPISSIYQQSDVEYQKNSEYHPPERLDSSDLRIQLAAAKKFLLGPEATVDSPSLNSVLRNRANCVTDTISAYDSRFGSSLNPDWQTKTALTFQSNSQGSEITELFDHGHFEHYSREDTTFSLGQTNKFNIREISPEWAFSYEITKVIITGDFLCNPSNLGWAVMFGDSEVPAKVVQPGVLLCHTPLHCSGNLRICITSGNREVCSEFKDFEFRSKPSSSFTDIAPSSRHLKSSEELLILAKFARMLLSGNGNPEVPDGDPQSGQCPKLKMDEGLWDRLIEELKVGCESPLSSVDWILEELLKSKLQKWLSVKLRGFNGTDSISKHDQGIIHLISALGYEWALSSVLSVGVGLNFRDSNGWTALHWAAYFGREKMVAALLAAGASATAVTDPTAQDPVGKTAAFLASEQGHTGLAGYLSEVSLTSYLASLTIEESDVSKGSAEVEAERAVESISQRSVQLHGGTEDELSMKDSLAAVRNAAQAAAHIQNAFRAFSFRKRQQKTARLRDEYGMTQEDIDQLAAASRSYHQAHASNGQFYDKAAVSIQKKYKGWKGRKHFLNMRRNAVKIQAHVRGHQVRKKYRTIVSTVSVLEKVILRWRRKGHGLRGFRAEQQSMVEAIEEDDEEDDDFDDDEAVKIFRRQKVDQAVKEAVSRVLSMVDSTEARMQYRRMLEEFRQATNWKDQMK

SEQ ID NO: 3240 - protein, 172 aa, Zea mays
  VARIANT 136: note = Ancestral polymorphism is S, Derived polymorphism is A
  VARIANT 127: note = Ancestral polymorphism is E, Derived polymorphism is D
  VARIANT 107: note = Ancestral polymorphism is S, Derived polymorphism is C
  VARIANT 5: note = Ancestral polymorphism is A, Derived polymorphism is T
  VARIANT 2: note = Ancestral polymorphism is A, Derived polymorphism is T
  VARIANT 1: note = Ancestral polymorphism is M, Derived polymorphism is L
MASEAARRRQEMAEEGQRHLEETIAASFQILVSMNDELCNAGLWSSSSVSATAAAGYQHHHSATLPTPHSVDSDAADAGGAPSPGGSLDEARHRYKSAVAALRASISAVSSCAQDIGSTESEADHAEIERLEEHASALRKEIESKNKQVKLLIDQLRDLIADIAMWQSPCSV

SEQ ID NO: 3241 - protein, 592 aa, Zea mays
  VARIANT 24..592: note = Derived polymorphism lacks residues 24 to 592
  VARIANT 26..592: note = Derived polymorphism lacks residues 26 to 592
  VARIANT 111..592: note = Derived polymorphism lacks residues 111 to 592
MGALGDRLRAFSTNRWLVFVAAMWLQSMAGIGYLFGAISPVIKAALGYNQRQVAALGVAKDLGDCVGFLAGSLSAVLPSWAMLLIGSAQNFLGYGWLWLIVTRQAPALPLWMMCVLIYVGTNGETFFNTTALVTCIQNFPKSRGQTVGIMKGFAGLSSAILTQLYAVMHTPDHATLVFMVAVGPSLVALGLMFIIRPVGGHRQVRPSDKNSFLFIYTICLLLASYLVGVMLVQDFMQLSDNVVGILTVLLLILLVLPIMIPVTLTLSSKTQHPIEEALLFESSKGETSTSQEKEDQPEVILSEVEEEKPKDIDSLPPSERRKRIAELQTKLVQAAARGGVRIRRKPHRGENFTLMQALVKADFWLIWCSLLLGSGSGLTVIDNLGQMSQAVGFKDVHIFVSLTSIWNFLGRVGGGYFSEIIIREHAYPRHIALVIAQILMAVGHFLFAMAWPRTMYIGTFLVGLGYGAHWAIVPAAVSELFGVKHFGAMYNFLTVANPTGSLIFSGLIASNLYDYEAEKQAQGHQITALTSPRLLHNMGFLADGPLKCEGAVCFFVSSLIMSAFCVVGAGLSLMVVYRTKRVYTQLYRSNRT

SEQ ID NO: 3242 - protein, 1025 aa, Zea mays
  VARIANT 197: note = Ancestral polymorphism is R, Derived polymorphism is W
MGLFRAASGLARLALRRNLLRAAASPFAAGGGAVPGAAPARYFHSTCPRRFAAPTPRAVPLSRLTDSFLDGTSSVYLEELQRAWEADPSSVDESWDNFFRNFVGQAATTSPGLSGQTIQESMRLLLLVRAYQVSGHLKAKLDPLGLEERPVPDVLDPAFYGFSEADLDREFFLGVWMMAGFLSENRPVQTLRSVLERLEQAYCGTIGYEYMHIPDREKCNWLRDRIETVNPMDYTYDRRQVMLDRLIWSTQFESFLATKWTTAKRFGLEGAETLIPGMKEMFDRAAHLGVESIVIGMPHRGRLNVLGNVVRKPLRQIFSEFSGGTKPVNEGEGLYTGTGDVKYHLGTSYDRPTRGGKHIHLSLVANPSHLEAVDPVVAGKTRAKQYYSNDRDRTKNLGVLLHGDGSFSGQGVVYETLHLSALENYTTGGTIHIVVNNQVAFTTDPRSGRSSQYCTDVAKALDAPIFHVNGDDLEAVVHVCELAAEWRQTFHSDVVVDIVCYRRFGHNEIDEPSFTQPKMYKVIRNHPSALEIYQRKLLESGKISKEDIDRLNKKVSTILNEEFQNSKDYVPNKRDWLSAYWTGFKSPEQISRIRNTGVKPEILKRVGEAMTTLPENFKPHRAVKKIFDLRRQMIETGEGIDWAVGEALAFATLIIEGNHVRLSGQDVERGTFSHRHSVIHDQETGEQYCPLDHLVMNQDAELFTVSNSSLSEFAVLGFELGYSMENPNSLVLWEAQFGDFSNGAQVIFDQFLSSGESKWLRQTGLVVCLPHGYDGQGPEHSSARLERFLQMSDDNPYVIPEMDPTLRKQIQQCNWQVVNVTTPANYFHVLRRQIHRDFRKPLIVMSPKNLLRHKDCKSNLSEFDDLAGHPGFDKQGTRFKRLIKDQNNHKDLEEGINRLVLCSGKVYYELDEERRKSERTDVAICRVEQLCPFPYDLIQRELKRYPNAEIVWCQEEPMNMGAYSYINPRLLTAMKVLGRGGIEDIKYVGRAPSAATATGFYSVHVQEQTELVQKALQRDPLNYPF

SEQ ID NO: 3243 - protein, 121 aa, Zea mays
  VARIANT 87: note = Ancestral polymorphism is R, Derived polymorphism is H
  VARIANT 64: note = Ancestral polymorphism is P, Derived polymorphism is S
  VARIANT 60..121: note = Derived polymorphism lacks residues 60 to 121
  VARIANT 58..121: note = Derived polymorphism lacks residues 58 to 121
  VARIANT 53: note = Ancestral polymorphism is H, Derived polymorphism is L
  VARIANT 33: note = Ancestral polymorphism is W, Derived polymorphism is C
  VARIANT 19: note = Ancestral polymorphism is A, Derived polymorphism is S
  VARIANT 18: note = Ancestral polymorphism is V, Derived polymorphism is M
  VARIANT 11: note = Ancestral polymorphism is V, Derived polymorphism is I
MSLRFGSFPIVVGSSVEVAEVLLKTQDLANVDWPRMACGKHTVYNYSGMLWSHYGPYWRQLRKSWVTELLSARQLRLTERVRAEEVRAIIVLTPPVVRALSPLEDRNLCSVASHEHVPSMY

SEQ ID NO: 3244 - protein, 367 aa, Zea mays
  VARIANT 121..367: note = Derived polymorphism lacks residues 121 to 367
  VARIANT 53: note = Ancestral polymorphism is R, Derived polymorphism is W
  VARIANT 32: note = Ancestral polymorphism is I, Derived polymorphism is K
  VARIANT 29: note = Ancestral polymorphism is T, Derived polymorphism is M
  VARIANT 21..367: note = Derived polymorphism lacks residues 21 to 367
MLVLDFNITSANGKIYLFALQLLKNILRTHEIRLPSDCELSHDCIDLCRKLLWLNSVERLTVEEFVHHPFLSEDAPERTLSRTLSEIRDGFPINNISPTRPSSQSSQEDCMPFPLDDESSGQDEGPIPDSKSPMKSYGFPTGKRLDKTSCQSPSKHTSLFSRYVLGNNHAPSSQHHGHIDKMTKESKIHEVQGPKGVYPEDFPIIDSLEFVDQEYVFVSGPHPEGSSSSTNASQQLNLPAKYDNLSVSPPKLTFLSAPKPINGLPINRQQSAGTGSFDSHYSPASVTSQGSADISDAMDQPPTDYLTRIRLLEQYASAIAGLVRDENVDKYADQLTKNELSSPPKKMKHTQVSKGMPDSTCSKNDNI

SEQ ID NO: 3245 - protein, 145 aa, Zea mays
  VARIANT 108: note = Ancestral polymorphism is R, Derived polymorphism is L
MGQPRTELLALAFLLVALAAAVAAAATEVVDAAPAPARTRTTTAGCRRGDLVVRQRATGRVVEGKPEYAVEVRNACRCAQSRVLLRCYGLSSVEAVDPRAIRAVDGERCLLRGGRALAPRGGAVRFTYAWMTPQDFPLLSSRPHC

SEQ ID NO: 3246 - protein, 151 aa, Zea mays
  VARIANT 99..151: note = Derived polymorphism lacks residues 99 to 151
  VARIANT 81..151: note = Derived polymorphism lacks residues 81 to 151
  VARIANT 67..151: note = Derived polymorphism lacks residues 67 to 151
  VARIANT 46..151: note = Derived polymorphism lacks residues 46 to 151
  VARIANT 26: note = Ancestral polymorphism is S, Derived polymorphism is L
MQAPAGRGSCRATGRRRWWMMPASRLRPYYRRVVPDDSAQQDPHAQGLRDCRMRLSVGVAREFLALQDRLGFDKASKTLNWLLAQSKPPIDCLVDAADQVTEADNEEFEAKYRGSDYEKTDLKDLYTKYKGNMNRNNYLLYHIVKSETVLL

SEQ ID NO: 3247 - protein, 201 aa, Zea mays
  VARIANT 181: note = Ancestral polymorphism is D, Derived polymorphism is N
  VARIANT 170..201: note = Derived polymorphism lacks residues 170 to 201
  VARIANT 138: note = Ancestral polymorphism is I, Derived polymorphism is V
  VARIANT 106: note = Ancestral polymorphism is A, Derived polymorphism is T
  VARIANT 101: note = Ancestral polymorphism is D, Derived polymorphism is G
  VARIANT 91: note = Ancestral polymorphism is S, Derived polymorphism is I
  VARIANT 67: note = Ancestral polymorphism is P, Derived polymorphism is L
  VARIANT 58: note = Ancestral polymorphism is G, Derived polymorphism is S
  VARIANT 50: note = Ancestral polymorphism is T, Derived polymorphism is I
  VARIANT 46: note = Ancestral polymorphism is D, Derived polymorphism is G
  VARIANT 45: note = Ancestral polymorphism is E, Derived polymorphism is K
  VARIANT 37: note = Ancestral polymorphism is C, Derived polymorphism is R
  VARIANT 34: note = Ancestral polymorphism is N, Derived polymorphism is K
MVDGAFCVTKAMQHELAQNWGIRLGNSICSAMGNAKCISVEEVWEDMNITVFASKIDGEVFLKSNRPALFKYDKGNKPLAHIFRTPDEDFSILLEAVLMYDRRVAAALGEDVSTDEEQLWIDIKNGKQFVYPRLLFIITGKGPDRKKYEDQIKRLKLRRVALRTMWLASEDYPLLLGMLANFTSVCTLVAQNLPNLMGTRA

SEQ ID NO: 3248 - protein, 207 aa, Zea mays
  VARIANT 185: note = Ancestral polymorphism is I, Derived polymorphism is T
  VARIANT 177..207: note = Derived polymorphism lacks residues 177 to 207
  VARIANT 175: note = Ancestral polymorphism is R, Derived polymorphism is P
  VARIANT 170: note = Ancestral polymorphism is V, Derived polymorphism is M
  VARIANT 147: note = Ancestral polymorphism is S, Derived polymorphism is L
  VARIANT 99: note = Ancestral polymorphism is G, Derived polymorphism is R
  VARIANT 59: note = Ancestral polymorphism is P, Derived polymorphism is L
  VARIANT 46: note = Ancestral polymorphism is P, Derived polymorphism is Q
  VARIANT 11: note = Ancestral polymorphism is H, Derived polymorphism is Y
MAFKSTVNRTHLQLVREVEAIGGNVSASASREQMSYTYDALKSYTPEMVEVLIDSVRNPAFLDWEVKEQLQNIKSEIADVSANPQGLLLEALHSVGYSGALAKPLMASESAVNRLDVSSLEEFVAEHYTAPRMVLAASGVDHDALISVVEPLLSDLPCVKRPEEPKYVYVGGDYRCQADSPNTYIALAFEVPGGWNQEKTAMVVTVL

SEQ ID NO: 3249 - protein, 226 aa, Zea mays
  VARIANT 178: note = Ancestral polymorphism is P, Derived polymorphism is A
  VARIANT 173: note = Ancestral polymorphism is G, Derived polymorphism is R
  VARIANT 159: note = Ancestral polymorphism is R, Derived polymorphism is W
  VARIANT 148: note = Ancestral polymorphism is T, Derived polymorphism is M
  VARIANT 137: note = Ancestral polymorphism is A, Derived polymorphism is V
  VARIANT 120..226: note = Derived polymorphism lacks residues 120 to 226
  VARIANT 103: note = Ancestral polymorphism is G, Derived polymorphism is D
  VARIANT 101: note = Ancestral polymorphism is E, Derived polymorphism is K
  VARIANT 42: note = Ancestral polymorphism is A, Derived polymorphism is V
  VARIANT 36: note = Ancestral polymorphism is G, Derived polymorphism is R
  VARIANT 23: note = Ancestral polymorphism is R, Derived polymorphism is Q
  VARIANT 5..226: note = Derived polymorphism lacks residues 5 to 226
MRARQMTARLALDEVTDTGAFDRSPSTFRSSVSRDGRFPAMAGRYHLYVSYACPWASRCLAFLKLKGLDHAIDVMVVKPIFERTKESDEHLGWVFPAADEEPDAEPDPLNGAWSVRELYEIASSNYAGKPTVPCSIAFRVLWDKQLKMVVNNESSEIIRMLNAEFNGIARNPRLDLYPAHLRASIDEANELVYDAINNGVYKCGFAKKKDGCVLVQDLGSLTSIHD

SEQ ID NO: 3250 - protein, 424 aa, Zea mays
  VARIANT 42..424: note = Derived polymorphism lacks residues 42 to 424
  VARIANT 92..424: note = Derived polymorphism lacks residues 92 to 424
  VARIANT 94: note = Ancestral polymorphism is D, Derived polymorphism is N
  VARIANT 196: note = Ancestral polymorphism is G, Derived polymorphism is R
  VARIANT 220: note = Ancestral polymorphism is F, Derived polymorphism is L
  VARIANT 227..424: note = Ancestral polymorphism lacks residues 227 to 424
MGLGSSKATAMGSGRRQAVLLHLRRRAHTFPFIPSVPFPPPSPDQAGLVLPVTGVSALPPPPHLPGHGPPRQRRPPGDIPSPYATSLFPPGRWDLGAARPPQWDLRATKGPPPSSATISYLPFPPLRPLPTTITPPSGPTAARPAGGRFCSANSSPSSWTCPTIDGVRWRLTLWRYRPPCNALVRNHSFMLLLGVGTDVIRFDLSPRSKMCCYNWLGVKFSFALCNENNFHTFYFLEQENNLGLSFKYPIFYMSTQGNCETHGARVPGKFDEDERVQVLTIVKKDEPADDIVDRINPRIVAGHRWSGKYEAHLWDSSCRVEGRRRKGKQDMITEEALPTYQTMLNTLDGVRDETGNTAYRAKDFGDLKLTQICGIIASNEKRHETVYTKIMEKLFEIDPDGTVVALANMMDLMGRTTSYLNTSP

SEQ ID NO: 3251 - protein, 366 aa, Zea mays
  VARIANT 1: note = Ancestral polymorphism is T, Derived polymorphism is M
  VARIANT 56..366: note = Derived polymorphism lacks residues 56 to 366
  VARIANT 58: note = Ancestral polymorphism is A, Derived polymorphism is V
  VARIANT 109: note = Ancestral polymorphism is T, Derived polymorphism is I
  VARIANT 132: note = Ancestral polymorphism is I, Derived polymorphism is N
  VARIANT 271: note = Ancestral polymorphism is A, Derived polymorphism is T
  VARIANT 284: note = Ancestral polymorphism is V, Derived polymorphism is E
  VARIANT 288: note = Ancestral polymorphism is M, Derived polymorphism is T
  VARIANT 302: note = Ancestral polymorphism is L, Derived polymorphism is Q
  VARIANT 314: note = Ancestral polymorphism is A, Derived polymorphism is T
  VARIANT 323: note = Ancestral polymorphism is A, Derived polymorphism is P
MLRVRGMRVADTRTRAGLGRRARLASAAAVLNACDPDEAAIEAGLQSALPEPPSEQDAVIVLNMAIATRPEIVVLARRWFLGNAEVQKKVILYNVELKLLRKKQHWCETEAPWAKMLRHGMQPDNTIFSTINSCACAYGLLSKVVKWFDKMSGFGCSPDWLTYSAVIDTYDHTGNFEAALRRARAEKWQLDPVLCCTVNEVHSTSGNFNRALNLFKEMKATGVNPNLVMCNTRLYVMGHALQPWVVKSIHREMIDKQVQHNKVTYCCLLHAYTRAHYDEDAMAVYRLMKDEAMDVMLYNMLLSRYVDIGYVDEAEEIFRDMKASMDDRSKPDKWSYSSMLRQYSSTANVLGVEGILNEMVEELGKL

SEQ ID NO: 3252 - protein, 321 aa, Zea mays
  VARIANT 255: note = Ancestral polymorphism is S, Derived polymorphism is N
  VARIANT 236: note = Ancestral polymorphism is L, Derived polymorphism is S
  VARIANT 218: note = Ancestral polymorphism is G, Derived polymorphism is C
  VARIANT 211..321: note = Derived polymorphism lacks residues 211 to 321
  VARIANT 198: note = Ancestral polymorphism is N, Derived polymorphism is K
  VARIANT 196: note = Ancestral polymorphism is V, Derived polymorphism is D
  VARIANT 188: note = Ancestral polymorphism is T, Derived polymorphism is I
  VARIANT 187: note = Ancestral polymorphism is F, Derived polymorphism is L
  VARIANT 185: note = Ancestral polymorphism is L, Derived polymorphism is Q
  VARIANT 181: note = Ancestral polymorphism is C, Derived polymorphism is Y
  VARIANT 180: note = Ancestral polymorphism is R, Derived polymorphism is C
  VARIANT 136: note = Ancestral polymorphism is K, Derived polymorphism is N
  VARIANT 63..321: note = Derived polymorphism lacks residues 63 to 321
MGKDRPERSVRYLGSKKHQSLPAPKFKRTQLLRLLRNKSKNNKGRKKLLKLVDTGFVATVEVLAILRQVPALPELMTGTGASDDELRKKLDNKLKTCSIITEKEKENEKEEEEENGNEKSKETGNETEYEKVKNIKLVHIDYILEKAETGIQFVGNVMRSSSQIRRAHCWFPCVDSARERCPFDLEFTVSMDFIAVSNGDLLYQKVSISAQWISLVVGALEVLPDRNDINVSHICLSPALAKLQNTIAFFHNAYSCYDDYLSAPFPLGLYKHIFLPSEMTILPASLGASTCILSSGILHDEKVIDQKKVHLHRTKHLLLNC

SEQ ID NO: 3253 - protein, 241 aa, Zea mays
  VARIANT 19: note = Ancestral polymorphism is D, Derived polymorphism is N
  VARIANT 74: note = Ancestral polymorphism is G, Derived polymorphism is E
MTPTASLLLPAPPFVSISDVRRLQLPPRGGHRPRPCWKGLECGSVQTRMVSSFVAVGSRTRRRNVICASLFGVGAPEALVIGVVALLVFGPKGLAEVARNLGKTLRAFQPTIREIQDVSREFRSTLEREIGIDEVSQSTNYTPTTMNNNQQPAADSNIKPAPAPYTSDELVKVTEEQIAASAAAAWNPQQPASSQQQAEVYTTPSEDAPTSGGSDGPAAPALAASDSDPKQVNLDKAETQR

SEQ ID NO: 3254 - protein, 573 aa, Zea mays
  VARIANT 355..573: note = Derived polymorphism lacks residues 355 to 573
  VARIANT 222: note = Ancestral polymorphism is S, Derived polymorphism is L
  VARIANT 150: note = Ancestral polymorphism is C, Derived polymorphism is S
  VARIANT 56: note = Ancestral polymorphism is V, Derived polymorphism is A
MTYFPGEVVEHIFSFLPSHSDRNTVSLVCKLWYDVERLSRRGVFVGNCYAVLPERVVLRFPNVKALTVKGKPHFADFNLVPPDWGGYAGPWIEATARSCLSLEELRMKRMVISDENLELLARTFPKFKVLVLISCEGFSTDGLAAIANHCKLLRELDLQENDVEDRGPRWLSFPDSCTSLVSLNFACIKGEVNSGALERLVAKSPNLRSLRLNRSVSVDTLSKILERTPNLEDLGTGNLTDEFQAESFVRLTSALEKCKRLRNLSGFWDASPIFVPFIYPLCHQLTGLNLSYTPTLDYSDLTKMISRCVKLQRLWVLDCISDKGLQVVASSCKDLQELRVFPSEFNVAGAFTVTEEGLVAISSGCPKLSSLLYFCHQMTNEALTTVAKNCPSFIRFRLCILEPKKPDAMTGQPLDEGFGAIVRDCKGLRRLSMSGLLTDRVFMYIRMYAKYLEMLSIAFAGDGDKGMMDVMNGCKNLRKLEIRDSPFGDFALLGNVAKYDTMRSLWMSSCNVTLKGCQVLASKMPMLNVEIMNELDGSSEMENHGNLSKVDKLYVYRTTAGVRDDAPNFVQIL

SEQ ID NO: 3255 - protein, 163 aa, Zea mays
  VARIANT 47: note = Ancestral polymorphism is D, Derived polymorphism is A
  VARIANT 48: note = Ancestral polymorphism is L, Derived polymorphism is H
  VARIANT 49: note = Ancestral polymorphism is I, Derived polymorphism is M
  VARIANT 51: note = Ancestral polymorphism is A, Derived polymorphism is S
  VARIANT 58..163: note = Derived polymorphism lacks residues 58 to 163
  VARIANT 60..163: note = Derived polymorphism lacks residues 60 to 163
  VARIANT 64: note = Ancestral polymorphism is W, Derived polymorphism is L
  VARIANT 80: note = Ancestral polymorphism is C, Derived polymorphism is Y
  VARIANT 84: note = Ancestral polymorphism is G, Derived polymorphism is E
  VARIANT 85..163: note = Derived polymorphism lacks residues 85 to 163
  VARIANT 87: note = Ancestral polymorphism is G, Derived polymorphism is D
  VARIANT 89..163: note = Derived polymorphism lacks residues 89 to 163
  VARIANT 90: note = Ancestral polymorphism is A, Derived polymorphism is T
  VARIANT 107: note = Ancestral polymorphism is G, Derived polymorphism is R
  VARIANT 142: note = Ancestral polymorphism is K, Derived polymorphism is E
MCACRWGEQSDDVFDALAGDFMKPRIQEVDQLLKLGVNVTVYSGQVDLIWATKGTMDWVQKLKLDGLNSFMSSPRTPIYCNKEGQSDTQAFVKSYKNLNFYWILEAGHMGNGGAYGKGISSLFNFDSFFIDLLHFSVHIKRKRFKCFLHNVPLPVFMLMATMD

SEQ ID NO: 3256 - protein, 360 aa, Zea mays
  VARIANT 8: note = Ancestral polymorphism is C, Derived polymorphism is F
  VARIANT 10: note = Ancestral polymorphism is T, Derived polymorphism is I
  VARIANT 11: note = Ancestral polymorphism is W, Derived polymorphism is R
  VARIANT 14: note = Ancestral polymorphism is A, Derived polymorphism is T
  VARIANT 71: note = Ancestral polymorphism is S, Derived polymorphism is Y
  VARIANT 115..360: note = Derived polymorphism lacks residues 115 to 360
  VARIANT 142..360: note = Derived polymorphism lacks residues 142 to 360
  VARIANT 172..360: note = Derived polymorphism lacks residues 172 to 360
  VARIANT 184..360: note = Derived polymorphism lacks residues 184 to 360
  VARIANT 223: note = Ancestral polymorphism is W, Derived polymorphism is G
  VARIANT 274: note = Ancestral polymorphism is P, Derived polymorphism is L
  VARIANT 280: note = Ancestral polymorphism is I, Derived polymorphism is T
  VARIANT 308: note = Ancestral polymorphism is G, Derived polymorphism is R
  VARIANT 312: note = Ancestral polymorphism is T, Derived polymorphism is M
  VARIANT 313: note = Ancestral polymorphism is P, Derived polymorphism is L
  VARIANT 323: note = Ancestral polymorphism is S, Derived polymorphism is L
MFCSAAACMTRKLAESGVHFITTVINGADLVPTFSATSVDDLRSEVIASAWLNDLRHQIEQTRILSTFYRSASALGSRLPSMANAKARVAGAGAILRPVSTGTQVVIRRARSVAQAAWTRPALQLSSWTCIGPRRRNNISTSTVTSEEIITSTGGGSESTSLLTETTTETTETVTSEAVSEVVQSSVSVAVDAVDLVDDKGDSDDDIVDHHGDEDRMTDVELWQQLESELYRKREGEEDDIAKEMAESTIAEEVGGVAGDVLSETKEVHRFYPPGKIMHILFSSSEEAVRGEEPNDDVTDGEAQSSLGIFLTPRSLYDKLRLSKMMINDHYMPIYRRNIEQLIAKLEKDSSDQIGCVRSS

SEQ ID NO: 3257 - protein, 142 aa, Zea mays
  VARIANT 38: note = Ancestral polymorphism is A, Derived polymorphism is V
MPPPHHQHGHQTVVPYPDLMQYAQLLQGGRGGGGHAEAAVQQAHRQQQQQQLMTMMGGRPGVNLPSTFSPSSSASAPQILDFSTQQLIRPGPPSPSPPRAAAMPSSSAAAAPSTPSSTTTASSPSGGAWPYGGERHRNKKDA

SEQ ID NO: 3258 - protein, 219 aa, Zea mays
  VARIANT 6..219: note = Derived polymorphism lacks residues 6 to 219
  VARIANT 24: note = Ancestral polymorphism is P, Derived polymorphism is L
  VARIANT 32: note = Ancestral polymorphism is P, Derived polymorphism is T
  VARIANT 38: note = Ancestral polymorphism is R, Derived polymorphism is W
  VARIANT 45..219: note = Derived polymorphism lacks residues 45 to 219
  VARIANT 106..219: note = Derived polymorphism lacks residues 106 to 219
MGTPSGPASTSSLSAGSGSTGLTPLSLIQKQTKQSTRRSTLWTRKRATQALVRNCRLQQRREVVKAGAHPGCVGGGEETVDGEDPRAHVHLEVPAPEVGRDLDDEQQRREGDPGPSVSSRRGEAAARAPREDRAARGPRNERSLALQQRRFWPYLMGLDEMGTLHERGLAQIFVQATKHTGVSKTCIQRSLYKRIQATNQPVSVSTLENALNSFPSMWV

SEQ ID NO: 3259 - protein, 119 aa, Zea mays
  VARIANT 83: note = Ancestral polymorphism is E, Derived polymorphism is K
  VARIANT 52..119: note = Derived polymorphism lacks residues 52 to 119
  VARIANT 43: note = Ancestral polymorphism is R, Derived polymorphism is C
  VARIANT 33: note = Ancestral polymorphism is N, Derived polymorphism is I
  VARIANT 27: note = Ancestral polymorphism is G, Derived polymorphism is C
  VARIANT 25: note = Ancestral polymorphism is S, Derived polymorphism is N
  VARIANT 17..119: note = Derived polymorphism lacks residues 17 to 119
  VARIANT 9: note = Ancestral polymorphism is A, Derived polymorphism is T
  VARIANT 7: note = Ancestral polymorphism is A, Derived polymorphism is T
MIPTYFAAAMYIDNARWDGVPFFISTGMGLMTNRYFGNYGIIRDIVHSLILQTIALFAMEPPVSLDGEDIRDEKVKVLRSNSESDMNRVGQSRCARYPNLHRNRKREGNVQFGKFGQRG

SEQ ID NO: 3260 - protein, 145 aa, Zea mays
  VARIANT 90: note = Ancestral polymorphism is T, Derived polymorphism is I
  VARIANT 88..145: note = Derived polymorphism lacks residues 88 to 145
  VARIANT 43: note = Ancestral polymorphism is L, Derived polymorphism is F
  VARIANT 41: note = Ancestral polymorphism is S, Derived polymorphism is N
  VARIANT 39: note = Ancestral polymorphism is P, Derived polymorphism is L
MRDRNELPTPRIEGEILSSSNLKAFTFNDLKNATKNFRPDSLLGEGGFGHVYKGWIDEHTLAPSRPGSGMVVAVKKLKPEGFQGHKEWLTEVDYLGQLHHKNLVKLIGYCSDGDNRLLVYEFMPKGSLENHLFRSVCFISMALLC

SEQ ID NO: 3261 - protein, 251 aa, Zea mays
  VARIANT 6: note = Ancestral polymorphism is P, Derived polymorphism is H
MARPPPAAPAPVRLRLLFENSRLLQRVQRDEGLRRCWLLLSPELDTVADLAAHVAARFRLRRTCPRGVVLSMDGFTLPPFESTCIFRDNDIIRVKQKSCRKQVGHNDVHCIRDHDIIEKMPLPVDDKILAIQDQRDGRKHQEEEAHDDHQLEENVTASHSIENNGTSSKRKWNDGVAEIPESSKGKRPKVKNSGKHIDCSKEEQRGSKKLKLSVIDIEDKKATLNHETTTTLVDQQKAEGYYLKAYASYCF

SEQ ID NO: 3262 - protein, 305 aa, Zea mays
  VARIANT 1: note = Ancestral polymorphism is M, Derived polymorphism is I
MSKKKGQKWGMNSSNKKNADIGYHAGIAGCSTEVNNHVMDIKVTENGFCAVNNRRNNEGSNIEMSSVQNIANEEKSSEPFNFESLYPLTRLPKRLPVFWTLQEGDLIAYRLVELSSMLCPELSSYRVGKVLVYDPVSLRIILVPVQEYPITTEEKENKDESDMLVDLSPYKEDGSLEIEYSSLVDVRLLKGIETCNEVGSAPAGRPVTLHKNEGNIESQKSPLVSNNTKGEERALGKSESTVWEKNGEPSDKVDLLQNGWATWKQNASTSAWSYRALRSSALGPTMAILRGKNSQSKPPNRKNSK

SEQ ID NO: 3263 - protein, 195 aa, Zea mays
  VARIANT 141: note = Ancestral polymorphism is P, Derived polymorphism is L
  VARIANT 140..195: note = Derived polymorphism lacks residues 140 to 195
  VARIANT 134: note = Ancestral polymorphism is A, Derived polymorphism is V
  VARIANT 125: note = Ancestral polymorphism is C, Derived polymorphism is Y
  VARIANT 118..195: note = Derived polymorphism lacks residues 118 to 195
  VARIANT 109: note = Ancestral polymorphism is S, Derived polymorphism is N
  VARIANT 107: note = Ancestral polymorphism is K, Derived polymorphism is Q
MPPHLRHAFSAEGVGAGASSPYSSDISLDTDQRSTSTRVFHSIHAPSFSLSSDVPFVFAAFALFFLPNLLPLPTVAAASRPTLVNADVYVFVVSFSDNEQDRLGFDKASKTLNWLLAQSKPPIDCLVDAADQVAVVTGGRPTLVTEADIEEFEAKYRGSDYEKTDLKDLYTKYKGNMNRINYLLYHIVKSETVLL

SEQ ID NO: 3264 - protein, 215 aa, Zea mays
  VARIANT 108: note = Ancestral polymorphism is F, Derived polymorphism is L
  VARIANT 170: note = Ancestral polymorphism is S, Derived polymorphism is L
MGCNGIRMASPSASGEKKTTILVARKGRLRQRYDGEYRLVAGCVPYRVDADGQTQLLMVSTPNRDDLVFPKGGWEDDEDVHEAACREALEEAGVRGAINRSALGMWVFRSKSSPVSSDSPRGACKGYIFALEVAEELEQWPEQDTHGRQWVSPADAYRLCRYDWMREALSALLDRLTEEPEPPKSPAADGLGEHAGVCMMVKATTAAADRAVALC

SEQ ID NO: 3265 - protein, 168 aa, Zea mays
  VARIANT 3: note = Ancestral polymorphism is R, Derived polymorphism is M
  VARIANT 7: note = Ancestral polymorphism is R, Derived polymorphism is C
  VARIANT 21: note = Ancestral polymorphism is A, Derived polymorphism is V
  VARIANT 22: note = Ancestral polymorphism is A, Derived polymorphism is T
  VARIANT 23: note = Ancestral polymorphism is R, Derived polymorphism is Q
  VARIANT 50: note = Ancestral polymorphism is G, Derived polymorphism is S
  VARIANT 59: note = Ancestral polymorphism is T, Derived polymorphism is M
  VARIANT 79: note = Ancestral polymorphism is V, Derived polymorphism is L
  VARIANT 81: note = Ancestral polymorphism is P, Derived polymorphism is L
  VARIANT 90: note = Ancestral polymorphism is G, Derived polymorphism is S
  VARIANT 120: note = Ancestral polymorphism is P, Derived polymorphism is L
MHMFPVCSPRMDRGDLIGSPATRQIVSNYFSIFGPVQDMRIPYQQKRMFGFVTFMYAEMVKAILSKGNPHFVCDARVLVKPYKEKGKVPGRFRKLQHAHHGGAEFAGCASPTGLLDSRDLYALLLLSGAQVFTSEVLKVVEDGLREASFEIGLDDRKVHKEMDKIYTL

SEQ ID NO: 3266 - protein, 206 aa, Zea mays
  VARIANT 19: note = Ancestral polymorphism is R, Derived polymorphism is H
  VARIANT 23..206: note = Derived polymorphism lacks residues 23 to 206
  VARIANT 115: note = Ancestral polymorphism is A, Derived polymorphism is V
  VARIANT 130: note = Ancestral polymorphism is G, Derived polymorphism is S
MRMTEKDDSYVAHVTEACHDAFRHLFGCTGSNSNQLCWLSDEEDIKMSSLIGLECLHQTLTTDLNILQLQRESQLKGLTSLSFFVNQGVSDASRDVDSKETHDRVQEGENKVFSAFGYFHKIATFEKVAGFQWKFAHVAFSKPEYLQDSDIVMNRFHVRYVFLLAKESFRKNIHCNIEGWEQHLGLEHTATTPKMSYLGNNQMNRI

SEQ ID NO: 3267 - protein, 272 aa, Zea mays
  VARIANT 47: note = Ancestral polymorphism is R, Derived polymorphism is H
MNFSSYFFSSSSSSSDKKSSSSSSKRRQQAAQPQPDANTTRYLGVRRRPWGRYAAEIRDPATKERHWLGTFDTAEEAAVAYDRAARSLRGARARTNFAYPDLPPGSSVTPYLSPDLTSGDNATQLLQPFYADPAASLAAAAAPAATNGAAGYGAAGDYASYGYSAEDMSALMEDLAIPDDLTADYGAEDAGGGSVNMPSMYSGGGGANASSGSGWCDASEFSAYGAPTTAASHGVYFEEGYVHSPLFSPMPAVDDASADGFQLGGSSSSYYY

SEQ ID NO: 3268 - protein, 453 aa, Zea mays
  VARIANT 418: note = Ancestral polymorphism is R, Derived polymorphism is W
  VARIANT 390: note = Ancestral polymorphism is L, Derived polymorphism is P
  VARIANT 386: note = Ancestral polymorphism is D, Derived polymorphism is G
  VARIANT 318: note = Ancestral polymorphism is H, Derived polymorphism is Q
  VARIANT 263: note = Ancestral polymorphism is D, Derived polymorphism is H
  VARIANT 237..453: note = Derived polymorphism lacks residues 237 to 453
  VARIANT 196..453: note = Derived polymorphism lacks residues 196 to 453
  VARIANT 121: note = Ancestral polymorphism is A, Derived polymorphism is V
  VARIANT 95..453: note = Derived polymorphism lacks residues 95 to 453
MVLQRFSWPYGGRSATFCGSFTGWRECPMGLVGAVFQVVFDLPPGVYQYRFLVDGVWRCDETKPFVRDEYGLISNEVLVENNVQPVVQPEPSIRGTNMDKGTILKTMPPEPSSQNPSMQIAVIRHVVSGILLHNTIYDVVPLSSKLTVLDTQLPVKQAFKIMHDEVCMLLCLLELLQIVHFPSMGLALVPLWDDRQGTITGMLTASDFVLILRKLQRNIQVIGNEEPISAWKEAKLQFYGGPDGAAMQRRPLIHVKDSDNLVDVALTIIRNEISSVPIFKCMADSSGVPFLNLATLQGILKFLCSKLQEEAEGCSLLHNQLLSIPIGTWSPHTGRSSSRQLRTLLLSSPLNTCLDILLQDRVSSIPIVDDNGSLRDVYSLRCMAEDSVILVYRRVPCWKFWRDCPFQLILFLYKTDARYVLSSGVRRLVVIEQSTRFVEGIISLRDVFTFLLG

SEQ ID NO: 3269 - protein, 478 aa, Zea mays
  VARIANT 344..478: note = Derived polymorphism lacks residues 344 to 478
  VARIANT 310..478: note = Derived polymorphism lacks residues 310 to 478
  VARIANT 230: note = Ancestral polymorphism is R, Derived polymorphism is C
  VARIANT 212..478: note = Derived polymorphism lacks residues 212 to 478
  VARIANT 117..478: note = Derived polymorphism lacks residues 117 to 478
MSQKVTDGRIRRARGKKLRLFVEKEVSATRQGYRSARIPLDEQAQIDMAMRNSLRDSFSTLEHDSCPPFGKSTCSASGATSCSTRKQSRLSSYYKNTQDTSRGPFDIDLEHGRTQVQPRIDVMLEKGHKEKLGIALAKWFHANDIPGRKADCPYFHSTLNLAQQPGDGVPIPREREIDGPLLDMNYADMEAHMAKFKEDWKDYGVTVMCDSWTGPTMMSIINFMIFCNGRMLHAMMREKISGELVRWNATRKPKFQHVVTMAIKKLSSSSSKASATIDQYTFFRKQAVLFGGEDAKDSALNGRASELRIQHFETDMESLEQMKNSKDRNIDPCSIMIDVAMYDEGNPIMEWIGSSRENGRKRNVVEEDIGDDFLSDSIEGGGSPTYNESGDSDSNDGGGDDEDGEPSGPCFVARTQPKLATNQYNGPGQDEQTAPLRPRSKRQKKLSIKGLYMLEKVNDLIFKHKNMAYTWTDSMARF

SEQ ID NO: 3270 - protein, 208 aa, Zea mays
  VARIANT 7: note = Ancestral polymorphism is E, Derived polymorphism is K
  VARIANT 9: note = Ancestral polymorphism is G, Derived polymorphism is R
  VARIANT 56: note = Ancestral polymorphism is G, Derived polymorphism is S
  VARIANT 172: note = Ancestral polymorphism is R, Derived polymorphism is M
MASTLAEKGRPALAPAPVPTSAVEQLLMAEAERRHGSDTVWNGEEPKWRLDQSGLGRSQANRSKGKVFTLQLKHGHGPGQQDSLLTVWLRRVQGVLHDGSFDADCTIIVEVSVLKTRIQPNDEAQQEVQTRSIPDPREVAGCLLHMLLQQSRPMLCLILLSTVYQLVTQYGRIPVYLTFCGGFWNYFSLDLQKIKLRKCLASESMEGE

SEQ ID NO: 3271 - protein, 743 aa, Zea mays
  VARIANT 521..743: note = Derived polymorphism lacks residues 521 to 743
MSLEVEKPPETTKQLKRQDSLYGDAEKVSGFKHHGSEGGWPRLLQLAFQSIGIIYGDVGTSPLYAISSTFPDGIKDQDDLLGVLSLILYTLILIPMVKYVFIVLYADDNGDGGTFALYSLISRHSKVRLIPNQQAEDAMVSNYGIEAPSPELRVAQWLKQKLESSKAAKISLFIITILGTSMVMGDGTLTPSISVLSAVSGIREKVPSLTETQVVWISVPILFALFSVQRYGTDKVGYSFAPIITLWFFLIAGIGMYNLIVHEIGVLRAFNPMYIVDYFRRNGKDGWVSLGGVILCVTGTEGMYADLSHFNIKAIQISFSTVLLPSVALCYIGQTAYLRKFPESVADTFFRSIPELMFWPTFIIAILSAIIASQAMLSGAFAILSKALSLGCFPSVQVIHTSKSYEGQVYIPEVNFLMGLASIIVTITFRTTTEIGNAYGICVVTVFSITTHLTTIVMLLVWRKNFIIVLLFYVVFSSIELVYLSSILTKFIQGGYLPFCFSLVLMALMITWHYVHVMKYWYELDHVVPANEVTTLLEKHEVRRIPGVGLLYSDLVQGITPVFPRLVQRIPSVHAVFLFMSIKHLPIPHVAPVERFLFRQVGPREHRMFRCVARYGYCDKLEESGLFKGFLMESLKTFIQDEAAFKTNSTAGDTKELTDPKVSGHDLARWVEKEKQMIDKEMERGVVYLMGEANVIAGPESSAAKKIVVDYVYAFLRKNLTEGEKVLSIPKDQLLKVGITYEI

SEQ ID NO: 3272 - protein, 505 aa, Zea mays
  VARIANT 8..505: note = Derived polymorphism lacks residues 8 to 505
MHTDTFPSNPPPMATVDCPLPSPADLDDNGFPALPSSPAACSSGFAEDFYRSGTDWSSLRAPPPLGPPRRAPGVKERGGGSAVQSSLFQAWGIEKPRRDGRGAGDSSLVQRSLFQAWGIERPQREGLGAGDSSPSSSLSGSLLARKRRRGSTEEERVAAKKPLACPFYKKIPGTPFTVDAFRYGQVEGCSAYFLSHFHHDHYGGLTKKWCHGPIYCSALTARLVKMCLSVNSDYICPLELDTEYVIEGVTVTLLEANHCPGAALIHFRLSDGKTCLHTGDFRASKTMQSHPLLQRGRVNLVYLDTTYCNPKYKFPPQEDVIDFVVRTTRRYLKKQPKTLIVVGAYSIGKENVYLAISQALEAHIYTDASRRRILYSFGWPDLSKRLCSCNQSSSLHVLPLGSINHENLKKYLETLNGRFLAVLAFRPTGWTFSEATGKHLDLIKPSSNANVTIYGVPYSEHSSFTELRDFVMFLKPQKIIPTVNVGNATSRDKMQAHFREWLKSP

SEQ ID NO: 3273 - protein, 532 aa, Zea mays
  VARIANT 163: note = Ancestral polymorphism is L, Derived polymorphism is H
MMGGRALLLLLVSALLVQIRASDPLLYEPFDEDFEGRWIVSKKDEYQGVWKHAKSDGHEDYGLLVSDKARKYAIIKELDEPVTLNDGTVVLQFEVRLQNGLECGGAYIKYIRPQDAGWDAKEFDNETPYTIMFGPDKCGSTNKVHFILKHKNPKTGKYVEHHLKFPPSVPYDKLSHVYTAILKPDNEVRILIDGEEKKKANFLSADDFEPALIPSKTIPDPDDKKPEDWDERAKIPDPDAVKPDDWDEDAPMEIVDEEATKPEGWLDDEPEEIDDPEAAKPEDWDDEEDGEWEAPKIDNPKCEEAPGCGEWKRPMKQNPAYKGKWHAPMIDNPNYKGIWKPQEIPNPEYFELDRPDFDPIAAIGIEIWTMQDGILFDNILIADDEKVATSILEKTWKPKYDVEKEKEKAEEAAAGADGLSDFQKKIFDVLYKIADIPFLAPYKTKIIDVIEKGEKQPNITIGILVSVVIVFVTVLFKILFGGKKPVAPVKPAAEAKKPKAAETDGAGSSGDKDEKEDEKDETGPRRRTRRET

SEQ ID NO: 3274 - protein, 482 aa, Zea mays
  VARIANT 132..482: note = Derived polymorphism lacks residues 132 to 482
MAPAPHNGLNNNHPVAPMDVSVEAGNAGAAEWLDDDGRPRRSGTFWTASAHIITAVIGSGVLSLAWAIAQLGWVAGPAAMLLFAFVTYYTAALLAECYRTGHPETGKRNYTYMDAVRSNLGGVKVVFCGVIQYANLVGVAIGYTIASAISMKAVRRAGCFHAHGHADPCKSSSTPYMVLFGGVQILFSQIPDFDQIWWLSIVAAVMSFTYSSIGLSLGIAQTVSNGGFKGSLTGISIGAGVTSTQKIWHTLQAFGDIAFAYSFSNILIEIQDTIKAPPPSESKVMQKATRLSVATTTVFYMLCGCMGYAAFGDNAPDNLLTGFGFYEPFWLLDVANVAIVVHLVGAYQVFCQPIFAFVERRAAAAWPDSAFVSRELRVGPFSLSVFRLTWRSAFVCVTTVVAMLLPFFGDVVGLLGAVSFWPLTVYFPVEMYIKQLRVPRGSTKWICLQTLSVSCLLVSVAAAAGSIADVIAALKVYKPFSG

SEQ ID NO: 3275 - protein, 292 aa, Zea mays
  VARIANT 249: note = Ancestral polymorphism is G, Derived polymorphism is E
  VARIANT 187..292: note = Derived polymorphism lacks residues 187 to 292
  VARIANT 126: note = Ancestral polymorphism is K, Derived polymorphism is N
  VARIANT 124..292: note = Derived polymorphism lacks residues 124 to 292
MTHMFPREGASSSSTSMSSQRSETHDDRMIAMVLSEEYAKLDGAMAKRLTNLTSIPHVPRINTYFPTYSDATMDHYRLLDRLNAYGLFEVRVSGDGNCQFRALSDQLYRSPDYHKHVRKEIVKQLKKCNTLYEGYVPMKYKKYCKKMKKSGEWGDHVTLQAAADKFAAKICLLTSFRDTCFVEIVPQYQAPQREIWLSFWSEVHYNSLYDAREKEATIDVQISQANTSLGRSTGCCFNIHAGSLLHTGGFILFDPFYHRPPNDAPYSYSMIQAYSSRCRVTMLNLSNVNRYS

SEQ ID NO: 3276 - protein, 155 aa, Zea mays
  VARIANT 142: note = Ancestral polymorphism is V, Derived polymorphism is M
  VARIANT 61: note = Ancestral polymorphism is G, Derived polymorphism is R
  VARIANT 39: note = Ancestral polymorphism is D, Derived polymorphism is E
MREAVLAHSLSATLASAHPLLLILVSPSASPNHSTHSYDYRAFLLHGGRLVPASLAIVNVGPGFRDQYHTFTAESPMPWLPSAPAPGHAHTLVEQKAVDEMVDGFGIGRMQELLGAAAGQATEIDDMYAGMLSKLEKLAREMEKSNLRVLEQVCF

SEQ ID NO: 3277 - protein, 321 aa, Zea mays
  VARIANT 254: note = Ancestral polymorphism is C, Derived polymorphism is Y
MAVQARHFSHDLAPAAGGSLFLDEYAGCVPAPARIGDDTTVLSDFPRSELAWCNYGFLPRKRPRLEAAAPAAGGDLLQDQRVGMPPAGTERLLPVPPLVDARSRAVGSGAATSTSGRVVAVGAATVVSRDIPSSWTHHHGMEIDALVRLEAERMRAALQEARRRHGRALLAAVGRAASGRLRASETGLERALHRNAELEEKARQAGAECQAWVGVARSHEAVAAGLRATLDQLRPRGAAVCVCEAEAEDARSCCFGEAPAAHANGASMPKLACKSCGSGGACVLLLPCRHLCLCRVCDEAGVDACPVCATTRNGSLHVLFS

SEQ ID NO: 3278 - protein, 717 aa, Zea mays
  VARIANT 4..717: note = Derived polymorphism lacks residues 4 to 717
  VARIANT 211..717: note = Derived polymorphism lacks residues 211 to 717
  VARIANT 378: note = Ancestral polymorphism is I, Derived polymorphism is T
  VARIANT 417: note = Ancestral polymorphism is L, Derived polymorphism is Q
  VARIANT 436..717: note = Derived polymorphism lacks residues 436 to 717
  VARIANT 493..717: note = Derived polymorphism lacks residues 493 to 717
  VARIANT 503: note = Ancestral polymorphism is I, Derived polymorphism is N
  VARIANT 510..717: note = Derived polymorphism lacks residues 510 to 717
  VARIANT 520: note = Ancestral polymorphism is R, Derived polymorphism is Q
  VARIANT 529..717: note = Derived polymorphism lacks residues 529 to 717
  VARIANT 562..717: note = Derived polymorphism lacks residues 562 to 717
  VARIANT 572..717: note = Derived polymorphism lacks residues 572 to 717
MLPKKSLSGYQKRKKRKHEDQLVESQKGALHKFFNIDVNEVEGQESDPADDHTHQDHDHEHDHNLNAEGEISEDGSMEENLVTTINAVEDSMMRENLQPLSDHEKSNDDEQDSSCLSIFDPRTWDNLDNNKRDILIEKGPVRDMNLVFPKDSIGRHFSYAYYSRNLSNGESVDRKWLVYSKHVNKVYCFCCKLFKSSKSKSLLASDGVRDWQRLSRRLKEHDSSVDHLTNMNTWNELRMRLSKHKTIDDDLQREISKERECWRQVFLRIVSAVKFLAKHNLAFRGTNDKLYQANNGNFLGIIEMMSEFDHVIQDHIRRIQNSEIHHHYLGHRIQNEITSLLADCVKQTILKVIKAAKYFSVILDCTPDVSHEEQMTMIIRCVNMSGTVPRVEEFFLEFLKVDDTSGLGLFDELKSALVSLDLNIADVRGQGYDNGSNMKGKHQGVQTRMLEINPRALYMPCACHSLNLTLCDMGKSCRQAITFFGIIQRIYRLFAKSTKRWKIFVDNVPGLTIKPWSNTRWESRIKSVQAIRYQTPQIRYALKALEEVSALDNDPSTVSDCQSLVSALENFEFLVGLVIWHDILFSINKVSKKLQSKIVSIDATLKHIEGVISYFKKYRDEGFTSSMDTARFISSELDVEPIFPTKRKGKRKKHFDEQEDEDEEIQQSAIDLFRREYFLVMIDAAIASLTSRFEQMKAFDNVFGFLFNSGNLKSLDE

SEQ ID NO: 3279 - protein, 161 aa, Zea mays
  VARIANT 128..161: note = Derived polymorphism lacks residues 128 to 161
  VARIANT 116: note = Ancestral polymorphism is R, Derived polymorphism is C
  VARIANT 108: note = Ancestral polymorphism is A, Derived polymorphism is V
  VARIANT 105: note = Ancestral polymorphism is G, Derived polymorphism is D
  VARIANT 102..161: note = Derived polymorphism lacks residues 102 to 161
  VARIANT 80: note = Ancestral polymorphism is G, Derived polymorphism is S
  VARIANT 76: note = Ancestral polymorphism is A, Derived polymorphism is V
  VARIANT 58: note = Ancestral polymorphism is D, Derived polymorphism is A
  VARIANT 46: note = Ancestral polymorphism is A, Derived polymorphism is P
  VARIANT 43: note = Ancestral polymorphism is R, Derived polymorphism is C
  VARIANT 33: note = Ancestral polymorphism is G, Derived polymorphism is D
  VARIANT 29: note = Ancestral polymorphism is V, Derived polymorphism is I
  VARIANT 27: note = Ancestral polymorphism is D, Derived polymorphism is N
  VARIANT 14: note = Ancestral polymorphism is G, Derived polymorphism is A
  VARIANT 6: note = Ancestral polymorphism is T, Derived polymorphism is M
MEQLWTIGRELAMGSQGGWGQSKEFLDLVKSIGEARSKAEEDRIIARELEHLKRRLADPDVPRRKMKELLLRLVYVEMLGHDASFCHIHAVKMTHDESLPLKRTGYRAVALFLDERHDLVILVVNTIQKDLRSDNYLVVYAALTAACRLIGEEALPCRPRL

SEQ ID NO: 3280 - protein, 163 aa, Zea mays
  VARIANT 16: note = Ancestral polymorphism is R, Derived polymorphism is H
  VARIANT 32: note = Ancestral polymorphism is S, Derived polymorphism is C
  VARIANT 42..163: note = Derived polymorphism lacks residues 42 to 163
  VARIANT 45: note = Ancestral polymorphism is S, Derived polymorphism is R
  VARIANT 50: note = Ancestral polymorphism is V, Derived polymorphism is G
  VARIANT 69: note = Ancestral polymorphism is L, Derived polymorphism is V
  VARIANT 91: note = Ancestral polymorphism is Q, Derived polymorphism is R
  VARIANT 97: note = Ancestral polymorphism is R, Derived polymorphism is G
  VARIANT 98: note = Ancestral polymorphism is A, Derived polymorphism is V
  VARIANT 113: note = Ancestral polymorphism is R, Derived polymorphism is M
  VARIANT 120: note = Ancestral polymorphism is A, Derived polymorphism is V
  VARIANT 133: note = Ancestral polymorphism is V, Derived polymorphism is A
  VARIANT 135: note = Ancestral polymorphism is V, Derived polymorphism is A
  VARIANT 136: note = Ancestral polymorphism is V, Derived polymorphism is G
  VARIANT 142..163: note = Derived polymorphism lacks residues 142 to 163
  VARIANT 144: note = Ancestral polymorphism is G, Derived polymorphism is E
MFPFPPSLSSPLLSTRRPPLVLVSLFTSSSGSETPSSLSSFRVFSQSFSVSARIRAGELGKPRGDMDGLPRELCVKIFHLLDHQSLASSPQVYRKWRALTSDDELWRKLFNDRWGADAAAFYAPEGSKSWKDVFAVQDRCDRYGLGVRIIREGKDYYLIMVIF

SEQ ID NO: 3281 - protein, 46 aa, Zea mays
  VARIANT 2: note = Ancestral polymorphism is P, Derived polymorphism is A
  VARIANT 18: note = Ancestral polymorphism is A, Derived polymorphism is T
MPAYFRFLAPLAFKIFYAEQVDVAVLEVGLGGKFDATNVVCDVLFQ

SEQ ID NO: 3282 - protein, 228 aa, Zea mays
  VARIANT 29: note = Ancestral polymorphism is G, Derived polymorphism is R
  VARIANT 43: note = Ancestral polymorphism is D, Derived polymorphism is H
  VARIANT 46: note = Ancestral polymorphism is K, Derived polymorphism is N
  VARIANT 50..228: note = Derived polymorphism lacks residues 50 to 228
  VARIANT 57: note = Ancestral polymorphism is S, Derived polymorphism is F
  VARIANT 75: note = Ancestral polymorphism is T, Derived polymorphism is I
  VARIANT 91: note = Ancestral polymorphism is G, Derived polymorphism is E
  VARIANT 101: note = Ancestral polymorphism is K, Derived polymorphism is M
  VARIANT 107: note = Ancestral polymorphism is R, Derived polymorphism is W
  VARIANT 114: note = Ancestral polymorphism is F, Derived polymorphism is L
  VARIANT 169: note = Ancestral polymorphism is R, Derived polymorphism is K
  VARIANT 175: note = Ancestral polymorphism is N, Derived polymorphism is D
  VARIANT 196: note = Ancestral polymorphism is Y, Derived polymorphism is H
  VARIANT 202..228: note = Derived polymorphism lacks residues 202 to 228
  VARIANT 203: note = Ancestral polymorphism is F, Derived polymorphism is C
  VARIANT 207..228: note = Derived polymorphism lacks residues 207 to 228
MRVTIIAPESLSCHIEVSENTMEAPTSTGPPSAEAAEMGLLRDLHKAIKQTELVLISVNPTIQSIRNYEKSSSTTGTVYGGYDSPKLTYSGHVKMWQGSNKKFRTRRPPCLLFFYLISLLFFLLLKHEASLKRDDKVQYQLHVAEMEAVSVAMPPVYVNHGNDGGPAVKDIHMENFSVTIDLIQEATLTIVFGRHYGEYFVLFDRFQFVDSSGLMTIASLHPEAMRKE

SEQ ID NO: 3283 - protein, 309 aa, Zea mays
  VARIANT 141: note = Ancestral polymorphism is T, Derived polymorphism is M
  VARIANT 152: note = Ancestral polymorphism is R, Derived polymorphism is G
  VARIANT 153: note = Ancestral polymorphism is R, Derived polymorphism is L
  VARIANT 196: note = Ancestral polymorphism is A, Derived polymorphism is T
MAVQAQHLFAPAFLPHDVGHALRALEGAAAVGGSALLDELGLGGCAPAPAALGDAAFGDAQPRSELTCNAAGDNSVFLPRKRARVVPGFLDVGHQPGFLLDEVQNRCGAASTSGRAAAASGVLSQLYHQGVEVDALVRVETDRMRAALQEARRRHARAVVAVVRGAAEARLRAAEAELERARRRGAELEERLRQLAAEGQAWLGVARSHEAVAAGLRATLDKVLQQPAVAGGGGGGGEAEDAQSCCFVASPSGPVSTGSSPSCKACGGGDACVLVLPCRHLCLCRACEAGAEVCPVCGAVKNASLQVLL

SEQ ID NO: 3284 - protein, 144 aa, Zea mays
  VARIANT 40: note = Ancestral polymorphism is L, Derived polymorphism is P
  VARIANT 53: note = Ancestral polymorphism is P, Derived polymorphism is L
  VARIANT 54: note = Ancestral polymorphism is T, Derived polymorphism is I
  VARIANT 106: note = Ancestral polymorphism is T, Derived polymorphism is I
MLTQVANKKGGSCRPLQLRASSRAREDIWMAMGDAKPLVLIPMPSRDRDLLVPTAAVATHASPSARSVADSDDDESKPSSASAAAQTGSEAFHKVVHSWASKKFMTGCVILFPIAVTFYVTWWFFRFVDGFFSPIYAHLNACLF

SEQ ID NO: 3285 - protein, 319 aa, Zea mays
  VARIANT 258: note = Ancestral polymorphism is A, Derived polymorphism is V
  VARIANT 198: note = Ancestral polymorphism is L, Derived polymorphism is P
MGAPAPSVAVVAAVVVCLCGAFARAQDMDNEWARPPYRGFFGGPGSLLPQSDVDLLEFPLNLEYLETEFFCWAALGYGLDAIDANLTGGGPPSIGGQSASLTPFIRDVATQFCYQEVGHLRAIKQTVRGFPRPLLDISAANFGKIIEQALNATLDPPFNPYENSVNFLVASYIIPYVGLTGYVGANPRLFTPQARKLLAGLLAVESAQDAVIRTLLYERGMARVAGYAVGVAEVTAHISDLRNSLGRRGVKDEGLVVAAELGPEGLTVGNVIAGDHLSLAYDRTPEEILGIVYGTGNPAQHGGFFPQGADGRIARGLLA

SEQ ID NO: 3286 - protein, 495 aa, Zea mays
  VARIANT 322..495: note = Derived polymorphism lacks residues 322 to 495
  VARIANT 317..495: note = Derived polymorphism lacks residues 317 to 495
  VARIANT 224..495: note = Derived polymorphism lacks residues 224 to 495
MGAAAAANEGALPEPCGGRRPGAGPMGRYELVRSDDAPAVAADLEAGTAAPCDGYPKRRVFTPSPSPSPAPASTRYRQRLVSLDVFRGITVLFAQVHASADGPDLDSSAADANAPNSKLMIIVDDAGAFIPAMNHSPWDGVTVADFVMPFFLFIVGVALALAYKRVPDKLDASRKALLRALKLFCLGLVLQGGFFHGVRSLSFGVDLQEIRLMGVLQRIAIAYLLTALCEIWIRGDEDVDYGYDLLKRYRYQLFVGAVVAITYMSLLYGTYVPDWEYQTSAPGSTEKHLFVKCGVRGDTSPGCNAVGMIDRKILGIQHLYGRPVYARSKQCSIDSPQNGPLPSDAPSWCQAPFDPEGLLSSVMAIVTCLIGLQYGHVIVHFQKHRERMMNWLIPSFSMLVLAFAMDFFGLHMNKPLYTLSYTLGTAGAAGLLFSGIYTLVDIYGYRRPTVAMEWMGMHALMIYVLIACNVLPIFIHGFYWKEPKNNLLKFIGIGA

SEQ ID NO: 3287 - protein, 419 aa, Zea mays
  VARIANT 117..419: note = Derived polymorphism lacks residues 117 to 419
MAGREMRLLERRRAGDDGGEMPSCSSTDGNTSSANASTSSSTTASSGVRRSGGAAEGRETSSRSAGTINLSQEYRLAIHTPSYQEIWDKIHIDGDGDEQREGGFGGNGEDEEGEEGEDRVTLAGVLRPEDEVVDRALADAPDTELTRLVKNYFSSTNQASVLCLSLRRALRRARSLYGPITDLLALIPQSPQLATPHCDCAFDAFLLFDQMPNPFPAPAAGFQCMQRSFSGLKNHLDLRLLSVRRRRRWLRCAKRGSGICLIACATGAAVAGLVVATHAITALLAMAPACAASNSCCCPLAASMKRLQRHMDRLDATARGTYVLNNDVATIERLVGRLHATVESDKMLVRLGLERGRGQHHTIEEVVRQLRKNHPSLQRQLADLAEHICLYFAAVNRARLLLVHHLNAQSDAESESPLS

SEQ ID NO: 3288 - protein, 552 aa, Zea mays
  VARIANT 475..552: note = Derived polymorphism lacks residues 475 to 552
  VARIANT 348..552: note = Derived polymorphism lacks residues 348 to 552
  VARIANT 293: note = Ancestral polymorphism is A, Derived polymorphism is D
  VARIANT 270: note = Ancestral polymorphism is A, Derived polymorphism is V
  VARIANT 263: note = Ancestral polymorphism is I, Derived polymorphism is T
  VARIANT 257: note = Ancestral polymorphism is D, Derived polymorphism is Y
  VARIANT 203: note = Ancestral polymorphism is S, Derived polymorphism is F
  VARIANT 198: note = Ancestral polymorphism is P, Derived polymorphism is L
  VARIANT 188..552: note = Derived polymorphism lacks residues 188 to 552
  VARIANT 186..552: note = Derived polymorphism lacks residues 186 to 552
  VARIANT 156: note = Ancestral polymorphism is P, Derived polymorphism is L
MKANVAADDPRAVLRVFRQMRSDDVDRDLVTYNTLIFGLARARMVAKARAFLDDMAAEGHLPNVVTYTSLMNRMCVKGDALGALKLLEEMQGKGSILGPSSSDLRCLCAAPWVGRLLLDPDARGCCRNVQDGAARSFCHELGLMCQVSGMDFVLEPVLSPCYARPELVERALKGRYQDAMNILRPQGRELNLLIVILPDNNGSLYGDVKRICETNLGLVSQCCLTKHVFKVNKQQYLANVALKINVKVGGRNTVLVDALARRIPLVSDIATIIFSADVTHPHPGEDSSPSIAAVVASQDWPEVTKYAGLVIAQAHRQELIQDLFKVWQDPKRGTFSGGMIRELLISFWRATGQKPKRIIFYRDGVSEGQFYQVLLYELDAIRKAYASLESDYQPPVTFVVVQKRHHTRLFANNHNDNRAVDKSGNILPGTMVDSKICHPTEFDFYLCSHAGIQGTSRPAHYHVLWDENNFTADGLQTLTNNLCYTYARCTRSVSIAFRARFYMEPDTSDSGSMASRGPPLGGRHTKAAGVGNVAVRPLPALKENVKRVMFYC

SEQ ID NO: 3289 - protein, 21 aa, Zea mays
  VARIANT 1: note = Ancestral polymorphism is M, Derived polymorphism is I
MEEGASEDWGHCLIWSSSSKC

SEQ ID NO: 3290 - protein, 126 aa, Zea mays
  VARIANT 70: note = Ancestral polymorphism is G, Derived polymorphism is D
  VARIANT 80..126: note = Derived polymorphism lacks residues 80 to 126
  VARIANT 88: note = Ancestral polymorphism is T, Derived polymorphism is M
MATAYEKKWPLYLRTKNTILKKYDGKFKYLQFLVLSYPIKFVHGPPMTPWSSPTSTSSSRRHTSPLMAAGSWTTLEADDWYYLEARNTVRIVALEDYTSIDLTGIDPGLLFEGFLIASIATQEMRH

SEQ ID NO: 3291 - protein, 143 aa, Zea mays
  VARIANT 135: note = Ancestral polymorphism is S, Derived polymorphism is Y
MAKKGQYVKSQGLVDMNKPPEMISGNMKVGSANSFERKDLERELLAKLLVYLCTAQEHLLSQRQLLQGYAGYSAAILEYLTAEVLELAGNAGKDLKVKRITPRHLQLAIHGDEELDTHIKGTIVGGGVRPHIHKSLINKSSKE

SEQ ID NO: 3292 - protein, 345 aa, Zea mays
  VARIANT 178: note = Ancestral polymorphism is R, Derived polymorphism is W
  VARIANT 181: note = Ancestral polymorphism is R, Derived polymorphism is L
  VARIANT 274: note = Ancestral polymorphism is S, Derived polymorphism is T
  VARIANT 276: note = Ancestral polymorphism is P, Derived polymorphism is H
MKDLVSCFSEHAVRISDVACSGSGPANAAAGAPEAGGGGRAPAVSAVTTAYRSRLSASGKELLIDVTWSWSRAPDGPALSVAVHEADAVSRHRAASGAAAPRHLHKKKGSGTFTAGSCVVGVFWDYAAARYGAGSGPEPTSGFYVAVVADAEFVLLLGDLSRGYVDRLHGGIPIAGSRMARRRERFVGCGRWSTRARFLESGEEHEIGVALLDGDAEAWVTVDGRKVVQLRRLRWNFRGCHTIFLDGGAPVDVTWDLHGWLFHAGAESPQPSSTSPCAVFTFQARGASETKLWTDDDCFDDGEEADKLPVTPSGRQQKAGGGGASGSGQGFCLLIQGSRSFSMST

SEQ ID NO: 3293 - protein, 404 aa, Zea mays
  VARIANT 285: note = Ancestral polymorphism is E, Derived polymorphism is G
  VARIANT 256..404: note = Derived polymorphism lacks residues 256 to 404
  VARIANT 213..404: note = Derived polymorphism lacks residues 213 to 404
  VARIANT 193..404: note = Derived polymorphism lacks residues 193 to 404
  VARIANT 186: note = Ancestral polymorphism is E, Derived polymorphism is V
  VARIANT 175: note = Ancestral polymorphism is I, Derived polymorphism is S
  VARIANT 151: note = Ancestral polymorphism is P, Derived polymorphism is L
MSAPSAPPRTVICVGDVHGYITKLESLWSNLQAALPADAFATALVIFLGDYNDRGPHTRRVLDFLLALPTRYPAQRHVFLCGNHDLAFAAFVGALPPPPDGSPFSATWDEYIHNEEHEGWFRGPGFEGMHVQGRRWGGVIKERWNPKKGLPYKGSIYDAQPTFESYGVAHGSSVINQLQFAMEPIVRFTILLELCKQQHTKGWNIDAPASNSWSHFGPAGSSTPEEFFRHVWNVFVLSNDETIQIVAYIEKNLSSYSLIKQDLAKAVPEEHKRFLHDLVWIHEEENVPVDMDGGQIICNLIAVHAGLERTIDLNEQLRVLRTRDTRVPKVQMLSGRQDVWDTPKGLAGKQTIIVSGHHGKLHIDGLRFIIDEGGGYEDKPIAAIVFPSKTLIRSTEEAGTTSER

SEQ ID NO: 3294 - protein, 803 aa, Zea mays
  VARIANT 187..803: note = Derived polymorphism lacks residues 187 to 803
  VARIANT 3..803: note = Derived polymorphism lacks residues 3 to 803
MRQPFYGRPPVQMKVQLVEQEGSKGMGSSGCAEIVELADDPKAARPAAHLRVRVKPVGQEDGARSCSLEDDLDQLIRSVNVRTSARASGQRSTDRWLIGLGKSPVSGSEIVESVSLKQALRKMCISQASEMAAMKRLSKPTGASTPSDSGATKKLYGSVAVQANGEQDDKSKVGNVYMLPEKLAGSSIGKANEISKGQSKSSAKKNLRSASPTAVKVRKTRIQDVISNKSSEAVEDVSVGATLPRQRKGKSVKTSSPRAVPVGGSRLVRPMFRNKTSTKKKVKPEPAIVPASHKHCETKGPKSHASKQKESLQDEPRTPAPANKKAAVSSTVDGSDFGTKGCGTGVIHGPKVGELSRSKEKGECSQSSKSSIGDYSTSTSISEDSYGSFSANGSRPHMSKDVRWGAIRCMAIQQGSLGLKNFKLLKQLGCGDIGTVYLAELVGSDCMFALKVMDIEYLISRKKMLRAQTEREILQMLDHPFLPTLYSHFTTDNLSCLVMEFCPGGDLHVLRQKQPTKTFSEAVCRFYVAEVLLALEYLHMLGVIYRDLKPENILVREDGHIMLSDFDLSLRCSVSPMLVRISSVGRDEPSRPSGPCAQSCIDPLCIQPSWSNSSCFTPRLVSSRRPRAELLKKPSLPQLVVEPTEARSNSFVGTHEYLAPEIIRGDGHGSSVDWWTLGIFLYELLYGKTPFKGPGNEETLSNVISQGLKFPDNPAVSFHARDLIRGLLVKEPEYRLGSSRGATEIKRHPFFEGLNWALIRWTAPPETLKNIDTAPTPVTTRKKKEGKCLEFRLNGDDIEFELF

SEQ ID NO: 3295 - protein, 285 aa, Zea mays
  VARIANT 271: note = Ancestral polymorphism is C, Derived polymorphism is R
  VARIANT 239: note = Ancestral polymorphism is S, Derived polymorphism is N
  VARIANT 203: note = Ancestral polymorphism is P, Derived polymorphism is L
  VARIANT 202: note = Ancestral polymorphism is A, Derived polymorphism is V
  VARIANT 185: note = Ancestral polymorphism is G, Derived polymorphism is S
  VARIANT 180: note = Ancestral polymorphism is E, Derived polymorphism is D
  VARIANT 172: note = Ancestral polymorphism is R, Derived polymorphism is K
  VARIANT 162: note = Ancestral polymorphism is K, Derived polymorphism is N
  VARIANT 48: note = Ancestral polymorphism is P, Derived polymorphism is T
  VARIANT 45..285: note = Derived polymorphism lacks residues 45 to 285
  VARIANT 27: note = Ancestral polymorphism is S, Derived polymorphism is L
  VARIANT 25: note = Ancestral polymorphism is S, Derived polymorphism is L
MTMRMVSRRGVVQLVLVSAIAWSCLDLSLSPSTSGHASPPLPSSQVNTDDLVFGGWDISIMNLADAMTRAKVLDIDLQKQLRPYMESMVPLPGVYDPDFNAANQGSRANNVIKGTKKEQVEQIIKDIMSKEISKSNVVDDMVSSNAILYGPDEHPDHVIVIKYVPYVGDSKRAMDEYTSEIFMGGKNTIVLHNTCEDSLLAAPIILDLLLLAELSTRIQLKPEGTDKFHSFHPVATILSYLTKAPLVLPGTLVVNALAKQRAMLENIMRACVGLALENNMILEYK

SEQ ID NO: 3296 - protein, 452 aa, Zea mays
  VARIANT 284: note = Ancestral polymorphism is A, Derived polymorphism is D
  VARIANT 265: note = Ancestral polymorphism is V, Derived polymorphism is A
MRTTRCMLMVAQALVVVSALLAAAAAATAAEYVRPPPGRIILTEHTEPAAHPQQVHVSAVGEKHVRVSWVTDDMRAQSVVDYGKASRNYTASATGEHTSYRYFLYSSGKIHHVSIGPLEPSTVYYYRCGKAGKEFSLRTPPAALPIELALVGDLGQTEWTASTLAHASKTGHDMLLVPGDLSYADTQQALWDSFGRFVQRHASRRPWMVTQGNHEVEAPPLPVPAGSPPPFAAYGARWRMPHEESGSPSNLYYSFGAAGGAVHVVMLGSYAPFNASSDQYRWLARDLAAVDRRATPWLVVLLHAPWYNTNAAHQGEGEAMRKAMERLLFQARVDVVFAGHVHAYERFARVYDNEANPCGPVYITIGDGGNREGLAFNFDKNHTLAPLSMTREASFGHGRLRVVNTTSAHWAWHRNDDADSVVRDELWLESLAAKASCRQHADPAVVDWDDEL

SEQ ID NO: 3297 - protein, 105 aa, Zea mays
  VARIANT 56: note = Ancestral polymorphism is N, Derived polymorphism is H
MDRLNAKLYLQNCFIMKENERLRKKALLLNQENQALLTELKQRRIAKTKTAAPPNHSANGNAAAAAGHRAPIPDLNAAAPGPRAAGHEKAAAAASPNKPKKAVAN

SEQ ID NO: 3298 - protein, 173 aa, Zea mays
  VARIANT 122: note = Ancestral polymorphism is F, Derived polymorphism is L
  VARIANT 105: note = Ancestral polymorphism is L, Derived polymorphism is Q
  VARIANT 79: note = Ancestral polymorphism is D, Derived polymorphism is Y
  VARIANT 78: note = Ancestral polymorphism is S, Derived polymorphism is I
  VARIANT 55: note = Ancestral polymorphism is E, Derived polymorphism is Q
MSRALEPLVVGKVIGEVIDNFNPTVKMTVTYGSDKQVFNGHEFFPSAVLSKPRVQVQGDDMRSFFTLVMTDPDVPGPSDPYLREHLHWMVTDIPGTTDASFGREQVMYESPKPYIGFHRFVFVLFKQSSRQSVCPPSSRDYFNTRRFAADNNLGLPVAAVYFNAQRETAARRR

SEQ ID NO: 3299 - protein, 173 aa, Zea mays
  VARIANT 102: note = Ancestral polymorphism is G, Derived polymorphism is R
MASFSDVEALPETGEVDHQAKECEAETAVTEENLATLQEQHDDKAPVPYHQEVFAPEHAGEAPAPEEHGDEKDLQVAEPKAAADDQESTRDRLKRHRREMAGRVWVPETWGQEKLLKDWVDCAVFDRPMVPMGLLTARRALIAECCTRRPDRAASSSSSTSSSNPLRVRNGCS

SEQ ID NO: 3300 - protein, 193 aa, Zea mays
  VARIANT 40: note = Ancestral polymorphism is V, Derived polymorphism is A
  VARIANT 51: note = Ancestral polymorphism is H, Derived polymorphism is N
  VARIANT 52..193: note = Derived polymorphism lacks residues 52 to 193
  VARIANT 55: note = Ancestral polymorphism is L, Derived polymorphism is P
  VARIANT 75: note = Ancestral polymorphism is C, Derived polymorphism is G
MEEGPSSSEVCMSFLLHTSPLVRILVPTESLRTEKLSHAVVAGESPMWSGHWFHLLRLDFFTFWRIKTQLQPRYCDWNCRVVGFSDVSCTTLSYLPIDIAHFNLLPYLVLLSIPVLFPCLKLMVFILLVVTKVKTGWRSLLCRCLIWSRLRVLNFFSKCCLHAHRGGVVTEEIVAKASLVGSAPISRYEAFKL

SEQ ID NO: 3301 - protein, 117 aa, Zea mays
  VARIANT 62: note = Ancestral polymorphism is Y, Derived polymorphism is C
  VARIANT 50: note = Ancestral polymorphism is P, Derived polymorphism is L
  VARIANT 47: note = Ancestral polymorphism is E, Derived polymorphism is G
MERVPGVEEQKSADQVNQAGLADESTTVPWLKLGLDAPKSEEVKPQEVKPVATPHRTFSCNYCMRKFFSSQALGGHQNAHKRGVEEPGGLVWPGSFTASSDESKKQMEKNLDLTLRL

SEQ ID NO: 3302 - protein, 99 aa, Zea mays
  VARIANT 86: note = Ancestral polymorphism is A, Derived polymorphism is T
  VARIANT 75: note = Ancestral polymorphism is R, Derived polymorphism is C
  VARIANT 65: note = Ancestral polymorphism is A, Derived polymorphism is T
  VARIANT 63: note = Ancestral polymorphism is V, Derived polymorphism is I
  VARIANT 60: note = Ancestral polymorphism is P, Derived polymorphism is S
  VARIANT 49: note = Ancestral polymorphism is A, Derived polymorphism is T
  VARIANT 36: note = Ancestral polymorphism is L, Derived polymorphism is P
  VARIANT 32: note = Ancestral polymorphism is G, Derived polymorphism is S
  VARIANT 31: note = Ancestral polymorphism is P, Derived polymorphism is L
  VARIANT 27: note = Ancestral polymorphism is A, Derived polymorphism is T
  VARIANT 23: note = Ancestral polymorphism is P, Derived polymorphism is L
  VARIANT 18: note = Ancestral polymorphism is A, Derived polymorphism is V
  VARIANT 13: note = Ancestral polymorphism is A, Derived polymorphism is V
  VARIANT 4: note = Ancestral polymorphism is A, Derived polymorphism is V
MAMATMEATTLTVLLKEAVTAFPTRRAVAVPGRLVLTHAALDALIDVAAARLVADAGFLPGHVIALSFPNTVEVRLLSNLIGHVPACATQSPRVAGVGT

SEQ ID NO: 3303 - protein, 740 aa, Zea mays
  VARIANT 612..740: note = Derived polymorphism lacks residues 612 to 740
MAVRASLACFPSDPALHAACGMPWGVAITPFSATDERGFPPATGTEGHLLPRCQSCFAYFNLLCPLDRWSWNCAICGAENDLSADAAARYARDGGHDPPEMRSAFVDLLLPVEEGEAAAAAAPTPVYVAAIDLSSSEEFLELVKSALQAALEALLPGSLFGLLTFSSKIGLYDVQGPIPIVKNVFIPPDSDGALQVDLEDIMPLCSFLASIDSCKDRITEALETIKPMSSWEVAANAHDGQDHVLHHIRGFGVALDVLINYLSSEYGNAFELARIFAFLSGPPNYGAGQLDINEDQNSGKARGADHILLQEQTSFYRNLATSAVQAGVCVDLFAITNEYTDLTSLKVLSVESGGSLFLYSSTDESTLPQDIYKMLSRPYAFGCVMRLRTSSQFKIVDSYGHFFPDPQYMHVQHINCCDSFATYSYDFEFEKDSQFSRKSSPPIIQIAFKYTVLVHNGDISDLPNSGCRFKYLLERRLRVRTIQYNTTANIWDLYDFVDPDVVLTILVHQVILASLSDALETRLWLQDWLVVVIAQYNKAYKNVTSGGGTEIYNIDVNFSHCSQLQPLSRFVFAILLSPLLQVSSEGIHPDYVTYLQCLLSALEPASLRQAIWPTLISYSSPDVEAEVHQSLSRTVFTSERPIYILDAYKDLLVYYSPTASSEIPFPPPRNCLLRSTVDRLKQERNITPKLVFIHGAHDDTTEFEKYLVEDQTLDGSPLSSSTGFSSFLDEVRSKVAEHGI

SEQ ID NO: 3304 - protein, 288 aa, Zea mays
  VARIANT 14: note = Ancestral polymorphism is M, Derived polymorphism is T
  VARIANT 28: note = Ancestral polymorphism is T, Derived polymorphism is M
  VARIANT 30: note = Ancestral polymorphism is R, Derived polymorphism is W
  VARIANT 145..288: note = Derived polymorphism lacks residues 145 to 288
  VARIANT 228: note = Ancestral polymorphism is L, Derived polymorphism is V
  VARIANT 230: note = Ancestral polymorphism is P, Derived polymorphism is L
  VARIANT 280: note = Ancestral polymorphism is D, Derived polymorphism is Y
MDGTTGDPFRSPSTVAVDLRRDMVDYITQRSDSFIADALIESEANQDVPGVEVPDDPFDTVSIFMDDFASTKRNIIGHVSGWLLTDSRNDKIDDFVQEMEATKFWPLERREAVAELLLKNINLKTRFHCPEKYENEERLEDHKAQCSFRHCANDGCRARVSVRCVKDHDAACVYKLLQCEQGYDKRLLRRDMDRHCITIYPMRPIKCPFGCDSSFPDRDLERHCTEFLQPHLLMVLKTIHKKGRSEQDLKDLAQKLEKFDGDGKLAKALDARPLTNVVKDLEAKMKGG

SEQ ID NO: 3305 - protein, 111 aa, Zea mays
  VARIANT 61: note = Ancestral polymorphism is M, Derived polymorphism is K
MSRSNKKSSRGLDLKLNLSLPATGDSSGRVMADEESSPSSCLSSENEHGLQWSNSPEATSMVLAACPRCFIYVMLPQDDPWCPQCKSPVLLDFLQDNSNNSNNSSRRSRKG

SEQ ID NO: 3306 - protein, 191 aa, Zea mays
  VARIANT 18: note = Ancestral polymorphism is M, Derived polymorphism is T
  VARIANT 33: note = Ancestral polymorphism is R, Derived polymorphism is W
  VARIANT 38: note = Ancestral polymorphism is R, Derived polymorphism is C
  VARIANT 40..191: note = Derived polymorphism lacks residues 40 to 191
  VARIANT 141: note = Ancestral polymorphism is Y, Derived polymorphism is C
MSIELLTKFLTLLFGYAMPALECFKAIEQRPGRADQLRFWCEYWIILVLLVMFDEIAGVLISKIPMYYELKLAFLVYLWYPKTRGTDIVYETFLQPLVMQYQPNIEARLQYLRANAGDILVFYLKNFTERGYELFLRVLDYVRSQASRGSRTRSFFSFRGERSERPSFTDDYVTGGDRRDGGRHRRPRSGY

SEQ ID NO: 3307 - protein, 333 aa, Zea mays
  VARIANT 35: note = Ancestral polymorphism is P, Derived polymorphism is L
  VARIANT 138..333: note = Derived polymorphism lacks residues 138 to 333
  VARIANT 263: note = Ancestral polymorphism is G, Derived polymorphism is V
MIFPAGRDKIWFDTGVPVPEVSTGKPRKPAPDHCPRCMQRRRDLFGDDSSTCRPCSLSYSSLSMVLGGLFIWTHTYSLMQKSGKLYHKMQSKSIQCPVDSDEEHEQAKEDGPAGCADEEAPLPTSVKPREHEHGEEEEHQMVSNFTAQSTASSAAMHGHGGILGETDSPELQEAPLLSCESEVADKGFWTKLKDVIHQFIDELMAPPTISAIIGFVVGLFPWLKSIIVGDGAPFKVIQDSLQLMGDGTIPCITLILDGNLTQGLRKSGLKRVVIVAILCVRFGLLPLIGIAIVRAAYGLGFLSRDPLYCYVLMVQFVVPPAMNIGTYAHGTLR

SEQ ID NO: 3308 - protein, 198 aa, Zea mays
  VARIANT 69: note = Ancestral polymorphism is V, Derived polymorphism is G
  VARIANT 137: note = Ancestral polymorphism is G, Derived polymorphism is C
  VARIANT 166: note = Ancestral polymorphism is H, Derived polymorphism is Y
MKLLLRRDSSPAYSSDSNGLSPVHIAAKMGYGQFIYELCRFCPDCDELLDSRGRNFLHTAIEHKKWKVGWRFSGTADLGRMANVMDSEGSTPLHLAIKNADQMIVSLLMATNSVLPNIVNNQGLTALDLAVLATDKGISYTLNPQVIILRCLAWTGAVLSPRRLDHFIDDFGIGKTSGNELKKFTNIAQKKHGIVFIF

SEQ ID NO: 3309 - protein, 87 aa, Zea mays
  VARIANT 65..87: note = Derived polymorphism lacks residues 65 to 87
  VARIANT 57: note = Ancestral polymorphism is V, Derived polymorphism is M
  VARIANT 40: note = Ancestral polymorphism is G, Derived polymorphism is R
  VARIANT 32: note = Ancestral polymorphism is A, Derived polymorphism is V
  VARIANT 28..87: note = Derived polymorphism lacks residues 28 to 87
  VARIANT 21: note = Ancestral polymorphism is T, Derived polymorphism is I
  VARIANT 13: note = Ancestral polymorphism is P, Derived polymorphism is S
  VARIANT 10: note = Ancestral polymorphism is G, Derived polymorphism is D
  VARIANT 8: note = Ancestral polymorphism is G, Derived polymorphism is E
  VARIANT 7: note = Ancestral polymorphism is A, Derived polymorphism is T
  VARIANT 1: note = Ancestral polymorphism is L, Derived polymorphism is M
MYACDGAGLDLSPVLIHIYVTPIKRFLQVLWAIGALGSVGTYLVAARPLDEGLVQYVVDHPVVLWFVGPTFVVLTGLVFKEGLCYGN

SEQ ID NO: 3310 - protein, 329 aa, Zea mays
  VARIANT 30: note = Ancestral polymorphism is W, Derived polymorphism is C
  VARIANT 33: note = Ancestral polymorphism is R, Derived polymorphism is C
  VARIANT 68: note = Ancestral polymorphism is P, Derived polymorphism is L
  VARIANT 70: note = Ancestral polymorphism is S, Derived polymorphism is L
  VARIANT 177: note = Ancestral polymorphism is I, Derived polymorphism is T
MAYSSAIELTPLCNEVSQPLNEEASIIKLWLARVANHLGHAEALGEHASVSDLPELFGPCSLVKHDSPSLILASLVVACTDVDSLVYEDTSANTVVSILDEMPSRVSSSKILRETDLTSNEVVVGAFEADSRQMRSTEQTIEVVTSVEDVVVVKDASDDEEVTLVVQSTFEDPIFLTTIKDNPSRSMVEDNSKPVLVEDALVDEEATLAVHGPLCMVEDNTEPRLVDDLLIEIGSSSSTRGRKDEDLACYPLAPPSLLTTTISCQCKSYNSSSLHRSARLAQRGVFKDLDIFGIDGKHSESSIQAYEDHLNELLSPYLLKKLLSLKGLV

SEQ ID NO: 3311 - protein, 224 aa, Zea mays
  VARIANT 143: note = Ancestral polymorphism is A, Derived polymorphism is T
MSKEKHHRDWILRRCCGSVAACILTLAAVVGFIVLVIYLALRPSKPSFYLQDVQLRSIDLSDPALSLDLQVTIVSRNPNERVGVYYKTLDAFTTYRDEAVTVPVSMPAVYQGHRDASVWSPVMSGDAVPLPQYAADAMRQDIAAGYVLLHVRVDGRVKWKVGSWVSGSYRLFVNCPALLAASGSAGAGGAFAASAASLRSGVPAGVNTTVSLKFTHPADCTVDV

SEQ ID NO: 3312 - protein, 78 aa, Zea mays
  VARIANT 22: note = Ancestral polymorphism is S, Derived polymorphism is W
MGCCWFSLVLVLVLLLPSCQASSWRGVQVQPLKARPPLQGGASSNSFLGFLPRQAAPPSGPSRQHDSVGLESQRQRQP

SEQ ID NO: 3313 - protein, 444 aa, Zea mays
  VARIANT 23: note = Ancestral polymorphism is S, Derived polymorphism is N
  VARIANT 223: note = Ancestral polymorphism is R, Derived polymorphism is C
  VARIANT 260: note = Ancestral polymorphism is L, Derived polymorphism is Q
  VARIANT 289: note = Ancestral polymorphism is A, Derived polymorphism is V
  VARIANT 313: note = Ancestral polymorphism is R, Derived polymorphism is C
  VARIANT 314: note = Ancestral polymorphism is A, Derived polymorphism is V
  VARIANT 375..444: note = Derived polymorphism lacks residues 375 to 444
MVRKETAMRLPPQHQGLEVKIPSFFRCPISLDVMRSPVSLCTGVTYDRASIQQWLDSGNTTCPATMLPLPSTDLVPNLTLRSLIAHWAASAASCSPTAAGGAGVADSSSARTSSPASLVRQVASSGVDPSPALRELAAYLSDDDVDDFEKNALVGAGRAAETVASVLRRRAEETGVEGVEAATRVLALILASDGIDDSNKKRVATGLAADAAASTASLARVMRGGSDLEARIDAAKLAELLLANAAGEAKAAATKSSELLAELVRLVGTVDETGALDRNAVDAGLSCLAAICGSCRAARGEMVRLGAVPAAVRALRASTESGASAKALRVLESAVGCAEGRAALCANAEDAIPAVVGKMMKAGRDGAEAAVAVLWAVCHRYQDRRAADAAAAAEGGLTRLLLLMQSGCSPAARQMALELLKIYRVNAKSCLAGYDSKTTHIMPF

SEQ ID NO: 3314 - protein, 171 aa, Zea mays
  VARIANT 93: note = Ancestral polymorphism is S, Derived polymorphism is R
  VARIANT 108: note = Ancestral polymorphism is R, Derived polymorphism is S
MPAPRHRPSIHSSHPISNFKSFDRAAPPALSQLSPMARTKQTARKSTGGKAPRKQLATKAARKSAPATGGVKKPHRFRPGTVALREIRKYQKSTELLIRKLPFQRLVREIAQDFKTDLRFQSSAVAALQEAAEAYLVGLFEDTNLCAIHAKRVTIMPKDIQLARRIRGERA

SEQ ID NO: 3315 - protein, 136 aa, Zea mays
  VARIANT 58: note = Ancestral polymorphism is S, Derived polymorphism is R
  VARIANT 73: note = Ancestral polymorphism is R, Derived polymorphism is S
MARTKQTARKSTGGKAPRKQLATKAARKSAPATGGVKKPHRFRPGTVALREIRKYQKSTELLIRKLPFQRLVREIAQDFKTDLRFQSSAVAALQEAAEAYLVGLFEDTNLCAIHAKRVTIMPKDIQLARRIRGERA

SEQ ID NO: 3316 - protein, 76 aa, Zea mays
  VARIANT 8: note = Ancestral polymorphism is N, Derived polymorphism is K
  VARIANT 16..76: note = Derived polymorphism lacks residues 16 to 76
MWRLCCCNCQVDETNQCESGQVKATTNKIDGATKGLRDSATAKVKPHDDAPLIDVPVLSLDDLIKTLLTWFKNLGR

SEQ ID NO: 3317 - protein, 130 aa, Zea mays
  VARIANT 11..130: note = Derived polymorphism lacks residues 11 to 130
  VARIANT 21: note = Ancestral polymorphism is D, Derived polymorphism is Y
  VARIANT 25: note = Ancestral polymorphism is P, Derived polymorphism is L
  VARIANT 104: note = Ancestral polymorphism is T, Derived polymorphism is I
MGGIPTNYHGEVVDIKGDNPDAVIPGLMAAGEAACASVHGANRLGANSLLDIVVLAELVQTGEAMKGLDIRKVLEAPKEVKCVPMKNVLEPGDIPTLAELGLTTPPGMAQVQLERFLAFSTMMRSVVEPV

SEQ ID NO: 3318 - protein, 120 aa, Zea mays
  VARIANT 38: note = Ancestral polymorphism is L, Derived polymorphism is V
  VARIANT 40: note = Ancestral polymorphism is V, Derived polymorphism is L
  VARIANT 46: note = Ancestral polymorphism is E, Derived polymorphism is G
  VARIANT 49: note = Ancestral polymorphism is S, Derived polymorphism is L
  VARIANT 57: note = Ancestral polymorphism is A, Derived polymorphism is T
  VARIANT 63: note = Ancestral polymorphism is S, Derived polymorphism is Y
  VARIANT 66: note = Ancestral polymorphism is V, Derived polymorphism is M
  VARIANT 71: note = Ancestral polymorphism is H, Derived polymorphism is R
  VARIANT 94: note = Ancestral polymorphism is R, Derived polymorphism is W
  VARIANT 96: note = Ancestral polymorphism is C, Derived polymorphism is Y
MHMETFVMIIIKRLKDANLFVSQGGLIILAQEVEECLLKVEQSPPESTSNALQVATAALDVFSLIVEAFKHLDDIESPFFGRRTSIFDTVAKVRSCVVMLDLECDDLINDMFHHFLRTVK

SEQ ID NO: 3319 - protein, 797 aa, Zea mays
  VARIANT 566: note = Ancestral polymorphism is V, Derived polymorphism is D
MHLLAVLCGVIFSLLQLHTPTRSAATDTLSRGGSLAGDETLVSSNGKFALGFFETKSDNSTHNASNSYLGIWFHKVPRLTPVWSANGDNPVSSTASPELMISDDGNLVIIAATGTKVWSTQANITANISVVAVLLADGNLVLRSSTNSSDVFWQSFDHPTDTLLPGAKLGRNKATGLDRRFVSRRNSNDQAPGVYSIGLAPDGVDESMRLSWRSSTEYWSSGEWNGRYFNGIPEMSDPSYCNYMFVSSGPEFYFSYTLVNESTAFQVVLDVSGQWMVRVWDWDRNDWITFSYSPRSKCDVYAVCGAYAVCSSNADPVCSCMKGFSVRSPEDWEMEDRTGGCIRDTPLDCNATSMADRFYPMPFSRLPSNGMGIQNATSAKSCEGSCLSSCSCTAYSYGQGGCSLWHDDLTNVAPDDTGETLYLRLAAKEVQSWKHHRHGMVIGVAVGVSAVTATLVFIFLIWRRSSRRSSHPADSDQGGIGIIAFRYADIKRATNNFTEKLGTGGFGSVFKGCLGESVAIAVKRLDGAHQGEKQFRSEVSSIGIIQHVNLVKLVGFCCEGDRRLLVYEHMPNRSLDVHLFHQSAHGSGTTGLRWDIRYQIALGVARGLAYLHHSCQDCIIHCDIKPQNILLDASFVPKIADFGMAKFLGRDFSRVLTTMRGTVGYLAPEWISGTAITSKVDVYSYGMVLLEIVSGRRNAGREASTDDDCCHAKCCFPVQVVDKLLNGGVESVVDASLGGDVNLDDVERVCRVACWCVQDNEYDRPTMVEVVQFLEGLSEPDMPPMPRLLHAIAGGSP

SEQ ID NO: 3320 - protein, 308 aa, Zea mays
  VARIANT 219: note = Ancestral polymorphism is S, Derived polymorphism is F
  VARIANT 209: note = Ancestral polymorphism is T, Derived polymorphism is I
  VARIANT 149: note = Ancestral polymorphism is V, Derived polymorphism is D
MLFLISALLSRGLEDIQADRDDPSQPLVTAPFGHASQEIVNLLLCGEAVPNVFDGKMDLGGGMSLKGIPNNVEVGFLTLLESLNLCKVGLYLKCPKWPIWVVGSESHYTVLFALNPNVQEENELEERESKIRRAFDAQDQSGGGGFISVEGFQQVLRDTDINFPSDKLEDLCNAGIIVWSEFWQALLQLDKRAGGMKDPTGLMGKKQFTIFHFNGIAKSVLNGNASAGGSCPIQRPRLCKLNVTVPPRWTQDEYLADVVSASTSSKDDIILSLAPPGQTNQHAPLVDCIRTRWPRAVCSWVGDVPSIV

SEQ ID NO: 3321 - protein, 798 aa, Zea mays
  VARIANT 193..798: note = Derived polymorphism lacks residues 193 to 798
MHRLRHFALHVLLLVIAHAPLPSAAVDTLRPGQALAGWKKLVSANGKFALGFFQLQPGSSYYLGIWFDKVPVLTPVWTANRDNPVSNSTSPELTISGDGNMAVVLAESGTTTIVWSTSTQANATSNDTVAVLLDSGNLVLRSSSNSSLVFWESFDYPTDTQLPGVKIGWDKVTGLDRRLVSRKNSVDLSSGLYSSTMGHDGVARMLWNSSAVYWSSTWTGGFFSAIPEMSAGSPLANFTFVDNAREVYFTYNIFDESTVIRTTLHVSGRNQVRVWTGQDWMTVNNQPAHQCDVYAVCGPFTVCTDSASDADSCDCMRGFSVRSPAEWAVEDRTGGCVRNTPLNCAADGRNRTGVPADKFYSMPGVRLPQNGRQAMPNASSAIECAQACLSSNNCSCTAYSYGGEDGCSLWHGELVNVAADELESGKGNRIAMVAGVAALVLVLVVVVICSRRNNGKWWSRPIADSDKGGSVVGIATFKYADLQDATKKFSEKLGAGGFGCVFKGRLAGDSTDIAVKRLDGALGNAQGEKQFRAEVNSVGFIQHINLVKLIGFCCEGDRRLLVYEHMPNGSLDSHLFQFQSCRRRAPLDWSTRYQIAVGVARGLGYLHHGCRDCIIHCDIKPQNILLDASFAPKIADFGMAKFLGREFSRVVTTMRGTVGYLAPEWISGTPVTPKVDVYSYGMVLLELVSGKRNYVEHSSSCAEGQGDYLPVQAAHKLLHGDVLSVVDADLHGELNVEEAERVCRVACWCIQDLESDRPTMIEVVQFLEGICQVEIPPMPRLLTAIAGSGSHQTRVSSL

SEQ ID NO: 3322 - protein, 370 aa, Zea mays
  VARIANT 26: note = Ancestral polymorphism is G, Derived polymorphism is D
MDAVRSNLGGTKVLLCGVIQYANLVGVAIGYTIASSISMKAVRRAGCFHVHGHGDPCRSSSTPYMILFGLVQILFSQIPDFDEIWWLSIVAAVMSFTYSSIGLSLGIVQTISNGGFMGSLTSISFGAGVSSTQKVWHTLQAFGDIAFAYSFSNILIEIQDTIKAPPPSESKVMQKATCVSVATTTIFYMLCGCMGYAAFGDNAPDNLLTGFGFYEPFWLLDVANVAIVVHLVGAYQVFCQPIFAFVERRAAAAWPDSAFISRELRVGPFALSLFRLTWRSSFVCVTTVVAMLLPFFGDVVGLLGAVSFWPLTVYFPVEMYIKHRRVPRGSTRWICLQTLSVTCLLVSIAAAAGSIADVIDALKVYRPFSG

SEQ ID NO: 3323 - protein, 1130 aa, Zea mays
  VARIANT 266..1130: note = Derived polymorphism lacks residues 266 to 1130
  VARIANT 332..1130: note = Derived polymorphism lacks residues 332 to 1130
  VARIANT 347..1130: note = Derived polymorphism lacks residues 347 to 1130
MASDSDVDEDELLQIALQEQAARDLSHQRPPAANKPVVNLVRPPAPNARGGNARAGGAAAKARQPSRGGDEDDDSEVELLSISSGDEDDNPRARGPPPPRGGGGGRAGARRAASRDDGDFDDEEPRSWKRVDEAELARRVREMREAKVAPNIQELDQKAAAAAAAAARKALTSVQTLPKGVEVLDPLGLGVIDNKSLRLITDASVSSPISREKSQGLDPNMRDKVIYSSPNFDPKVFLSWVHKDTSAADLEAGALTLKTDLKGRTQQKKQLVKENFDCFVSCKTTIDDIESKLRQIEEDPEGAGTAHLYSVTQKISGVANRAFEPLFERQAQAEKIRSVQGMLQRFRTLFNLPSAIRGNIRKGEYDLAVREYQKAKSIVLPSHVGILKRVLEEVEKVMQEFRGMLYKSMEDPHLDLAEIENIVRLLLELEPETDPVWHYLNIQNSRIHGLFEKCTQDHDSRMEVLQNKIREKVLSDSKWRQLQQDSNKSLEVDSTIGDSPRVDQLSTNFMAEEADSLRATYIRRLTSVLIQHVPAFWRLALSVFSGKFAKAASGNVVSDFDVNAKPTANKNDEKGGEVKYTNHTLDEVGSMVQATISAFDTKVQSTFRDFEECNILCPYMSDTIKEIAKACQTLEGKDSSPTAVKMLRTLHFEMTKLYILRLCSWMRATTKEISKDETWVTLSTLERNKSQYAISCLPLEFRDITVSAMDRIDTMILNLMSETAKSYDISQPLQEINESVRLAFLNSFLDFAGYLERFGGELTENRPNKENNYVSNGYINGTRETFVNTDGDLHKKLLVVLSNIGYCKAELSEELYSKYRHIWSPVRNNEERSSDMRDLRTSFSALEEKVLDQYTFAKSNLIRSAAQSYLLDSGIYWGAAPMVKGIRDATLDLLHILVAVHAEHCLSYEYNLTMYPHVYFERVDAILTFYFQVYSGARPLLEKTMKILVEGLVDIFLSVFHENKTKDIRLLDANGFCQLMLELEYFETVLHTYFSPEAQQAMKSLQENLLEKACESVAEAMENPGHQRRPTRGSEDTASDDRQPSVSPDDLLVLAQQCSSDLLQGELERTRLNIACFMESTLQPTAAPAGPKPAAHSSYQAQHAPVQTSSPSFRRQQTGTSSPVVSRRRR

SEQ ID NO: 3324 - protein, 453 aa, Zea mays
  VARIANT 31: note = Ancestral polymorphism is T, Derived polymorphism is A
  VARIANT 92: note = Ancestral polymorphism is T, Derived polymorphism is I
  VARIANT 162: note = Ancestral polymorphism is G, Derived polymorphism is R
  VARIANT 188: note = Ancestral polymorphism is L, Derived polymorphism is V
  VARIANT 280: note = Ancestral polymorphism is R, Derived polymorphism is L
  VARIANT 287: note = Ancestral polymorphism is A, Derived polymorphism is S
MASGGGNAAADAKHVDAEVVIVGGGIAGLATALALRRAGAARRVLVLERHAGHRATGAALTIFPNGWFALRALGVAHKLASRYDAYETSRVTNLETGATQVFRFAGNKNKGEEVRVRALDRKALLEALAEELPPGTVRFSSKVVSIDTERAAGDSSVTVVLGLDDGTVIRAKVLIGCDGVHSVVARWLGLSEPASSGRSAVRGLSVFPGGHGVKRELRQFLSEGLRAGMVPISDTDIYWFLVNNTVAAGNPSELSSDARVLVVPAFAEKEAAGDPVKTLLEVTDNLARHMPAEYLDVVRHSDHGNLSWAPLLYRNPVSVLLGPAARGPVTVAGDAFHPMTPDMAQGGCSALEDAVVLARALSREATPAEGVSAYVAQRRWRAAWLVAGAYLSGWIQQGGTNVGGVRGRLVKVFRDWIFYRFVFPRLADTMWFDCGDLTPPPPTAAVGKSHHIE

SEQ ID NO: 3325 - protein, 104 aa, Zea mays
  VARIANT 46: note = Ancestral polymorphism is A, Derived polymorphism is T
MSEEKHHHHLFHHRKAEEEEGASGEVDYEKKEKHHKHMEQLGQLGAIAAGAYALHEKHKAKKDPENEHGHRVKEEVAAVAAVGSAGFAFHEHHEKKDAKKHAHN

SEQ ID NO: 3326 - protein, 356 aa, Zea mays
  VARIANT 62: note = Ancestral polymorphism is G, Derived polymorphism is C
MARRQQWSRGGLAAVAVLAVLCVLCSGHPVPGGHGSGGGGFVNTLQPHFYDHACPQMQAIVGSVVAKAHAEDPRMAASLLRMHFHDCFVQGCDASVLLDADGSGRFVTEKRSNPNKDSLRGFEVIDEIKAALEHACPRTVSCADIVAVAARDSVVLLIACAAPQTGGPGWEVPLGRRDSLTASLSGSNNLIPAPNDSLPTIIGKFANQGLDIVDLVALSGGHTIGDSRCVSFRQRLYGQNNNGQVDRTLNPAYAAELRGRCPRSGGDQNLFALDPASQFRFDNQYYHNILAMDGLLSSDEILLTQSRQTMGLVHRYAADQGLFFDHFAKSMVKMGNISPLTGSAGEIRHNCRRVNH

SEQ ID NO: 3327 - protein, 136 aa, Zea mays; identical to SEQ ID NO: 3315
  VARIANT 29: note = Ancestral polymorphism is S, Derived polymorphism is W
  VARIANT 32: note = Ancestral polymorphism is A, Derived polymorphism is V
  VARIANT 68: note = Ancestral polymorphism is F, Derived polymorphism is S
  VARIANT 87: note = Ancestral polymorphism is S, Derived polymorphism is C

SEQ ID NO: 3328 - protein, 196 aa, Zea mays
  VARIANT 133: note = Ancestral polymorphism is S, Derived polymorphism is R
  VARIANT 114: note = Ancestral polymorphism is L, Derived polymorphism is P
  VARIANT 104: note = Ancestral polymorphism is P, Derived polymorphism is L
  VARIANT 37: note = Ancestral polymorphism is D, Derived polymorphism is V
MDLSAVQAALSDKSYTAVASLCDELLLQAASKGTNTDEWPYSVHLLAHLYINDLNSARFFWKSLPQEVKDTRPELAAVWRIGQCLWNRDYAGVNTAAQGFEWGPDLTEFITAFLESYRQRIFKLLTSAYSTISVADVAHFMGMSEEDATNYAVQIGWSLGAATKMLTVKKPKAQINQKLDASKLQRLTECVFHLEH

SEQ ID NO: 3329 - protein, 58 aa, Zea mays
  VARIANT 23: note = Ancestral polymorphism is D, Derived polymorphism is E
  VARIANT 22: note = Ancestral polymorphism is T, Derived polymorphism is A
  VARIANT 12: note = Ancestral polymorphism is M, Derived polymorphism is R
MHNYSLDEKIRRTLEAHVVEKTEEVHEVSFVGFSSQAESFCKARDRTFAIDLYSSYIK

SEQ ID NO: 3330 - protein, 179 aa, Zea mays
  VARIANT 122: note = Ancestral polymorphism is P, Derived polymorphism is L
MIIPKKNRNEICKYLFKEGVLYAKKDYNLAKHPQIDVPNLQVIKLMQSFKSKEYVRETFSWQYYYWYLTNDGIEHLRNYLNLPSEIVPATLKKSAKPPGRPFGSGPPGDRPRGPGRFDGDRPRFGDRDGYRGGPRGAPGDFGGDKSGAPAEFQPSFRRPGFGRGGGSGFGAGPTSSSME

SEQ ID NO: 3331 - protein, 398 aa, Zea mays
  VARIANT 41: note = Ancestral polymorphism is G, Derived polymorphism is W
MAASTRRRHGAAAPGEWAAVSGAGAWRVEEVGKHQLMRRTGLPARDLRALDPALQFYYHPCSIVGRDRAVVVNLERARAVITATEVLVPAPRDPAVAPLFRSLRARLVASSAPAASPASAPPPEAFEEDEAAEDGGGALPPSPGGVGGGKDGQASARDKLPPFEFRALEVCLEFSCKSLEHETCTLEEEAYPALDELSSNISTLTLERVRDELEHLLDADVDMAAMHLSDKLAADGQSSRCNTNSEPNEFDEERDREAEAGDASSEGANGSGTGTSVGFTPKIDELENLLEAYFVQADGTLNKLSTLREYVDDTEDYINVMLDDKQNQLLQVGILLSTATLVMSVAIAITGVFGMNITIPLYNAPTGVFWQVTGGLVVATAAVYVVALICYKRSGILQ

SEQ ID NO: 3332 - protein, 303 aa, Zea mays
  VARIANT 88..303: note = Derived polymorphism lacks residues 88 to 303
MDDWRKPYIVAIIVRVIITGMFVINKAAMDHGFNSFVFVFYRQVAASVLMVPIAVLLERRNARSMSSVLLFKIFVCALIGITVSSNLYNVSLKLTSATVVAASTNAIPVITFCLALLLRMEEVKLRSASGMAKLTGVALCLAGVLVIAFYAGELLSAVNHHHAFGAPAPTHAASSTAAAKTMTGAAWIKGTFITGFVVAGVNYYLQAWCMEMRGPVFLAAWTPLSFALTVFCSSFFLGEMVHLGSLLWGKSREAKTVQRNIEASTADGDAQDEVHCWELEGEKENEGREERENGDLRTCVQQD

SEQ ID NO: 3333 - protein, 154 aa, Zea mays
  VARIANT 42: note = Ancestral polymorphism is T, Derived polymorphism is I
MPTARRTRIPAFGEWNHHHHSNGGGAWAPAVMTPSFDFGHAITTPHKAPQTQGRRRGAADGVVHAAKLAAAAAAAEPHQGHTQTTRRSKVADSGAYAQAAAAARRSCFALAKPVDDDLYGVPPDMLYGKPPPPGARKDDGWRRILRLLGCSCLS

SEQ ID NO: 3334 - protein, 263 aa, Zea mays
  VARIANT 121: note = Ancestral polymorphism is F, Derived polymorphism is L
MSNEMGRETNHLKMPRFSVGSSCHAFHFDEMCFIKFHQNDYVAAGCQRLNGEDFRPMNDLIQLYMTAFLEGNNEVLGVVEKAIAAVEKENSRVAYQLESITTEINSGKEKFIRLNANLENFRKQAEKDGAKFTSNIRVDVVQSLLPLVDSFEKTKLENTPGTEKEQMVSTSYQGIYKQLVETLRYLGVGVVETVGNPFDPLVHEAISREASMQFKAGIVMHEVRRGFHLKERMLRPATVKGLNWLWQTKCKLIEEGKDAALWI

SEQ ID NO: 3335 - protein, 358 aa, Zea mays
  VARIANT 82: note = Ancestral polymorphism is A, Derived polymorphism is S
  VARIANT 250: note = Ancestral polymorphism is I, Derived polymorphism is T
MASSDISVDIRPDINSFDHFLSMRYIATDRPWLKLYGIRVQPVPPFSSLSYKPDPALIHHCLPDELMLEIFTRMSPYTLGRAACVCRKWKYTARNPTLWRAACLKTWQVSVFDFVIQFHVLMFSSIQFYVVKRSGMEANYMMVRSLYDSSWRRMWLQRPRIRIDGLYVSRNTYIHTGVTEWQFKKTVNVVCYYRYLRFFPSGKFLYKVPIHNSHISPDKVKDAVKCMHFRASKADCVFKGDYVLSEDGQIEMALLYPGHRYTLVRMHLRLRGTTVGANNRLDVLKILTTGVNATELQNWKGSILELVEGWEEDETHDPDVPAVSHSRGLSPFVFVPFEEADTSVLNLPVEKMDYYVPG

SEQ ID NO: 3336 - protein, 93 aa, Zea mays
  VARIANT 68..93: note = Derived polymorphism lacks residues 68 to 93
  VARIANT 65..93: note = Derived polymorphism lacks residues 65 to 93
  VARIANT 62..93: note = Derived polymorphism lacks residues 62 to 93
  VARIANT 61: note = Ancestral polymorphism is S, Derived polymorphism is L
  VARIANT 58: note = Ancestral polymorphism is R, Derived polymorphism is P
  VARIANT 54..93: note = Derived polymorphism lacks residues 54 to 93
  VARIANT 41: note = Ancestral polymorphism is K, Derived polymorphism is M
  VARIANT 35: note = Ancestral polymorphism is E, Derived polymorphism is V
  VARIANT 29: note = Ancestral polymorphism is H, Derived polymorphism is N
  VARIANT 14: note = Ancestral polymorphism is R, Derived polymorphism is H
MGFIMEFAENLILRLMEDPDKRDQVRREHAYKMKERCERTKAAWSLPLRPYSFWTFDRFNSQLSWDLQISQAAGRRDPYDDLITRHSGSPPSS

SEQ ID NO: 3337 - protein, 342 aa, Zea mays
  VARIANT 178..342: note = Derived polymorphism lacks residues 178 to 342
  VARIANT 147: note = Ancestral polymorphism is P, Derived polymorphism is S
  VARIANT 134: note = Ancestral polymorphism is P, Derived polymorphism is L
  VARIANT 124: note = Ancestral polymorphism is G, Derived polymorphism is E
  VARIANT 116: note = Ancestral polymorphism is P, Derived polymorphism is L
  VARIANT 56: note = Ancestral polymorphism is L, Derived polymorphism is H
  VARIANT 55: note = Ancestral polymorphism is E, Derived polymorphism is K
  VARIANT 33..342: note = Derived polymorphism lacks residues 33 to 342
  VARIANT 25: note = Ancestral polymorphism is F, Derived polymorphism is S
  VARIANT 10: note = Ancestral polymorphism is R, Derived polymorphism is H
MAVAVEVMARALSQSIISSNTFSTFSSGSPTIWCYIPIPEVDAKCLVLAPGVPAELLDAGRVADGVLDAVHAEERQLHLLESMLQLTADAEALEHRGRPRRSRGAARGGEHECQLPVHLEEALEDVAPREGDMPGGDDGGEQVLERPGRLDPRIDPTHGVIEHGSVPPQVPILEVEQQHDGVAKRLPIEEAGERGRVVDVEGHKGCAAMLGEGWVGGRGELAHLVAEPCDGEDGVVSVARGMGGEHAGCRGGSGVEVGKRQAGRARKRPVRTEEAAAAVLIGGCGSRDSRRDSRGGMGASGFGRTVRHSIVDVYIMYIIVVEIRDVCESSIYLNASYVLSDY

SEQ ID NO: 3338 - protein, 251 aa, Zea mays
  VARIANT 33..251: note = Derived polymorphism lacks residues 33 to 251
  VARIANT 46..251: note = Derived polymorphism lacks residues 46 to 251
  VARIANT 56: note = Ancestral polymorphism is P, Derived polymorphism is L
  VARIANT 64..251: note = Derived polymorphism lacks residues 64 to 251
  VARIANT 96..251: note = Derived polymorphism lacks residues 96 to 251
  VARIANT 124: note = Ancestral polymorphism is E, Derived polymorphism is V
  VARIANT 147: note = Ancestral polymorphism is P, Derived polymorphism is L
  VARIANT 155: note = Ancestral polymorphism is E, Derived polymorphism is G
  VARIANT 170: note = Ancestral polymorphism is T, Derived polymorphism is M
  VARIANT 182: note = Ancestral polymorphism is A, Derived polymorphism is T
  VARIANT 191: note = Ancestral polymorphism is R, Derived polymorphism is H
MLLLHLQNRDLWRYRAMLNDTMCGVNSRIKPPWPLEHLLAAVVPTWHVAFTRGNILESFFKVDWKLALMLASSRRTTAPPRAATVLERLRICCELQHRFEEVQLSFLGVHGVEDTVCNPACVEELCRHAGSKDKTLCVYLGNRDVAPDCRRARGERGEGVRRNDRLAQGTGHHLHRYSHGRAPRRAVVWARLLRACVPWPGPILAFNHVWSIHHHKFYPRFLPATMEYSSTDATINLCCLLIKEFVFASVL

SEQ ID NO: 3339 - protein, 112 aa, Zea mays
  VARIANT 77..112: note = Derived polymorphism lacks residues 77 to 112
  VARIANT 64: note = Ancestral polymorphism is T, Derived polymorphism is I
  VARIANT 43: note = Ancestral polymorphism is D, Derived polymorphism is N
  VARIANT 37: note = Ancestral polymorphism is A, Derived polymorphism is S
  VARIANT 16: note = Ancestral polymorphism is D, Derived polymorphism is N
  VARIANT 5: note = Ancestral polymorphism is Y, Derived polymorphism is C
MPMSYNSWVAESLDFDKDYDASVFETTIRVVGGLLSSYDLSGDKVFLDKAKDITDRLLPAWDTTSGIPYNRINLAHGRAHNPGWTNVSYCYSVFPLSNHLYFKYLLKHTVVH

SEQ ID NO: 3340 - protein, 269 aa, Zea mays
  VARIANT 184: note = Ancestral polymorphism is G, Derived polymorphism is R
  VARIANT 214: note = Ancestral polymorphism is T, Derived polymorphism is M
MPLLAVCPRRVPPLSLARRHRRSLYRARSLALKCEVSSPPLLLTRRMSAAGSLLVAVVPVPAPSPQLPVASASELETETAEGESGASEGLALERYTDQEQGFTLLKPASWPKVEKAGATALFQQEGKGSNNIGVVVNPVRLNSLAEFGTPQFVADRLLQAEKKKVEMHEQYSLGIATLQCLRSGRLESTKSAEVISVGERSGHGGLTVYEIEYTLDSTRGGMKRIFSGAFVASRKLYLLNIAYSDTQEKPLDRETRTVLEKVLHSFDSV

SEQ ID NO: 3341 - protein, 457 aa, Zea mays
  VARIANT 259: note = Ancestral polymorphism is P, Derived polymorphism is L
MAGLLHLQSTLLPSASALRRRAGAPVPCSSRRRCRVEAKIREIFMPALSSTMTEGKIVSWTAAEGDRLSKGDPVVVVESDKADMDVETFHDGFLAAVLVPAGESAPVGSAIALLAESEEEIPVAQSQAASFSSSSPSPPPPQETAQEASPSPPPPPPSAPVAVSAPALPSPATQGGGRVVASPYAKKLAKDLGVDLFSVTGSGPGGRIVAKDVEAALAAPKKAAPVTAARPDVPLGSTVPFTTMQGAVSKNMVESLAVPTFRVGYTITTDALDQLYKKIKSKGVTMTALLAKATAMALVQHPVVNCSCRDGKSFTYNKSINIAVAVAIDGGLITPVLQDADKLDIYSLSRKWKELVDKARAKQLQPHEYNSGTFTLSNLGMFGVDRFDAILPPGTGAIMAVGASEPTVVGTKDGRIGIKSQMQVNVTADHRVIYGADLAAFLQTLAKIIEDPKDLTF

SEQ ID NO: 3342 - protein, 57 aa, Zea mays
  VARIANT 13: note = Ancestral polymorphism is G, Derived polymorphism is D
  VARIANT 22: note = Ancestral polymorphism is E, Derived polymorphism is K
  VARIANT 23: note = Ancestral polymorphism is M, Derived polymorphism is I
  VARIANT 31: note = Ancestral polymorphism is W, Derived polymorphism is R
  VARIANT 32: note = Ancestral polymorphism is D, Derived polymorphism is E
  VARIANT 44: note = Ancestral polymorphism is P, Derived polymorphism is S
  VARIANT 46: note = Ancestral polymorphism is R, Derived polymorphism is Q
  VARIANT 49: note = Ancestral polymorphism is C, Derived polymorphism is S
  VARIANT 52: note = Ancestral polymorphism is S, Derived polymorphism is L
  VARIANT 53: note = Ancestral polymorphism is G, Derived polymorphism is R
MPPDEPGERAVRDFSFHDMVIEMPRHDVRLWDLDGEGSATCSLPTRSVCGNSGSTLR

SEQ ID NO: 3343 - protein, 312 aa, Zea mays
  VARIANT 56: note = Ancestral polymorphism is T, Derived polymorphism is M
MLCFDLPSLFYLTGHYCFQMVQLLLSYESLEINAINIQNETTMDLADKVPYGESKMEIIEWLTEAGAKNARNVEKIDEASELRRTVSDIKHNVQTQLSENAKTNKRVTGICKELQKLHREAIQNTINSVTMVATLIASIAFIVIFNFPGQYFQDVNSGGDIGEAQIAKLTGFRVFCLLNATALFSSLAVVVMQITLVAWETSAQKQVIKIINKLMWTACLSTGAAFTSLAYVVVGPQHAWMAFTVSAIGGPIMIGTLLFLAYPLLCPRFKFGEDRQRRIKRAGGSKSFSWSLHDDFSDLEAFSDHEKMIYAL

SEQ ID NO: 3344 - protein, 50 aa, Zea mays; identical to SEQ ID NO: 1702
  VARIANT 18: note = Ancestral polymorphism is G, Derived polymorphism is R
  VARIANT 32: note = Ancestral polymorphism is G, Derived polymorphism is R
  VARIANT 40: note = Ancestral polymorphism is T, Derived polymorphism is I

SEQ ID NO: 3345 - protein, 176 aa, Zea mays
  VARIANT 160: note = Ancestral polymorphism is V, Derived polymorphism is M
  VARIANT 156: note = Ancestral polymorphism is G, Derived polymorphism is S
  VARIANT 141: note = Ancestral polymorphism is D, Derived polymorphism is G
  VARIANT 130: note = Ancestral polymorphism is T, Derived polymorphism is I
  VARIANT 91: note = Ancestral polymorphism is P, Derived polymorphism is Q
  VARIANT 79: note = Ancestral polymorphism is E, Derived polymorphism is K
  VARIANT 78: note = Ancestral polymorphism is R, Derived polymorphism is H
  VARIANT 76: note = Ancestral polymorphism is A, Derived polymorphism is S
  VARIANT 69: note = Ancestral polymorphism is R, Derived polymorphism is H
  VARIANT 56: note = Ancestral polymorphism is P, Derived polymorphism is L
  VARIANT 50: note = Ancestral polymorphism is R, Derived polymorphism is M
  VARIANT 49: note = Ancestral polymorphism is V, Derived polymorphism is M
  VARIANT 33: note = Ancestral polymorphism is A, Derived polymorphism is V
MRWCGAEEAVSGAVRASSSRHLGPVRALVSEEAAAGERAAEGEGEDVQVRLFVGLPADAVVSDGRGVGRPRAVSAALRELKLLGVDGVELPVSWAVAQPGPGGWFEWVGYRGVAAMVRDAGLDLRVSLRTDGDALPGWVADAAAADPDVLFTDRSGHRRVGCLSFAVDELAQRQGP

SEQ ID NO: 3346 - protein, 192 aa, Zea mays
  VARIANT 40: note = Ancestral polymorphism is G, Derived polymorphism is S
MFDAMPRRDGGSWNAIISASSRAGHPAEAFSLFADMNSLGIRPKDFTLASVLACCAAECLDLRGAQAAQQLHGHIVYGKCLSLTDARRAFDDILQPNDVFMEHNHPEVSSCCTKALQPGPKEGCGDVHFGCVRVELAVCGRIADAKLVFDGMEQHNLVSWNAMLTGYVKPMDLAGALDLFQQMRQRRRRSLM

SEQ ID NO: 3347 - protein, 105 aa, Zea mays
  VARIANT 52: note = Ancestral polymorphism is A, Derived polymorphism is T
MAAARQGPAGAGADAAVEDRMDLLWEDFNEELARGLWPESSDYSSDAESEPAAARGCAPALRPSSRAGAARHCRRRAGTWVLLIRIFRRLFVIEKTVAAATARAS

SEQ ID NO: 3348 - protein, 154 aa, Zea mays
  VARIANT 56: note = Ancestral polymorphism is P, Derived polymorphism is H
  VARIANT 16: note = Ancestral polymorphism is A, Derived polymorphism is V
  VARIANT 11: note = Ancestral polymorphism is E, Derived polymorphism is K
MDPEAVRKSLEPTATVEKITGSTPARLHFYDPFVLSGVSIEAAEHGRLLCSFVVTPRLASPAGYLRSGVTATLADQLGSAVFFCSGLPSSGVSLEISVSFVDAAAVGEEIEVEGKLLRAGKSVGVVSVDFRKKKTGKLMAQARHTKYLVASSRL

SEQ ID NO: 3349 - protein, 741 aa, Zea mays
  VARIANT 570..741: note = Derived polymorphism lacks residues 570 to 741
  VARIANT 539..741: note = Derived polymorphism lacks residues 539 to 741
  VARIANT 537..741: note = Derived polymorphism lacks residues 537 to 741
  VARIANT 521: note = Ancestral polymorphism is W, Derived polymorphism is C
MPAWWPRSKLRSRSKAKPGAGSVSAASSPRKSADLESPSPSPSPTPTPRDRKAHSLDFPGAAAARGRPAGAAPGHGSVGYKLPTPVEAVEPVGTLYEVVLAAAAAAAAGDGCSSAEESSVCSAASLDEPHYQHGFRPMDPAAFARERNMPSDSDRILNEDKCFMSCSMPREHQKFFDVPAASVRELHLQSDAPSTSEANCSRGRMISGDLFAPRTRSLSPIPKGHAFAVSNGNSREFGFSPRSPVRKMDGLRSPPHPLPLPPASGACSPLHPASGACSPLHPASGACSPLLPTHSFCSPLPSSPSSCPPLPASPTNCSQSQSQWKKGKLLGSGTFGQVYLGFNSENGQFCAIKEVQVIMDDPHSKERLKQLNQEIDMLRQLSHPNIVQYHGSELASSMGLFCGSSIISDESLSICLEYVSGGSIHKLLREYGSFKEPVIRNYTGQILAGLAYLHGRNTVHRDIKGANILVGPNGEVKLADFGMAKHISSFAEIRSFKGSPYWMAPEVIMNCKGYSLSVDIWSLGCTIIEMATARPPWHQYEGVAAIFKIANSKDIPEIPDSFSEEGKSFLQLCLKRNPASRASAVQLMDHPFVQDHPAVRAAKSSVLRNTPSSPADGRHTMSNRELPSRKIITPLKDIGLGMRDFTGFSTTVPSPHSSPIPGRANMSTPVSPCSSPLRQFKQSNVRGMRSPPHPMLSPGLGNTVSYTQNQTRRNPAPAISDPWMDVGQMKLQSPNISPRRF

SEQ ID NO: 3350 - protein, 329 aa, Zea mays
  VARIANT 38: note = Ancestral polymorphism is R, Derived polymorphism is C
  VARIANT 40: note = Ancestral polymorphism is R, Derived polymorphism is C
MASAEIPNSSPDATNPAPAAAAATGPDLSSSPPPLPPRKRRLSPSPPPTRSASRSRSPRSRSPHGRRSRSRSRSPQQYPTDGKRQRHNGLTVDACRDFLRDRCTRSDLECRYAHPHNSVSIDLDNKVTACADSLRNNCFRGMTCRYYHPPPHIQEQLLRSVGVEDPKVKTICRDFTRGKCSRSANECRFLHHSSVEDVAIVRVCQDFLRGQCNRIACRYSHVVAHPMPPMNHVPMPYPEMLYMPPPPPPPLGVPMMGPLPSPPIPFADNTNRVEVCRDFLKNMCNRESCRFVHPETHTTAVNANVEVCRDFKRGECNRSACRFFHPHTS

SEQ ID NO: 3351 - protein, 169 aa, Zea mays
  VARIANT 21: note = Ancestral polymorphism is G, Derived polymorphism is D
  VARIANT 72: note = Ancestral polymorphism is A, Derived polymorphism is T
  VARIANT 81: note = Ancestral polymorphism is G, Derived polymorphism is V
  VARIANT 85: note = Ancestral polymorphism is C, Derived polymorphism is G
  VARIANT 125: note = Ancestral polymorphism is R, Derived polymorphism is W
  VARIANT 161: note = Ancestral polymorphism is R, Derived polymorphism is S
MAASSATALAAALFEALDTDGDGKVSASELRGSAAAVALDEEEAAAVLAAAGADGDGLLGRDEFLRMACEAAAADQADADVRRRCLRAAFGMFADGQGQQGAAGTKEQEREQRITPASLQRMLGRLQVGAEQLPVGLDECRAMICRFDLDGDGVISFEEFRVMMHDGLM

SEQ ID NO: 3352 - protein, 752 aa, Zea mays
  VARIANT 424: note = Ancestral polymorphism is A, Derived polymorphism is T
MRKGILTGAAAGVEEVDIQGLGMQERKNLIERLVRTAEEDNERFLLKLRDRMERVGIDNPTIEVRFENLNIDAEAYVGNRGVPTMTNFFSNKVMDVLSAMHIVSSGKRPVSIVHDISGVIRPGSLLLALAGKLDSNLKVSGRVTYNGHDMDEFVPQRTSAYIRRHDVHVGEMTTCLLSFQEGRKKPTLKPDPDVDVYMKAISVEGQESVVTDYILKIADSGSGDLCGYNGWRLYDQRYLRRTKEACHNRHNLTKRIEHIENVLNDLKISHLLNQQSSSSSSKKERSSRHEDIEYLYRSIERKVIGRDKEREKLIRSGKSTLAQYVCDYEKAEGQHFDPVMFIHVSQTFREERAILLNVLDAGQSGSRVLVTAQKKDVAAAIGAEEQIPIPDMEEKQYFSMFMHYALEGKRVGDGRFIAIGRKIAKKLGRSPIAAVTVAARLRSNSSIDFWETTANLDMLDETMGALWWSYQQIGVDVRRCFAYCSTFPRGYRLVRGELVHIWIVQGFINTRVNATEQPEDIGLHYINELRTFSFLQIERTVFGTETEAFTIHDLLHELAERVSGSECFRVVSNSSPKHIPQEVRHLFVGTGTDSRAAIAKKILGLVNLRTLIIVEEYSENKRKTFAAEDDEERVELIFPSTFSKLYHMQSIYSEKISCAKDVTQNLTSLRHSSSSWMGFANVGRLTSLQSLRYFQVKREQGHELKQLKHLNNLRGTLAIDGLGVVRSKEEALEAHLASKEQLRKLELTFSVR

SEQ ID NO: 3353 - protein, 247 aa, Zea mays
  VARIANT 202..247: note = Derived polymorphism lacks residues 202 to 247
  VARIANT 176..247: note = Derived polymorphism lacks residues 176 to 247
  VARIANT 139..247: note = Derived polymorphism lacks residues 139 to 247
  VARIANT 93..247: note = Derived polymorphism lacks residues 93 to 247
  VARIANT 84..247: note = Derived polymorphism lacks residues 84 to 247
  VARIANT 82: note = Ancestral polymorphism is R, Derived polymorphism is C
  VARIANT 75..247: note = Derived polymorphism lacks residues 75 to 247
  VARIANT 73: note = Ancestral polymorphism is R, Derived polymorphism is C
  VARIANT 59..247: note = Derived polymorphism lacks residues 59 to 247
MGLQPRSAISRFAKIDGVCAALSMEGSPRYTLIPCSALSPVLALYMEGESLLQLLRLDRQRSAAGARRQAPRRRRRVPQRFRPRLPLPLQHVQRHASEEQFSRFLLYEVDAIRKACASLEEGYLPPVTFIVVQKRHHTRFCPKDHRSHKQTDRRGNILPGTTVDTKICHPSESDFYLCSHSGIHDELDAKPEELEGEELESQLLEPVAALSMHPVHVPGNKQPAHPASQKATAKDDKLAALQVEMAL

SEQ ID NO: 3354 - protein, 440 aa, Zea mays
  VARIANT 393..440: note = Derived polymorphism lacks residues 393 to 440
  VARIANT 328: note = Ancestral polymorphism is A, Derived polymorphism is D
  VARIANT 324..440: note = Derived polymorphism lacks residues 324 to 440
  VARIANT 319..440: note = Derived polymorphism lacks residues 319 to 440
  VARIANT 315..440: note = Derived polymorphism lacks residues 315 to 440
  VARIANT 206..440: note = Derived polymorphism lacks residues 206 to 440
  VARIANT 165..440: note = Derived polymorphism lacks residues 165 to 440
  VARIANT 129: note = Ancestral polymorphism is R, Derived polymorphism is W
MTDIRGRHQRPPPHAVDGARRSSSFRQHRAISGVSIRHQQKVPRILGKQERGRGGQGHNREAKLIQSGPFCRPHLDGFTVPPPHCDHGEGAGWLALGPPQPAARRDKARGAALFCWPSTPAPQWGQLRRIYNGPAPLADLAVGANHVTTYDASRQVVLWWRGGGWFPARADGAFRSLVSGDGFSCAVQANASATVRCWGPQGSVVQAVPDGINLDRMPLPGHQPINGACCIASTSGLVYSSDKIDEIMHHRQNLFEDWEVLDATIFAFWVTISVDIEPKRIRQKSSTYTSNTMIDNVIYFYLMYHWKVHFMKCERLSQQLDVSQVGHAGTLDPMATGLLIVCVGKATKIYYQGMVKGYSGVFRLGEATSTWDADSPLNPFSLMDMLIFKAVEEQVKKRVENKVRIFEQNATDSECKVNPKVLSKLYDQWVMPQTKDVYLD

SEQ ID NO: 3355 - protein, 83 aa, Zea mays
  VARIANT 65: note = Ancestral polymorphism is A, Derived polymorphism is T
  VARIANT 60: note = Ancestral polymorphism is S, Derived polymorphism is F
  VARIANT 26: note = Ancestral polymorphism is R, Derived polymorphism is Q
  VARIANT 19: note = Ancestral polymorphism is K, Derived polymorphism is N
  VARIANT 17: note = Ancestral polymorphism is A, Derived polymorphism is T
  VARIANT 12: note = Ancestral polymorphism is A, Derived polymorphism is T
  VARIANT 10: note = Ancestral polymorphism is G, Derived polymorphism is R
MPRSPLPPTRGAGPSGANKYGAYRARLASLPCRFHLLVLQLDDDVADLRELVGRLASKASAEAMAEGAAQLGRVVLSLSELLH

SEQ ID NO: 3356 - protein, 119 aa, Zea mays
  VARIANT 11: note = Ancestral polymorphism is G, Derived polymorphism is D
  VARIANT 13: note = Ancestral polymorphism is A, Derived polymorphism is T
  VARIANT 14: note = Ancestral polymorphism is P, Derived polymorphism is L
  VARIANT 20: note = Ancestral polymorphism is A, Derived polymorphism is V
  VARIANT 21: note = Ancestral polymorphism is E, Derived polymorphism is K
  VARIANT 30: note = Ancestral polymorphism is F, Derived polymorphism is S
  VARIANT 52: note = Ancestral polymorphism is L, Derived polymorphism is F
  VARIANT 56: note = Ancestral polymorphism is V, Derived polymorphism is G
  VARIANT 57..119: note = Derived polymorphism lacks residues 57 to 119
  VARIANT 58: note = Ancestral polymorphism is H, Derived polymorphism is R
  VARIANT 66: note = Ancestral polymorphism is S, Derived polymorphism is C
  VARIANT 68: note = Ancestral polymorphism is I, Derived polymorphism is N
  VARIANT 75..119: note = Derived polymorphism lacks residues 75 to 119
  VARIANT 76: note = Ancestral polymorphism is R, Derived polymorphism is L
  VARIANT 86: note = Ancestral polymorphism is Q, Derived polymorphism is R
  VARIANT 108: note = Ancestral polymorphism is R, Derived polymorphism is G
  VARIANT 110: note = Ancestral polymorphism is L, Derived polymorphism is I
MEIVEALHSHDIAPVSSLCAKYIVNLLPGSVAKVLALFLSNVVRCSGQLFMLTSCVLRMFPNLTGSSIYGCFSLQRLVEAKLQVVQLDANLLSIRRALLEQGIEAVLRELCICTRGRSQ

SEQ ID NO: 3357 - protein, 326 aa, Zea mays
  VARIANT 239..326: note = Derived polymorphism lacks residues 239 to 326
  VARIANT 230: note = Ancestral polymorphism is P, Derived polymorphism is L
  VARIANT 174..326: note = Derived polymorphism lacks residues 174 to 326
  VARIANT 146..326: note = Derived polymorphism lacks residues 146 to 326
MAPPLVPAAVPANAVGLRVQRGADRALFPLACGPLRGGGGGGRRRPTAQGERIEKCQYLESSGCVGMCVNMCKVPTQDFFTNEFGLPLTMNPNFEDMSCEMIYGQVPPLLEEDPASKQACYPSHCSMSTPSASACPKLHTSLNVNYLAKGYRELIDLMAKHKSDLEGFKLDVYGSGEDSQEVQSTARRYKVFKNLSISDVLCTTTAEALAMGKFMICVEHPSNEFFMSFPNCLTYKTSEEFVARVKEAMDREPQPLTPKQRYNLSWEATTERFMEYSDLDKVLNNEAAQPKQVAAAVVPQPSSCRTRRVRQWTSTSPGSGMFVVLV

SEQ ID NO: 3358 - protein, 330 aa, Zea mays
  VARIANT 205: note = Ancestral polymorphism is L, Derived polymorphism is H
  VARIANT 257: note = Ancestral polymorphism is P, Derived polymorphism is L
  VARIANT 270: note = Ancestral polymorphism is V, Derived polymorphism is A
  VARIANT 277: note = Ancestral polymorphism is G, Derived polymorphism is V
  VARIANT 306: note = Ancestral polymorphism is V, Derived polymorphism is G
MDMEDSGQFMQWAMATLQHDEDQAVDYPIDDGRGGATFPSLRALREASSQAAEMIQEPLAAANSRCGGDGGTAAAGNNISGTAPRRSSSGSAVIQPLRWNFGAGAAAPPGRDGVPVPAEAAATGSLLPDLAYGPPPTRKQAVLKSVGSIYAQDHIIAERKRREKINQRFIELSTVIPGLKKMDKATILSDATRYVRDLQEKIKAHEDGGGSNDRGIVESWVLVKKPCVAAPDEDAGSSPSWDSSGTTAPSPATNPLPEIEARFLNKNVTVRIHCVGVKGVVVRVLAELEELHLSIIHANVDEGFTVTAEEIVGRLKTSACINAPAKPLLQ

SEQ ID NO: 3359 - protein, 560 aa, Zea mays
  VARIANT 23..560: note = Derived polymorphism lacks residues 23 to 560
  VARIANT 230..560: note = Derived polymorphism lacks residues 230 to 560
  VARIANT 302..560: note = Derived polymorphism lacks residues 302 to 560
MVPGTRPHQKKQKAGTMSAANHQPPRTPVRLTRQSAAMPSPGGRPPPKPRHPLPPKTTLKATPKRNAISSSTQQQVQASTTTTETTETTNPVSFPPKMTRSTQAMSSPVPNTMPRPTRYTRTSGTMCTPGGHTMHSPLRFTRASAAMSSPGANPHHSPPRFTRASAAMSSPSANPHHSTPAAIAIVSQQPTPTTSVNKIVPMDNSPGGHSSRQSNAIIESAEQFDGATSEGNPNEGEPVGDFQPFQNVRRKTMGHGLEKMLNRGNRLAIHVAEEKKRPEVPLQAVKLASETGVALRDNLPIYKSWKLYDNVVGQAEVRKVLDKVASRLDVDVKNEGPSKDACIDIIKRGVRQTRYNLKRKYFDESLTKEQLLAMQPPPKMKKEDWTGLVEYWCDPKNQEKSAKNKANRGNVQLHQRTGARSYIAHRYSLEQMVAEKERELEEGEAQKSPSKIVADSLSQISRSSTFLPNIGVPTTFKTGRSTSLAAQARMQAQFEEKLQAKREEAARKQEELQAQIQAQQAALEENQSLLRQTQEEVKGMHTKFEETNALLRAVLKLQKD

SEQ ID NO: 3360 - protein, 598 aa, Zea mays
  VARIANT 322: note = Ancestral polymorphism is R, Derived polymorphism is W
  VARIANT 307: note = Ancestral polymorphism is R, Derived polymorphism is C
MAHRRYCPCTLSCFLVLLVPHLFLSSSHQESVAAMDVPSPSSLPPDKQQVAIMMNLSSAVGSSWASGTDMCNWTGVACSRSTSGSYMVVTNITLSGYGMSDASVFSPLCLLDTLLSLDLSMNFFTDLGDELSAASCRMMKEGLVSLNLSHNHLDGSIPSDLGSSKDLAILDLSYNNLSGAVPPSLWTLQNLTQLVLSYNNLSGLVPSSRLRQNLHVDIAGNPYLVVTGTGTGGKNHARKITAHIVVVAISAAASALVGLCFVLLCVSAMIPSPNRTYHVDNVVVPPWEDDDSQTTNGGLTALCCCWRTSFQALNFEAADILRGLREENLVGSGGSGHVYRVPYKSRHDRRVVGVVAVKQIPVFGTTSPDELFESEARILCSVRHNNIVKLLCCLSCPESKLLVYDYMDNGSLDRWLHEDYVLRARHPTARARPVRRVPLDWPTRLVAAVGAAQGLCYMHHHCSPPIIHRDVKTSNILLDAEFRGKVADFGLARMLMQAGEPNTMTWVLTTDRNANDGGDHGSLADWAGHQYRSGASIATDICVGYAGYADEIETVFRLGVKCTASSPSSRPTMAEALQILLRCSEQTLRKSRLECGTE

SEQ ID NO: 3361 - protein, 391 aa, Zea mays
  VARIANT 11..391: note = Derived polymorphism lacks residues 11 to 391
MHRQKNPNSGWAAFDRKQRSADGSGYEGDADPFPSLSNSGASNIASSSITEKNGLKRKPFASVVRPSVDSGAVSTGCGNKNSANHVDSGNHGAISAPLNKVKILKDAHSWADIHLIEDVLAAVNNDVGQASDLLKVMDSPALQTGEGRTSGQLADVMNKTHGSPSESAAAGKANPDSSQLLLPLMNFPSIPLQPEFEDIDDEYFSYRKDALKMMRAATKHSQSASNAFLRDDHAAAKELSLRAQEERAAAEKLNNKAAEEIFRLRNSNNDIWKIDMHGLHASEAVAVLERHLHMIEFQQPGNKSASSEDLAKLESAYSESTTGSNIELAAEKVVLRRPKQSILHVITGMGNHSKGQASLPVAVRGFLIENGYRFDELRPGVFAVRPKFRRR

SEQ ID NO: 3362 - protein, 396 aa, Zea mays
  VARIANT 108: note = Ancestral polymorphism is Q, Derived polymorphism is L
MDIPAADWDACACDLDDPGNFNPFLTYAFLSSLEESGSAVKETGWLPFHIVARDENGHIIGVVPLYLKSHSRGEFVFDQSWAEAYYNYGLEYYPKLQSCVPFTPVTGQRILLRNTSYRDQVFDALVKGLMSLTTKMNVSSLHITFPSEGEFSKLKDSGLLQRIGLQYHWRNRNYKSFDEFLMDLKQPKRKNIRQERKKIPAQNLQMKRLRGDEIKSRHWDTFYKFYRNTTDNHWGRPYLTRDFFHLLGEKMGDNVMLIVAEKDDKLVAGALNLIGGDTLFGRLWGCLPDAYFPNLHFEACYYQYSDIVQAIEAAIELNLSKVEAGAQGEHKIQRGYLPVTTYSCHYFSNPGFAAAIGNYLTHETAQVKHAIKVLRDSGPYKEDILKEFAAQQDDDL

SEQ ID NO: 3363 - protein, 415 aa, Zea mays
  VARIANT 84: note = Ancestral polymorphism is A, Derived polymorphism is V
  VARIANT 89: note = Ancestral polymorphism is T, Derived polymorphism is I
  VARIANT 135: note = Ancestral polymorphism is I, Derived polymorphism is M
  VARIANT 149: note = Ancestral polymorphism is R, Derived polymorphism is S
  VARIANT 187..415: note = Derived polymorphism lacks residues 187 to 415
  VARIANT 191..415: note = Derived polymorphism lacks residues 191 to 415
MPDKKSEHGVSRLHFLEERDEETLSRRLIKLSQNNKVRSATELFDSMRTSGLQPSAHACNSLLPCYVHRSPLADAMRMFEFMKAKGMATGHTYTLILKAVASNQGYVSALEMFNKIEEEEDSKKIIDVIVYNTMIYFCGRAKEWMLVERLWRRLEQHSLNGTLLAYDLLDNIFVQCGQSELAIAAYQEMLQKGLDPSEDIMKAIIASCTKEGKWEFAMSTFSRMMRAGMNLGLILFNSIINSLGKDGQDELAFRMYHLLKQSGLKPDQYTWITLLLALYRSGRCWDCLKLFHGIKGKHPTLLNDHLYNTALISCEKLGQWEHGLQLLWLMEKRGLKLSVVSYNHVIGACEVASKPKVALKVYQRMINQRCSPDTFTHLSIIRACIWGSLWTEVEDILEQSSMATLWMDIQMQILV

SEQ ID NO: 3364 - protein, 129 aa, Zea mays
  VARIANT 109: note = Ancestral polymorphism is P, Derived polymorphism is L
  VARIANT 72: note = Ancestral polymorphism is E, Derived polymorphism is K
  VARIANT 69: note = Ancestral polymorphism is G, Derived polymorphism is D
  VARIANT 54: note = Ancestral polymorphism is P, Derived polymorphism is S
  VARIANT 46: note = Ancestral polymorphism is R, Derived polymorphism is W
  VARIANT 32: note = Ancestral polymorphism is R, Derived polymorphism is C
MHVITYFTNIIGVVTIALVSIVSILGLICLCCLVYFQLWIRRRGYRWLSYFNESWLTRITLMLVAFWWGIGEVLRLTFVNGEGRLISDRAWQENVCKFYIISNMGFAEPGLFLLLSFLSVALQKQELGT

SEQ ID NO: 3365 - protein, 220 aa, Zea mays
  VARIANT 219: note = Ancestral polymorphism is L, Derived polymorphism is S
  VARIANT 184..220: note = Derived polymorphism lacks residues 184 to 220
  VARIANT 178: note = Ancestral polymorphism is P, Derived polymorphism is L
  VARIANT 169: note = Ancestral polymorphism is R, Derived polymorphism is G
  VARIANT 150: note = Ancestral polymorphism is T, Derived polymorphism is M
  VARIANT 136: note = Ancestral polymorphism is C, Derived polymorphism is F
  VARIANT 102..220: note = Derived polymorphism lacks residues 102 to 220
  VARIANT 93: note = Ancestral polymorphism is R, Derived polymorphism is C
  VARIANT 79: note = Ancestral polymorphism is L, Derived polymorphism is S
  VARIANT 56: note = Ancestral polymorphism is P, Derived polymorphism is H
  VARIANT 50: note = Ancestral polymorphism is T, Derived polymorphism is I
MTHMFPREGASSSSTSMSSQRSETHDDRMIAMVLSEEYAKLDGAMAKHLINLTSIPFPTYSDATMDHYRLLDRLNAYGLFEVRVSGDGNCQFRAFSDQLYRSPDYYERVRKEIVKQLKKCNTLYEGYVPMKYKKYCKKMKKSGEWGDHVTLQAAADKFAAKICLLTSFRDTCFVEIVPQYQAPQREIWLSFWSEIHYNSLYDARDLPSKYKPMKKHWLLF

SEQ ID NO: 3366 - protein, 157 aa, Zea mays
  VARIANT 117: note = Ancestral polymorphism is A, Derived polymorphism is T
  VARIANT 93: note = Ancestral polymorphism is A, Derived polymorphism is T
MQKDRAPSLPQPPRRRSTPSGSLRLSDLQCAAFLPRSLRLSPHYGLSGSTRHLGTSNRHHHYHHAHVQSTGGQGAGGGGGGELASRAKAAARAWPCCDSCGGCTRPEPPWCQRLDAAPCGCHPACRDCVKSSLSIDPPVYQCMDRVPSFCIAAAAAH

SEQ ID NO: 3367 - protein, 336 aa, Zea mays
  VARIANT 139..336: note = Derived polymorphism lacks residues 139 to 336
  VARIANT 93: note = Ancestral polymorphism is F, Derived polymorphism is L
MAAFSSSNGVPPGFRFHPTDEELLLYYLKKKVGFEKFELEVIREVDLNKIEPWELQETCRIGSAPQNEWYFFSHKDRKYPTGSRTNRATTAGLWKATGRDKCIRTSYRKIGMRKTLVFYRGRAPHGQKTDWIMHEYRLEDADDDDAQGGTSEDGWVVCRVFKKKCFFKIGGGEGSTTSSQGADAGGHLATMSPPLGGHHDLAYMHPHPYYHHAASYYSQMQAPGPHATAYSHHVQVQDLLTNHRPTDDDGAGTGYDFSGLPVENQPGGGLDVGSSDGVATDDGGQLAGERRDQTTGTAADHQWQAMDGFSNGGSAEVQQMTGAQRGGEMDLWGYGR

SEQ ID NO: 3368 - protein, 286 aa, Zea mays
  VARIANT 209: note = Ancestral polymorphism is M, Derived polymorphism is R
  VARIANT 169: note = Ancestral polymorphism is G, Derived polymorphism is S
MSPKRVVLAPDLGVRDSVPKEETGGEYKPSASVFPIHRSGAVHRSFDEDSSDYGSIAPHGDAAEGCPTKPSAMPRVVLRSRHALRLPTQRLLMAEAERRHGSDTVWNGRSRSGDWIKVHWAGAKQIWWTPKDQGVVPPALVRGCWSSCHGWHRSGLVNLKSQMCELSFGLILVELLYLQQRFLASVFLVYQIIKKDFSIARFAQVERWMEKLEESETKVGFLWYEHIYKLDKDNHLGSPVAAALARFLGSHVRALNATDIGLGTVGFQILEETLPTEVALSHINIR

SEQ ID NO: 3369 - protein, 275 aa, Zea mays
  VARIANT 13..275: note = Derived polymorphism lacks residues 13 to 275
  VARIANT 24: note = Ancestral polymorphism is N, Derived polymorphism is K
  VARIANT 248: note = Ancestral polymorphism is R, Derived polymorphism is W
  VARIANT 249: note = Ancestral polymorphism is W, Derived polymorphism is S
MATGTGRRFRRAKLKILLVVIASNLVCVHLFSGASLSVHIPASAPRIHLWDSAAPLRGLNATRAALAGARAELAAVRAQCNASSYLLESEELARYMTYNVGGECPEDDALALQVALKGCEPLPRRCCRPREPARYAEPVVRRSVPPDATVRWALYTCRNYSCLVKRARARGGPYFCKDCFDLEGKERRRWQADNGVLDMVRSMNVLSDWVHRARRRARVDALRHLLPAQHNLRGYVPIFDRVGFRRLRWKAGRKLDLGAERNEWYVSALLEKPMT

SEQ ID NO: 3370 - protein, 146 aa, Zea mays
  VARIANT 81: note = Ancestral polymorphism is Y, Derived polymorphism is C
  VARIANT 29: note = Ancestral polymorphism is P, Derived polymorphism is H
MSTTRPEDTQQLINSAAASPNRSAPSAAPSDMERGSGTAASSSRASTTSHSHQRATHRVVEEEEEEEPSSSRGGGSLCSGYLSLPALLLVGVTASLVILPLVLPPLPPPPSMLMLVPVAMLLLLLVLAFMPTSSTGGRGGTGPTYM

SEQ ID NO: 3371 - protein, 364 aa, Zea mays
  VARIANT 59: note = Ancestral polymorphism is W, Derived polymorphism is R
  VARIANT 60: note = Ancestral polymorphism is E, Derived polymorphism is V
  VARIANT 157..364: note = Derived polymorphism lacks residues 157 to 364
  VARIANT 236..364: note = Derived polymorphism lacks residues 236 to 364
MDRHGSARLATPEDVFTDFRARRDGILKALTTDVEKFYKLCDPEYKDNLCLYGLPNKTWEVNVPAAEIPPELPEPAEGINVTRDSMPKEDWLSFVAVHSDAWLVAVAFHFGALHGFDKDARRQLHIMINNHPTVYEVVIGSGEKQPKAHNTNYETKSSSIKEPSSSSKLAEQPLPKKERQIIKEDGGDKDEAFLCGTCGGMYSENGVFWIGCDICDKWYHGDCVRITPAEAKHIDQRRLHMMINNHATVSEVVTGSGEKQPKACNTNYETKSSSIKEPGSSSRLAEQPLPKKERQIIKEDGGGKDQAFQCGTCGGMYSENGVFWIGCDICDKWYHGDCVRITPVEAKHIDQYSCPACSNKRSRE

SEQ ID NO: 3372 - protein, 248 aa, Zea mays
  VARIANT 39: note = Ancestral polymorphism is K, Derived polymorphism is E
  VARIANT 41: note = Ancestral polymorphism is C, Derived polymorphism is Y
  VARIANT 56: note = Ancestral polymorphism is E, Derived polymorphism is G
  VARIANT 63: note = Ancestral polymorphism is P, Derived polymorphism is R
  VARIANT 130: note = Ancestral polymorphism is H, Derived polymorphism is Y
  VARIANT 206: note = Ancestral polymorphism is E, Derived polymorphism is V
MDRHGSVRLPTPEDVFTDFRARRDGILKALTTDVEEFYKLCDPEYETLCLYGLPNETWKVNVRPAKVPQQLPEPAEGINIPRDSMPKEDWLSFVAAHSDAWLVAMAFHFGALFGFDKDARRRLHMMINNHPTVSEVVIGSGEKQPKACNTNYETKSSSIKEPSSSSKLAEEPLPKKERQIIKEDGGGEDEAYPCGTCGGMYSENGVFWIGCDICDKWYHGDCVRITPAEATHIDQYSCPACSNKRSRE

SEQ ID NO: 3373 - protein, 70 aa, Zea mays
  VARIANT 1: note = Ancestral polymorphism is L, Derived polymorphism is M
  VARIANT 8: note = Ancestral polymorphism is Q, Derived polymorphism is K
  VARIANT 13: note = Ancestral polymorphism is V, Derived polymorphism is M
  VARIANT 28: note = Ancestral polymorphism is V, Derived polymorphism is I
  VARIANT 36: note = Ancestral polymorphism is C, Derived polymorphism is Y
  VARIANT 39: note = Ancestral polymorphism is T, Derived polymorphism is A
  VARIANT 40: note = Ancestral polymorphism is A, Derived polymorphism is T
  VARIANT 41: note = Ancestral polymorphism is E, Derived polymorphism is K
  VARIANT 47: note = Ancestral polymorphism is I, Derived polymorphism is N
  VARIANT 52..70: note = Derived polymorphism lacks residues 52 to 70
  VARIANT 54: note = Ancestral polymorphism is R, Derived polymorphism is K
  VARIANT 62: note = Ancestral polymorphism is A, Derived polymorphism is T
MQNLTQYQAVERMNPMLVPTDLDVGTMVTFPVLCQCPAAAENATTLITYVMQPRDTYVSVAATFSVAYPQ

SEQ ID NO: 3374 - protein, 532 aa, Zea mays
  VARIANT 224..532: note = Derived polymorphism lacks residues 224 to 532
  VARIANT 62..532: note = Derived polymorphism lacks residues 62 to 532
  VARIANT 59..532: note = Derived polymorphism lacks residues 59 to 532
  VARIANT 39..532: note = Derived polymorphism lacks residues 39 to 532
MNTTGYTQASNYRKIPLTYLHLIPDQVSYRTRKMEYTLLPDLAPHKIHAKIQVHVSRKWLFRGATDSGPLQHVDMVLSDREGNAIYAEIPGNLAEQKATNIEEGGVYDINRFRVCAAKTVFKIVDGDKMIQFTFHTIVKCATSPPTTFPLYVYRLTSFDLIEPHVQTTNNFVDVLGVITEIHELTPVHVRSQLTPTVTRTIIIEDLRWYFNPTIPEAEPYLTSQSTKRIVLQLPQNLQHPPAMETKPIVEHKSLYELLTVNPYDFPETGFECTITIAEIPAEHKWWFPSCTKCNKATIPHTTGYHCESCNWDGYKFKYKLKFLASDETDIAEMFCFDTVARHIVGKSCEIVLRSVTEQSPIPPDLAQIISLKFTFRVTIDNQSLFQQTSCPNVFRINSIVAAHGRQRSLPMQIGISDQQGPSTPQNKSKPIANKSNINSPEKDDGDKETAQSPILYYCSIYICYKTLHIFRFFIKNFDICSLIQYPLTKEKDQQIQLNRHLKGSNKGRYASEKKWTSNPPRTKVSLRSSSTF

SEQ ID NO: 3375 - protein, 217 aa, Zea mays
  VARIANT 19: note = Ancestral polymorphism is A, Derived polymorphism is V
  VARIANT 76: note = Ancestral polymorphism is A, Derived polymorphism is V
  VARIANT 126: note = Ancestral polymorphism is A, Derived polymorphism is S
MSRRAAAALALACLAVMAAALADGALLPWFGEGRRGGDEAAAAAASPLSGPGVGLLADPFRILEHVPLGFDRDDVAMVSMARADWRETPDAHEIVVDVPGMRREDLKIEVEDYSRVLRVSGERRRAEEHRGDHWHREERSHGRFWRQFRLPENADLDSVGASLDNGVLTVRFRKLAPEQVKGPRVVGIAGGDGDGDAKKSIGGGAGDGHHQTKKVEL

SEQ ID NO: 3376 - protein, 140 aa, Zea mays
  VARIANT 78: note = Ancestral polymorphism is S, Derived polymorphism is G
  VARIANT 32: note = Ancestral polymorphism is R, Derived polymorphism is W
MTSPMVATPVQFHTTGRLSFCSFSFPSASGRRRFAAVRASAETMATEKLGIKVERNPPESRLSELGVRQWPKWGCEKSKFPWTYSAKETCYLLQGKVKVYPEGHGEEFVEIGAGDLVVFPKGMSCTWDVAEAVDKHYNFE

SEQ ID NO: 3377 - protein, 108 aa, Zea mays
  VARIANT 2: note = Ancestral polymorphism is A, Derived polymorphism is V
  VARIANT 38: note = Ancestral polymorphism is G, Derived polymorphism is S
  VARIANT 48: note = Ancestral polymorphism is C, Derived polymorphism is F
  VARIANT 63: note = Ancestral polymorphism is Q, Derived polymorphism is L
MAASAGESQGVERLLSYAEDLVAVLCVSTDCDDNAQVGAGVQRLLSACRSESDDLEMQLKEYQEKIHSCKEKIDKAKAETITDDELNALQSKMEEKLQEEKQLRQELR

SEQ ID NO: 3378 - protein, 392 aa, Zea mays
  VARIANT 120..392: note = Derived polymorphism lacks residues 120 to 392
  VARIANT 116..392: note = Derived polymorphism lacks residues 116 to 392
MDDDDDVSPSSSPSPPSSSALPVDGPVTVAAAPPGASMAVALPIHRTAASLYASAGGDGGGGGGREDAWSDGATSALIDAWGERFVALGRGSLRHPQWQEVAEAVSSRDGYSKAPKSDIQCKNRIDTLKKKYKVERIKPVSGWQFFDRLDFLLAPTYGNKPGNGGGGHNSNSRSQMPAAPRVGFPQRSRTPLMPAAGSGAKRRAPSPEPSVSSDSSDGFPPMPALPAVNGKRKRTDDGRSDGGGDRAQGLRELAQAIRRLGEAYERVEATKLEQEAEMERRRMDFAQELESQRVRFFLDTQMELTQAKNHASPATAAVPAVGSSRRIPRMSLVTDAGGSSNHHSRYRISHVDRHRHAPRPHYQQYHDNNNAGAAAASDGEQSDEEDYEEESQ

SEQ ID NO: 3379 - protein, 137 aa, Zea mays
  VARIANT 1: note = Ancestral polymorphism is M, Derived polymorphism is I
MLINISFLYLIKTISAVTDGTNFFSYLISEKLIVLLRDGRKLLGTLCSFDQFANVVLQGACERVIVGEQYCDVPLGLYVIRGENVVLIGELDREKDELPAHMTCVSEAEIRKAEKAEREARDLKGTMRKRMEFLDFD

SEQ ID NO: 3380 - protein, 110 aa, Zea mays
  VARIANT 44: note = Ancestral polymorphism is A, Derived polymorphism is G
  VARIANT 21: note = Ancestral polymorphism is A, Derived polymorphism is D
MGEEAPPPPSRAVVLPRRAAAAAHSSFRLPRRRKVHVVRLGGGARGRGPGPGLRRWLRRAAWRLAELCVAALSSGSGRPGEAYPPWADVERYFAAPFVPVARDRRRPARS

SEQ ID NO: 3381 - protein, 199 aa, Zea mays
  VARIANT 42: note = Ancestral polymorphism is N, Derived polymorphism is S
  VARIANT 47: note = Ancestral polymorphism is V, Derived polymorphism is I
  VARIANT 49: note = Ancestral polymorphism is G, Derived polymorphism is D
  VARIANT 72: note = Ancestral polymorphism is I, Derived polymorphism is T
  VARIANT 80..199: note = Derived polymorphism lacks residues 80 to 199
  VARIANT 96..199: note = Derived polymorphism lacks residues 96 to 199
  VARIANT 101: note = Ancestral polymorphism is L, Derived polymorphism is R
  VARIANT 110..199: note = Derived polymorphism lacks residues 110 to 199
  VARIANT 175: note = Ancestral polymorphism is S, Derived polymorphism is L
  VARIANT 179..199: note = Derived polymorphism lacks residues 179 to 199
MDKSVPVVSKIFCSGAPTMLMIRRRPAVVNGGGFVVTDLSHSIVFIVDGCGTLGSKGELMVKDGEGEPILSISKKGGIVQALSTRNRWNGYSMDYQGKNKLVFSLTDPKSCTAQGAPVRVHVEPKRQCKKWDFEIGGSFADRDCTIVDCTRKIVAQMGKKGLMGGKDFYHVEVQSGYDQAFIIGVMAILDSIHGESTRC

SEQ ID NO: 3382 - protein, 495 aa, Zea mays
  VARIANT 385..495: note = Derived polymorphism lacks residues 385 to 495
  VARIANT 448..495: note = Derived polymorphism lacks residues 448 to 495
MSSFWGVEVKPGKPYTLTHGDFAGRLRLTQATLGVEVGKGEKATGVKRCVLQCSAENRDPVFLCVLMPEQSETCHLELEFEEEVTFSVIGPRSIHLAGYYMTDVCGEDRGDSDSGSDSLQSSDEDGFLEEDDDGNMVMGYSDSEDDDSESDDEEMAYNQGRGKSSVVIEEIEEDDKAAVAEVQKGLKKQSRENGDESQLQLAARNPPTESLESEDEDGFPVSFSESKKSSEIVSNKNGGKDKETSNKDLKRKSGAISDRGDSSGGVKAEIDGASKKKKKGKDKSTVMDTGKVNNEEKEVKLHDSPADPVSTKQKKKKNKNKSASEGDTSEQSAKNNNIDKDNEEASAQEANKKIKKKKAHDISRSESQAGTGLGESDSKEPLQTRTFANGMMIQEVEMGKPDGKKASRGKKVSVRYIGKLKNGTIFDSNVSGRPFEFRLGVGQVISGWDVGVNGMRVGDKRRLTIPPSMGYGSKRVGQIPQNSTLIFDVELVNVK

SEQ ID NO: 3383 - protein, 929 aa, Zea mays
  VARIANT 316..929: note = Derived polymorphism lacks residues 316 to 929
MELLGRSFAPGHAAAAPRRGGGPCFAAVGREGSGAHRRRSSSSSSLRSTAPVDALAERVVAPPERAEAVPPEPSVAARAVVTVRRSRKRDAKCRVAERLDACADWVGRSVLLELISTETDPRKGGPKKSRRSALVGWFGEKDVKAERVVYTADFNVDGSFGEPGAVAVLNRHQREFFVESIVVEGFPSGPAHFTCYSWVQPTRVHRDPRVFFTNKPYLPAQTPPGLRELRRLELSDLRGEGAGTGGERRTTDRVWEYDVYNDLGNPDMGAEFARPILGGDQQLPYPRRMRTGRPKTFTGKPPLLPPPPPPPPPAHYDRAESRVEYPEPIYVSRDEEFEEGKNEMLSEGALKALLHNFMPLLVSSVSPDFRDFAGFHDVDNLFKEGLRLKQALQDQLFQKIPFVRKVQENSEGLLRYDTPDIIKRDKFAWLRDDEFARQALAGINPVNIERLQAFPPMSKLDPAVYGPPESAITEEHIIGRLDGMSVQQALEDNRLYMLDYHDIFLPFLDRINAQDGRKAYGTRTLFFLTGAGTLKPIAIELRLPPMTDGCARAKRVLTPPADATSNWLWQLAKAHVCSNDAGVHQLINHWLRTHACMEPFIIAAHRQMSAMHPIFKLLKPHMRYTLKINALARQILINGDGVIESGFTPGRYCMEMSSFAYRELWRLDQEGLPADLIRRGMAVEDPTKPHGLRLLIEDYPYATDGLLLWSAITRWCGAYVATYYPSDESVQADTELQSWYTEAVQTGHADKRGAPWWPRLTTPGDLASLLTTLLWLTSAQHAALNFGQYPLGGYIPNRPPLMRRLVPAEGDPEHAHLVADPHRFFLSALPGLTQATTFMTVIDTLSTHSADEQYLGERPDEAWTADPAALAAEREFADEVRRAEEEIGRRNTDAGRRNRCGAGVLPYELMAPTSGPGITCRGVPNSVTI

SEQ ID NO: 3384 - protein, 375 aa, Zea mays
  VARIANT 2: note = Ancestral polymorphism is P, Derived polymorphism is A
  VARIANT 30: note = Ancestral polymorphism is A, Derived polymorphism is V
  VARIANT 48: note = Ancestral polymorphism is P, Derived polymorphism is S
MPNGGGKRWLLLLPLSRWVLLLGSLQLPAVGGSGHVVTRMRGFDGPLPFYLETGYVEVDEQQGVQLFYYFVRSERDPYEDPLLLWLSGGPGCSGISGLAYEIGPLKFDARGQGEFPTLLYRPETWTKVSNIIFVDSPVGTGFSYAKSEEGLETGDTKQVKQLVIFLRKWLQDHPRFVMNPLYIAGDSYSGLIIPTLALEIDRSIELGEKIFSGLKGYIAGNPLTGGQFDTDSQIPYFHAMGLVSDELYKNARENCGGKYSAPLNAVCAEAVQAINNSLTAYLTYTFLWPQEALYILSYAWGNDDTVQESLGIRKGTIGAWKRYSHALPYNYDIQSVVDYHSRLATKGYRALIYRAATTMLLYPMLAHKHGLDTST

SEQ ID NO: 3385 - protein, 344 aa, Zea mays
  VARIANT 80: note = Ancestral polymorphism is R, Derived polymorphism is L
  VARIANT 163: note = Ancestral polymorphism is P, Derived polymorphism is R
  VARIANT 188: note = Ancestral polymorphism is S, Derived polymorphism is R
  VARIANT 189: note = Ancestral polymorphism is N, Derived polymorphism is Y
  VARIANT 230: note = Ancestral polymorphism is G, Derived polymorphism is D
MAATRQLRAPAMASPPRNVGTRTTSNPEIPEFLVGPAGRPVPAVGLGTASFPFVEENVRTAVLAALELGYRHLDTASLYRSERAVGDAVAEAARRGIVASREEVFVTTKMWCSQCHPDLVLPSLKESLQNLQMDYVDLYLVHWPIAAKPGKPQFPFKREDIMPMDLIGVWRAMEECHRLGLARMIGVSNFTTKKLQELLAIAKIPPSVNQVEMNPIWQQKRLAEFCKDKGIHLTAYSPLAGQSTSKVNPVMQSEVLQEVAKARGKSVAQISLRWIYEQGASVVVKSFGRDRLKENVEIFDWELTNEDRRKISQIPQHKRVTVLGILSPDGVSSVDLAELDIVEM

SEQ ID NO: 3386 - protein, 101 aa, Zea mays
  VARIANT 17: note = Ancestral polymorphism is G, Derived polymorphism is R
  VARIANT 21: note = Ancestral polymorphism is P, Derived polymorphism is L
  VARIANT 22: note = Ancestral polymorphism is S, Derived polymorphism is G
  VARIANT 24: note = Ancestral polymorphism is L, Derived polymorphism is M
  VARIANT 30: note = Ancestral polymorphism is A, Derived polymorphism is T
  VARIANT 35: note = Ancestral polymorphism is G, Derived polymorphism is S
  VARIANT 55: note = Ancestral polymorphism is R, Derived polymorphism is H
  VARIANT 63: note = Ancestral polymorphism is S, Derived polymorphism is L
  VARIANT 72: note = Ancestral polymorphism is K, Derived polymorphism is N
  VARIANT 73: note = Ancestral polymorphism is P, Derived polymorphism is L
  VARIANT 75: note = Ancestral polymorphism is D, Derived polymorphism is N
  VARIANT 88..101: note = Derived polymorphism lacks residues 88 to 101
  VARIANT 90: note = Ancestral polymorphism is R, Derived polymorphism is P
  VARIANT 92: note = Ancestral polymorphism is P, Derived polymorphism is H
  VARIANT 96: note = Ancestral polymorphism is A, Derived polymorphism is G
MYKFLAKLFGGSSSLCGRSSPSSLAMLLAAPPCTGVDLAVQSWPIEMFILFCLCRRESLMKMSEPAVLSHFKPADYVSILAQIHKELECRPPDDKASLYLL

SEQ ID NO: 3387 - protein, 176 aa, Zea mays
  VARIANT 62..176: note = Derived polymorphism lacks residues 62 to 176
  VARIANT 84: note = Ancestral polymorphism is A, Derived polymorphism is G
  VARIANT 104..176: note = Derived polymorphism lacks residues 104 to 176
MLRNVRNTNMPMDTFVKKVTELNLYLVLLPLDGQSVPKLEKPYHSCLPTLSIRHLCQFVALQLSRQPKEVEIYIRKNKDACLSANYTRKYETKPEQPNGLERLWEENSLSDLYPSLATCQRRSGPCYSIGPLCSGSGISTERHYLLPSHFRDEVIPSQLCPSQRKDVKPHSYHATN

SEQ ID NO: 3388 - protein, 331 aa, Zea mays
  VARIANT 114: note = Ancestral polymorphism is L, Derived polymorphism is V
  VARIANT 212: note = Ancestral polymorphism is A, Derived polymorphism is V
MASTGTTAAAVPEVTLRSGNGKPMPMVGMGTASFPVVHEAVRDAVLAAIEVGFRHFDTAFLYGTEKPLGDAVAEALRRGLLRSREELFVTSKLWCSQTHADLVLPSLRETLENLQMEYVDLYLIHWPVCLRPAGGPPKFPNRKEDAVPLDVAGVWRAMEECQRLGLARAIGVSNFTTRHLDKVLAIAAVPPAVNQVELNPAWQQRTLRAYCADRGVHVAAYSPLGGQNWDGRGNAVLDSEVLAEIARARGKTVAQVALRWIHEQGVTCIVKSYNRERLKQNLEIFDWELTDDDRLKISHIPQRKVVEASGLFSQEGEFTSVDPAELNIVEE

SEQ ID NO: 3389 - protein, 261 aa, Zea mays
  VARIANT 164: note = Ancestral polymorphism is T, Derived polymorphism is I
  VARIANT 26: note = Ancestral polymorphism is V, Derived polymorphism is D
  VARIANT 15: note = Ancestral polymorphism is A, Derived polymorphism is E
MANRPHLVHPSCLLAPLSSPPSPTRVACRSCSSQQSLTSHCQSAMQLFSGRSKEHRIGGGGQCHAAAGTTRHGKGGKCRALCCGASRLSVSSSASCSSADAAPAPLALPPTQLRGLSRLEHGMVQARLQSMVDAAAEAGRPSLARCPDDELAVRHRLGFPRAWTRGGGGGGGSYEKSVREQAGTRRACIVLLAEDRRTHEPREEFRRSIAEVIAAKRMAEPAELRALLNCYVSVNAREHRAAILQAFHEVCSALFSCKQLG

SEQ ID NO: 3390 - protein, 639 aa, Zea mays
  VARIANT 261..639: note = Derived polymorphism lacks residues 261 to 639
  VARIANT 320..639: note = Derived polymorphism lacks residues 320 to 639
MERSEPSLKPEWLLRPTVPATTYKPATLPHTDDHGRGASSRNRSSGRDRDRSSQHSSSRRGSSSSGPRRNDRDGIGKSRGYGNFGKHNKERIQEKDLDFRDRESRLVQSDDPLRDGFESFSSCRSEKDRLNRTRSKVAISNRAVGVSLDNGNVSKKDNGVISFEREFPHLDSEDKNGKQDIGRVPSPGISTPIQNIPLVVSDGWNSVLAMLGDPNINSVSSSSTHAGSSKQTEVSNSGSALSMAETVMQSPLKISTTPQLSIDAQKIEERTMRQCILRPLTPSSNKIPVSTLFIAFASSSLDKLLKSKGARAGESNGPIKVAPQLSTQPSSNSVRTPVKTELVKQSQSGSLQVLSREQNGAVNTAAKDSTSNPVSPVLGRSSSMEPMRKSIVSPKLKVGTNGRSLHPLQGSFADRKASAKDKYKFFEMLRSKSVNGSSAAIESPSSLTDDQQNSNLDLPFKFIENGSSSCEEANSCEGSQRHLSDNETIPPSESHDVLDEGSLGIQVEDKDVSSSQVLGGTQDLSSKKPQEDNVNIVPIVPVYVNDGLMMPNSVDDEASLPLEETNPAEVLQHIGAGEENPCPAQEFESIGAGGEEELNLLRSMGWDENEDVQPLQQEEIADCLKQNVRLQQKLQECKG

SEQ ID NO: 3391 - protein, 202 aa, Zea mays
  VARIANT 48: note = Ancestral polymorphism is C, Derived polymorphism is F
  VARIANT 38: note = Ancestral polymorphism is P, Derived polymorphism is L
MEFLHDACSQSFSFEQKCVELMDSYATLLFAKITEIRPEAFCKRYGLCRDTALLSGVGSDSTCVFCHHLLDEIMSKLKDPDAEFEIIQILVKECNKIEGHVQQWLKGLKVGIVDIFAILHGFPDNVRTNQKGEFWVAIHCRRSMYPRLMSCHVKLRKFLLSFPIPAKYHYLMHIDSKLYALIIRDSPMARCFTSWRTTRERW

SEQ ID NO: 3392 - protein, 168 aa, Zea mays
  VARIANT 93: note = Ancestral polymorphism is Y, Derived polymorphism is C
  VARIANT 91: note = Ancestral polymorphism is R, Derived polymorphism is W
  VARIANT 25: note = Ancestral polymorphism is L, Derived polymorphism is R
  VARIANT 2: note = Ancestral polymorphism is A, Derived polymorphism is V
MAGGGGAATAAAAGAAVGMPSQAMLPVRRRCEGMTMGASTLDLRSGLGVDPFTLELPPRPLLEILARELRRRLGLRLFNIDMIREHITRDRFCVIDMNYFPGMWLLPCVASLFAGKGAPSPRRAPRPLPTLVVVTEVLHGLDKVLEGGAVVMTLRDHSIPSNGDINET

SEQ ID NO: 3393 - protein, 475 aa, Zea mays
  VARIANT 317: note = Ancestral polymorphism is S, Derived polymorphism is Y
MEPSSAAARLLLLVAVAAVAAASGATTGALAATPSPRPNPKLRGLRVRLTHVDAHGNYSRLQLLQRAARRSHHRMSRLVARATGAASTSSSKAAAAGDGSGGKDLQVPVHAGNGEFLMDLSVGTPALPYAAIVDTGSDLVWTQCKPCVECFNQTTPVFDPAASSTYAALPCSSALCADLPTSTCASSSSSSSASSPCGYTYTYGDASSTQGVLATETFTLARQKVPGVAFGCGDTNEGDGFTQGAGLVGLGRGPLSLVSQLGIDRFSYCLTSLDDAAGRSPLLLGSAAGISASAATAPAQTTPLVKNPSQPSFYYVSLTGLTVGSTRLALPSSAFAIQDDGTGGVIVDSGTSITYLELRAYRALRKAFVAHMSLPTVDASEIGLDLCFQGPAGAVDQDVQVQVPKLVLHFDGGADLDLPAENYMVLDSASGALCLTVMASRGLSIIGNFQQQNFQFVYDVAGDTLSFAPAECNKL

SEQ ID NO: 3394 - protein, 676 aa, Zea mays
  VARIANT 188: note = Ancestral polymorphism is P, Derived polymorphism is L
  VARIANT 191: note = Ancestral polymorphism is R, Derived polymorphism is W
MPTVLSTRRAASPETISLPSSRSSHSRTASPLHPVSRGNRALRLLAALRSPSAPRPRLRRRPGLPPARAGLAAAAAMPAPETKARILVAGGGIGGLVFALAARRKGFEVLVLERDVSAVRGEGRYRGPIQLQSNALAALEAVDAAAADEVMDAGCVTGDRVNGIVDGVSGSWYIKFDTFTPAAERGLPVTRVISRMTLQQILARAVGDDAILNGSHVVDFTDDGSKVTAILEDGRIFEGDLLVGADGIWSKVRKTLFGHSDATYSGYTCYTGIADFVPPDIDTVGYRVFLGHKQYFVSSDVGAGKMQWYAFHKEEAGGTDPENGKKKRLLEIFDGWCDNVIDLVNATDEEAILRRDIYDRPPTINWGKGRVTLLGDSVHAMQPNLGQGGCMAIEDGYQLAVELENAWQESVKTGTPMDIVSSLRRYEKERRVRVAVIHGLARMAAIMATTYRPYLGVGLGPLSFLTKLRIPHPGRVGGRFFIKYGMPAMLSWVLGGNSSKLEGRPLSCRLSDKAHDELYRWFDDDDALEQAMGGEWYLFATSEANNNSLQQPIRLIRDEQRSLSVGSRSDANDSASSLSLPFPQISERHATITCKNKAFYLTDLGSEHGTWITDNEGRRYRVPPNFPVRFHPSDVIEFGSDKKAMFRVKVLNTLPYESARSGKQQGLQQEQVLQAA

SEQ ID NO: 3395 - protein, 443 aa, Zea mays
  VARIANT 269..443: note = Derived polymorphism lacks residues 269 to 443
MSASRSGRRRTGSVALGDLLQREASAERAALGCGERPSVAAGQACRAKKGEDFALLKPACERRPGAPSTSFSAFALFDGHNGSAAAVYAKEHLLGNVLSCVPTDLAWDDWLAALPRALVAGFVKTDKDFQTKAHSSGTTVTLAIIDGSVVTVASVGDSRCVLEAEGSIYYLSADHRFDANEEEVGRVTECGGEVGRLNVVGGAEIGPLRCWPGGLCLSRSIGDQDVGEFIIPVPYVKQIKLSNAGGRLIISSDGVWDALTAEMAFKCARGLPPEAAAEQIVKEAVEAKGLRDDTTCIVIDIISPEKPKRTIQSQRTPGKGLVLLKNFFLRKTTSDSLSLPDKDNYPEPDLEEVFEDGCPSLSRRLNSEYPVRDMFKLFACAICQIDLESGQGISIHEGLSRPGKLRPWDGPFLCHSCQEKKEAMEGKRHSRDSSSRNSGSSES

SEQ ID NO: 3396 - protein, 322 aa, Zea mays
  VARIANT 311: note = Ancestral polymorphism is L, Derived polymorphism is P
MSSVMTAAKGDDVVVHDFAPLLLVYKSGRLERPLAMPTVSSGRDADTGVVSKDVTLSPHSLSVRLYLPPAATTAPERRLPVVVYFHGGGFVVGSARSAVYHRCLNDLAAACPAVAVSVDYRLAPEHPVPAAYEDSLAALKWALAPSSATDPWLAAHGDPARVFLAGDSAGGNICHHLAMHPDIRDAGLRGVVLIHPWFWGRDPIPGEPPLNPASKQQKGLWEFVCPEAVDGADDPRMNPTAPSAPGLDNLACQKVMVCVAEGDVLRWRGKLYAEAVARARGTEKDVELFESEGVGHVFYLLEPVQEKAKELLDKIATFVRTE

SEQ ID NO: 3397 - protein, 405 aa, Zea mays
  VARIANT 154..405: note = Derived polymorphism lacks residues 154 to 405
  VARIANT 59: note = Ancestral polymorphism is P, Derived polymorphism is L
  VARIANT 39: note = Ancestral polymorphism is R, Derived polymorphism is W
  VARIANT 36: note = Ancestral polymorphism is C, Derived polymorphism is Y
  VARIANT 32: note = Ancestral polymorphism is Q, Derived polymorphism is H
  VARIANT 28: note = Ancestral polymorphism is D, Derived polymorphism is N
MGILFCAEDSYPNEKKWAELSVQLNLTDRQLQMWFCHRRLKDRKPPAKRQLRDEEVSVPVIGPPPHVLPPPLPPSEMMVGTVGTYGEQLLPYSRRGSGRLSAAPRLSVPKIGRRYYEPPQVMLPHMAPVHLTQAEHRVIDSVEALIGEPLRDDGPVLGIEFDSLPPGAFGAPIVPEQPRQPFRSYETKMFSGPKTMKASAILPTTDPLLQNTGKRKSFIGSSHLGSQAVHEYQFLPEQPSDTYERASQSHFYDSSAEASNLRVAPLSTGSRFLHGVEQAPSYTFHSQSSGSSHLTQRGSGRSPIASALTDHEGALSNINASTTPIHGQLGIPQVAGFESPLASPERLGYHDEDTYHMDRKRKHNEEAKIAREVEAHEKRIRKELEAHVILSSCIYSIFSPRKRLC

SEQ ID NO: 3398 - protein, 132 aa, Zea mays
  VARIANT 13..132: note = Derived polymorphism lacks residues 13 to 132
  VARIANT 23..132: note = Derived polymorphism lacks residues 23 to 132
  VARIANT 40: note = Ancestral polymorphism is S, Derived polymorphism is G
  VARIANT 55: note = Ancestral polymorphism is S, Derived polymorphism is R
  VARIANT 56..132: note = Derived polymorphism lacks residues 56 to 132
  VARIANT 57: note = Ancestral polymorphism is C, Derived polymorphism is R
  VARIANT 61: note = Ancestral polymorphism is A, Derived polymorphism is T
  VARIANT 67: note = Ancestral polymorphism is P, Derived polymorphism is L
  VARIANT 76: note = Ancestral polymorphism is S, Derived polymorphism is P
  VARIANT 91: note = Ancestral polymorphism is R, Derived polymorphism is W
  VARIANT 126: note = Ancestral polymorphism is T, Derived polymorphism is I
MAPGHGEGAAVCCMCGDRGLADELFRCRCCRARLQHRYCSHLYPRPAAYRQQLCSWCLRAAPAANKLEEKRETPASDEKACSTRRRRRRPWSSATRGGGKGEEVVQAGKTRVHRARVPRYKYKLLTDVIISC

SEQ ID NO: 3399 - protein, 517 aa, Zea mays
  VARIANT 68: note = Ancestral polymorphism is T, Derived polymorphism is I
  VARIANT 92..517: note = Derived polymorphism lacks residues 92 to 517
  VARIANT 169: note = Ancestral polymorphism is E, Derived polymorphism is V
  VARIANT 176: note = Ancestral polymorphism is A, Derived polymorphism is V
  VARIANT 239..517: note = Derived polymorphism lacks residues 239 to 517
MGRRLLVSLLPLLMVVMRIGGGGVRHLKSPTGVRGPKRGSEGVLRVARTLGPAPFLLGSAAAIHLGNTTSCIAAYDFRLGSPEYYQLCMPSWVAITDNDTVLSVEAAMNHATVSPGTTISGFTCLLNQKLKDDVVKSEMKLSSPYKFSKKAGRVAIQFNHPSWRGQVIEFSHVDLAVVLVSELKHRAEAHLGRELSAAVIVVPRHLNYNGRQDIVNAGRIVHNDPESTTICEGANPRFWPLATIPSTAGAEHEAEPGVCPNGKFVLNHFANRVRPPAPVVSKLETKGILDYKTFSCFAARTCQPCQPHCHKQAAKAGQIFDPSRSTTFHRAGWISRECLVVKDSLGLEFANCMEKENTCLYSVTYGGRWSYTAGKVVCDKLTIGTNTRFSFMFGCSLDVEYKNYEEAGIVGFGYSGISFFEQVSSQINYKDFSYCLPINETAIGYMNLSDYRGQGADVLYTPLFRTTSKPTYSLTVEEIVANGQNLGLAPSQIVVDSGSLWTILSSDTFDCLDNVIT

SEQ ID NO: 3400 - protein, 474 aa, Zea mays
  VARIANT 400: note = Ancestral polymorphism is V, Derived polymorphism is G
  VARIANT 368: note = Ancestral polymorphism is G, Derived polymorphism is R
  VARIANT 360..474: note = Derived polymorphism lacks residues 360 to 474
  VARIANT 359: note = Ancestral polymorphism is N, Derived polymorphism is K
  VARIANT 352: note = Ancestral polymorphism is R, Derived polymorphism is W
  VARIANT 317: note = Ancestral polymorphism is R, Derived polymorphism is G
  VARIANT 244..474: note = Derived polymorphism lacks residues 244 to 474
  VARIANT 54: note = Ancestral polymorphism is P, Derived polymorphism is L
  VARIANT 22: note = Ancestral polymorphism is A, Derived polymorphism is V
MMGRRLLVSLLPLLMVVMVTAAAFDISRAPPAFGVRRGAPKEYFEWRRPWGTAPFLLGSAAAIHLGNTSSCIAAYDFGPGSHEYYQLCMPSWVAVTDNDMVLSGEAAMNHATVSPGTAISGFTRLLDQRLKDDVVKSEMKLSPLYKFSEREGRVAIQFNHPSRRGQVIEFSPLDLTVVLVSELKHMAEAHLGRELSAAVIAVPRHLNYNGRQDVVNVGRYDAGFRRAAKAIDRQITLYHHHTEQGDGKAILVLRVGGRTSDATIFKFIDGEARYVTAQDDIYLGGDDFTTRIVDYMAELIKEKNQWDIRQDAEALRRLRVACEHAKKALSDQEETMVQIHVADIESSAPLTRAKLEELNQDLLDRVMGLVDGAVMGTGSGWLPRPRDESRTDMVDEIVLVGGSARMPKLRQLIEDYFRGRRPNSRKGVEPEDAIVQGTAILSRPKAARYLEECFDYLYGKDGRGLPSFVFRTSN

SEQ ID NO: 3401 - protein, 143 aa, Zea mays
  VARIANT 29..143: note = Derived polymorphism lacks residues 29 to 143
MLCVMYHDVAHVLCNLSSFYDLFTELDDYCTQVILAPRLLVIQMVILLTERFVSCDCSCRTDAEEALQGLNGSLIGKQAVRLSWVRSPSHKQSRGDSVNRRNNMYYGTPFYGGYGYASPVPHPNMYAAAYGTYPLYGNQQLVS

SEQ ID NO: 3402 - protein, 160 aa, Zea mays
  VARIANT 56..160: note = Derived polymorphism lacks residues 56 to 160
  VARIANT 114: note = Ancestral polymorphism is E, Derived polymorphism is A
MAAGHGEGAAVCCMCGDRGLADELFRCRCCRARLQHRYCSHLYPRPAAYRQQLCSWCLRAAAAANKPEEKRETPASDEKACSPPPAELGHPVKKKRHRAEESTPGEAVAGRRKAVVGSSAGAASGGGKGEEVVRAGKTRVHRARVPRYKYKLLTDVIIGC

SEQ ID NO: 3403 - protein, 70 aa, Zea mays
  VARIANT 19..70: note = Derived polymorphism lacks residues 19 to 70
  VARIANT 20: note = Ancestral polymorphism is P, Derived polymorphism is H
  VARIANT 32: note = Ancestral polymorphism is G, Derived polymorphism is V
  VARIANT 33: note = Ancestral polymorphism is R, Derived polymorphism is H
  VARIANT 34: note = Ancestral polymorphism is R, Derived polymorphism is C
MDGGVGDLRSAINKWNVIYPVYLNSKKTVAEVRRIVAAKACPDPTCVEIADFRTSKFPFPLKIPQNAVIH

SEQ ID NO: 3404 - protein, 291 aa, Zea mays
  VARIANT 226: note = Ancestral polymorphism is P, Derived polymorphism is S
  VARIANT 138: note = Ancestral polymorphism is G, Derived polymorphism is S
  VARIANT 136: note = Ancestral polymorphism is T, Derived polymorphism is M
  VARIANT 116: note = Ancestral polymorphism is C, Derived polymorphism is Y
  VARIANT 99..291: note = Derived polymorphism lacks residues 99 to 291
  VARIANT 43: note = Ancestral polymorphism is T, Derived polymorphism is M
  VARIANT 32: note = Ancestral polymorphism is S, Derived polymorphism is G
  VARIANT 4: note = Ancestral polymorphism is N, Derived polymorphism is D
MKLDLVFVPIGTSNEMKADISINVTEDRSINSFLFLMHINIGTPPIMNLVGIDTGSTLSCVQCQPCQPRQPHCHQQAAKAGQIFDPSRSTTFHHAGCKSRKCLVVKDSLSLEFANCMENENTCLYSVTYGGRWTYTAGKVVWDKLTIGTNTRFSFMFCCSLNMEYKNYEEAGIVGFGSSDISFFEQVSSQINYKSFSYCLPSNKMAIGYMNLGDYRGQGADVLYTPLSRTTSKPTYSLTNMFYADSTYGLCMTVMKTTDVGVQILGNRATRSFGTTFDIQGMIFGFRYSAC

SEQ ID NO: 3405 - protein, 426 aa, Zea mays
  VARIANT 393: note = Ancestral polymorphism is L, Derived polymorphism is H
  VARIANT 385: note = Ancestral polymorphism is A, Derived polymorphism is V
  VARIANT 304: note = Ancestral polymorphism is R, Derived polymorphism is W
  VARIANT 303: note = Ancestral polymorphism is T, Derived polymorphism is M
  VARIANT 299..426: note = Derived polymorphism lacks residues 299 to 426
  VARIANT 262..426: note = Derived polymorphism lacks residues 262 to 426
  VARIANT 259: note = Ancestral polymorphism is D, Derived polymorphism is G
MDTMMGRRLPVSLVPLLMVVMVAAAAFDISRASAAAAFNISRAPPAFGVRRGAPKEYCEWRGPWGTAPFLLGSAAAIHLGNTNSCIAAYDFRPGSHEYYQLYMPSWVAVTDNGTVLSDEAAMNHATVSPGTAISGFTHILDQKLKDEVVKSEMKLSPPYKLSERDGVEAHLGRELSAAVIAVSRHLNYNGRQDIVNVGRYDAGFRRAAKAIDRQITAAVAYHHHTEQVLACWHAIVGDDFTARIVDYMAELIKEKNQWDIRQDAEALRRLRVACEHAKKALSDQEETMVQIHVAGIESSALLTRAKLEELNQDMLDRVMGLVDGALMGTRSGWLTRPRDESRKDMVDEIVLIGGDARMPKLRQLVEDYFHGKWPNSRKGVEPEDAIVQGTVILSRPKAARYLEECFDYLYGKDDRGQPSFVFRTLD

SEQ ID NO: 3406 - protein, 129 aa, Zea mays
  VARIANT 125: note = Ancestral polymorphism is A, Derived polymorphism is G
  VARIANT 111: note = Ancestral polymorphism is I, Derived polymorphism is T
  VARIANT 105: note = Ancestral polymorphism is R, Derived polymorphism is H
  VARIANT 31: note = Ancestral polymorphism is A, Derived polymorphism is V
  VARIANT 27: note = Ancestral polymorphism is H, Derived polymorphism is Q
  VARIANT 23: note = Ancestral polymorphism is C, Derived polymorphism is Y
  VARIANT 10: note = Ancestral polymorphism is G, Derived polymorphism is A
MAQRQGRGSGAVALAAAAAVLLCVLLHAHVAESAVFTVGDRGGWSFSTGTWTNGKRFKAGDVLVFKYDSTAHNVVVVNAAGYKGCSAPRGAKVYTSGNDRVTLARGTNYFICSIPGHCQSGMKIAVTAA

SEQ ID NO: 3407 - protein, 422 aa, Zea mays
  VARIANT 349: note = Ancestral polymorphism is G, Derived polymorphism is D
  VARIANT 307: note = Ancestral polymorphism is N, Derived polymorphism is K
  VARIANT 270: note = Ancestral polymorphism is C, Derived polymorphism is Y
  VARIANT 38..422: note = Derived polymorphism lacks residues 38 to 422
MDTMMGRRLLVSLVPLLMAVMVAAAFDISRGPPAFGVRRGAPKEYCDWRGPWGAAPFLLGSAAAIHLGNTNSCIAAYNFRTWSHEYYQLCMPSWVAVTDNGTVLSGEAAMNHATIGPRTAISGFTRLLDQKLTDDVGKSEMKLSPPYKFSERAGPVAMQFNHPSRRGQVIEFSPVDLAVVLVSELKHRAEAHLGRELSAAVIAMPRHLNYNERHDIVNCTTTIVLACWHAIAGDDFTARIVDYMAELIKEKHQWDIRQDAEALRRLRVAYEHAKKALSDQEETMVQIHVAGIESSAPLTRAKLEELNQDLLDRVMGLVDGAVMGTGSGWLTQPRDESRKDMVDEIVLVGGGTRMPKLRQLVEDYFHGRRPNSRKGVEPEDAIVRGTAILSCPKAAHYLEECFDYLYGKDGRGLPSFIFRTPD

SEQ ID NO: 3408 - protein, 184 aa, Zea mays
  VARIANT 92..184: note = Derived polymorphism lacks residues 92 to 184
  VARIANT 107: note = Ancestral polymorphism is Y, Derived polymorphism is C
  VARIANT 136..184: note = Derived polymorphism lacks residues 136 to 184
MAALGSSVTSRGLALHTSVCVVFLHRRHGNPVIPAAPSRPQRSLASGLTTSSSGMNNAFPIIKGTTRIPAVGPGPANPPGGNLPIPSSMPPWAKWVAGAVILAIPIYRRFRTLEDKIEKTAEVAIEVVDTVAEAAEKVAGEVAGAFPGNDGLREAASKIKTVADEIEEDAEKAEALIEKDCEGD

SEQ ID NO: 3409 - protein, 217 aa, Zea mays
  VARIANT 156: note = Ancestral polymorphism is C, Derived polymorphism is R
  VARIANT 145: note = Ancestral polymorphism is T, Derived polymorphism is K
  VARIANT 124: note = Ancestral polymorphism is A, Derived polymorphism is T
  VARIANT 123: note = Ancestral polymorphism is R, Derived polymorphism is W
  VARIANT 118: note = Ancestral polymorphism is S, Derived polymorphism is L
  VARIANT 107: note = Ancestral polymorphism is L, Derived polymorphism is P
  VARIANT 82: note = Ancestral polymorphism is G, Derived polymorphism is R
  VARIANT 7: note = Ancestral polymorphism is Q, Derived polymorphism is R
MSGPRVQPPSLELNVRVVGVEGLEQEQLERGGGGLFLRYYVPAGGGDGRRRLRVDTREAPCGGALRWGELARFERWGGGAAGPAPPIAFELRWRRPRPSASGLAALLSLGTGARARPSRVLARAELPWADVASAASSQPAERWLTLSPVGRELRGRKAPRLLVEVEAVHAVAADHQVAERAPGAGGAMAECCRAGERCGQCGWVGSEEDMFLAATFG

SEQ ID NO: 3410 - protein, 74 aa, Zea mays
  VARIANT 13: note = Ancestral polymorphism is K, Derived polymorphism is R
  VARIANT 3: note = Ancestral polymorphism is K, Derived polymorphism is E
MAKEYAPPGTLTRTSIMLGCGETPDQVISTMEKVRPAGCWCRHVITFGQYMRPSKRHMPVSEYVTPEAFEKYQP

SEQ ID NO: 3411 - protein, 131 aa, Zea mays
  VARIANT 3: note = Ancestral polymorphism is T, Derived polymorphism is M
  VARIANT 37: note = Ancestral polymorphism is T, Derived polymorphism is A
  VARIANT 74: note = Ancestral polymorphism is A, Derived polymorphism is E
MTTTTRAARPSDHAALLHAEASAAAGAHASSGSSRATYYRPAGRSEDGSPSVVVAAAAEEEEEEDKLWWLKERAAATGSRLPDCAHACGPCSPCRRVIVSFRCAMQASESCPVAYRCMCRGRFFRVPSPLD

SEQ ID NO: 3412 - protein, 622 aa, Zea mays
  VARIANT 21: note = Ancestral polymorphism is S, Derived polymorphism is I
  VARIANT 8..622: note = Derived polymorphism lacks residues 8 to 622
MAASLRWWWSAVVFSVVVGVIPVVANTEGDALYSLRQSLKDNNNVLQSWDPTLVNPCTWFHVTCNPDNSVIRLDLGNAQLSGPLVPQLGQLKNMQYLELYSNNISGPIPPELGNLTNLVSLDLYLNNFTGGIPDTLGQLSKLRFLRLNNNSLSGQIPKTLTNINTLQVLDLSNNNLSGGVPSSGSFSLFTPISFANNPNLCGPGTTKPCPGAPPFSPPPPYNPPAPTSSKGVSSTGAVAGGVAAGTALLIAVPAIGYALWRRRKPEEQFFDVPAEEDPEVHLGQLKRFSLRELQVATDNFNNRNVLGRGGFGKVYKGRLTDGSLVAVKRLKEERTPGGELQFQTEVELISMAVHRNLLRLRGFCMTPTERLLVYPYMANGSVASRLRERAPNEPPLEWETRARIALGSARGLSYLHDHCDPKIIHRDVKAANILLDEDFEAVVGDFGLAKLMDYKDTHVTTAVRGTIGHIAPEYLSTGKSSEKTDVFGYGIMLLELITGQRAFDLARLANDDDVMLLDWVKALLKEKKLEQLVDPDLQGRYVDQEVESLIQVALLCTQGSPMERPKMSEVARMLEGDGLAERWEQWQKVEVMRQEAELAPRHNDWIVDSTYNLRAVELSGPR

SEQ ID NO: 3413 - protein, 356 aa, Zea mays
  VARIANT 286: note = Ancestral polymorphism is R, Derived polymorphism is H
  VARIANT 283..356: note = Derived polymorphism lacks residues 283 to 356
  VARIANT 185..356: note = Derived polymorphism lacks residues 185 to 356
  VARIANT 175..356: note = Derived polymorphism lacks residues 175 to 356
  VARIANT 162..356: note = Derived polymorphism lacks residues 162 to 356
  VARIANT 91: note = Ancestral polymorphism is L, Derived polymorphism is S
  VARIANT 90: note = Ancestral polymorphism is S, Derived polymorphism is Y
  VARIANT 88..356: note = Derived polymorphism lacks residues 88 to 356
  VARIANT 86..356: note = Derived polymorphism lacks residues 86 to 356
  VARIANT 30: note = Ancestral polymorphism is T, Derived polymorphism is I
  VARIANT 14..356: note = Derived polymorphism lacks residues 14 to 356
MVDTLLKKGPKRDLSVEHGPRDKLSRRFSTIFYNRVLPNGEKCDREWLNELINLLAFVIKSAIIAKVKEAKYFSVILDCTPDASHQEQMSLIIRYVDATTDSTCIEESFLGFLDVNDTTGQGLFDVLQEELKSLDLDVDNRWNILKENIKGLTLKSLSSTRWESHVDSVKAIRFQLPEIREALLQVAESDNDPLASSEAKSLAENELGEFDFLVSIIICYEILSKVDSISKELQSKDMLIDIAIESVQGLISFFTRYREDGFSKSLEDAKEIAAGMDIHPMFRTKRKIKRKRQFDECVDDPSIESQSAEESFRINYFLPIVDQAIASLTRRFEQYQGMPLRVKNTKILMGQNYLGS

SEQ ID NO: 3414 - protein, 733 aa, Zea mays
  VARIANT 50: note = Ancestral polymorphism is T, Derived polymorphism is I
MECNKDEAQRAKGIAKKKFEAGDLQGARKFALKAQTLFPALEGVDQMIATFDIYLASEGKVAGEKDWYSILSVPMNANDEKIKKQYRKLVLQFHPDKNKSVGAEGAFQMVQEAYTVLSDRTKRAVYDQKRNVRTFQQRTAQSGKASTVPGASNGFYNFAANAATASKRTVNKQTVGSATHAPSAPSTATRAPVAKPDTFWTSCNKCKMNYEYLRVYLNNHLRCPSCRQPFLAKEVQKPPAGNVVQDSNISGANQNTTTNRNLRWGPFSRAAGAASATASSAAAAQAANVVHQTYEKVRREREEAQAAATREEALRRKYNPLKRHASMSGNANLGPGDATSGKKTRTMTKDAEVGSSSTISSPGANFFRVPGVNISFSNNIGAYEFQGVDGGPNWKPRPLIRLSLVKTFSQMDLRGLLLEKTKTELKNKLTVIKSKTSQVASEKASKKIAVKENGGDNEALGPEDPTANKDSHDSEQIGSNTSTDAENEDDDPLSYNVPDPDFHDFDKNRTEECFQSDQIWATYDDEDGMPRYYAFIQKVLSLKPFKLRISYLTSRANSEFGPSNWVSSGFIKTCGDFRIGKYESCDIVNMFSHQMKWDKGPRGLIKIYPQKGDIWAVYRNWSSDWDEDTPDNVLHAYNVVEVLDAYDEVHGISIIPLVKVTGFRTVFQRHQDPNATMKIPKEEMFRFSHLVPFYRMSGEEAANVPKDSYELDPAAISKELLQGITEAVEPNGT

SEQ ID NO: 3415 - protein, 733 aa, Zea mays
  VARIANT 616: note = Ancestral polymorphism is A, Derived polymorphism is V
  VARIANT 625..733: note = Derived polymorphism lacks residues 625 to 733
MECNKDEAQRAKGIAKKKFEAGDLQGARKFALKAQTLFPALEGVDQMIAIFDIYLASEGKVAGEKDWYSILSVPLNANDEKIKKQYKKLVLQFHPDKNKSVGAEGAFQMVQEAYTVLSDRTKRAVYDQKRNVRTFQQRTAQSGKASTVPGASNGFYNFAANAATASKWTVNKQTVGSATHAPSAPSTATRAPVAKPDTFWTSCNKCKMNYEYLRVYLNNHLRCPSCRQPFLAKEVQKPPAGNVVQDSNISGANQNTTTNRNLQWGPFSRAAGAASATASSAAAAQAANVVHQTYEKVRREREEAQAAARREEALRRKYNPLKRHASMSGNVNLGPGDATSGKKTRTMTKDAEVGSSSTISSPGANFFRVPGVNISFSNNIGAYEFQGDDGGPSWKPRPLIHLSLAKTFSQMDLRGLLLEKTKTELKNKLTVIKSKTSQVASEKASKKIAVKENGGDNEALGPEDPTAIKDSHDSEQTGSNTSTDAENEDDDHLSYNVPDPDFHDFDKNRTEECFQSDQIWATYDDEDGMPRYYAFIQKVLSLKPFKLRISYLTSRANSEFGPLNWVSSGFIKTCGDFRIGKYESCDIVNMFSHQMKWDKGPRGLIKIYPQKGDIWAVYRNWSSDWDEDTPDNVLHAYNVVEVLDAYDEDHGISIIPLVKVTGFRTVFQRHQDPNATMKIPKEEMFRFSHLVPFYRMSGEEAANVPKDSYELDPAAISKELLQGITEAVEPNGT

SEQ ID NO: 3416 - protein, 365 aa, Zea mays
  VARIANT 8: note = Ancestral polymorphism is F, Derived polymorphism is S
  VARIANT 86: note = Ancestral polymorphism is G, Derived polymorphism is R
MATRRELSLALLCVCLAACALAPGPADASKMVGVYELRKGDFSVRLTNWGARVMSVVLPDRKGNLADVVLGRDTVAEYVNDTSYFGPITGRIAQRVARGRFVLDGKVYHMHRNDGRNTIHGGDRGFSRSIWTVKEYVAGGESPHMTFYYRSFDGEQGLPGNVDAYVTYRVSGAYTLGVHMNATALDRATPVGLLLHVYWNLGGEGSGDVLGHTLRIRASRHAVLDDELLPSSGRVEPVAGTPLDFRAPAAIGSRIRRVVVMGGRAVGYDTNYVVDGEGMRPVAQARDPASGRALELWANQPTLQLYTGNSLNRTAGKGGRVYDRYAGFCLETMGYVDAVNHPEFPSLTLRPGQVYRHDMLYKFSF

SEQ ID NO: 3417 - protein, 102 aa, Zea mays
  VARIANT 81: note = Ancestral polymorphism is P, Derived polymorphism is R
  VARIANT 47: note = Ancestral polymorphism is K, Derived polymorphism is E
  VARIANT 34: note = Ancestral polymorphism is E, Derived polymorphism is Q
MSSVGRQDSMDSLDCSYYLSDGGLVEAPTLSSKQIEHARKQALTILETKSPEEVLKIFTEQGSEAKADLAREKAHTPTTPPKGADAKATTTSGTVRTSPPTN

SEQ ID NO: 3418 - protein, 264 aa, Zea mays
  VARIANT 151: note = Ancestral polymorphism is R, Derived polymorphism is C
  VARIANT 4..264: note = Derived polymorphism lacks residues 4 to 264
MAPQGRRATRRYGGVPEMGGASASASSGAGADERPKGEDGKQGQVAAGAQPPAGGKKRGRTAGDKEQNRLKRLLRNHVSAQQARERKKAYLTELEAKAKGLELRNAELEQRVSTLQNENNTLRQVIDVSGKEFKFTWASGRGELCDIYEERQSGEDGNGLLLECGSTWRKVIDASIVYDPWTRESRGFGFVTMAATKEADHCIKYLDCSVLQGQFIIVEKNILLFCLHHRESEIASHSLHIHKVLLDCDDVQADALIVDRLASL

SEQ ID NO: 3419 - protein, 226 aa, Zea mays
  VARIANT 163..226: note = Derived polymorphism lacks residues 163 to 226
MAKFNNIATQVEILAKRKLSYCHLAQMKYLFREAIQIKRVLLHDEKSLCMYADMEIILVMDVVEYTSPDHSPSMAICDAFYSKLLTFLDAHQKVPAKEQVDALSTELFALSTVTGPFKINGVPIRRVNQTYVIATSTKVDISGVDVSKFDDKYFAREKKQKVKKTGGELFETEKEASKSLPDFKKDDQKAVDAALIKAIKAVPELKAYLGARFSLRDGDKPHEMVF

SEQ ID NO: 3420 - protein, 403 aa, Zea mays
  VARIANT 86..403: note = Derived polymorphism lacks residues 86 to 403
  VARIANT 199..403: note = Derived polymorphism lacks residues 199 to 403
  VARIANT 300: note = Ancestral polymorphism is L, Derived polymorphism is P
MLSATMVPLQQVQGGGLSEFSGLLRSSASLPMRWNATSDEFMSAVSFRNHAIGTSGGRLRRAPTEAKLKVAMNGFGRIGRNLMRCWHGRDNDSPLDVIAINDTGDVKQASYLLKYDSMLGIFDADVEPVGDNAISVDGKVIKVVSDRNPSNLPWGELSVDLFIEGTGVFVDHESAGKHIQAGAKKVLITAPDKGNIPTYVVGVNADQYNPDEPIISNASCTTNCRVPFVKVLDQKFGIIKGTMTTTHFYTCDQRLLDASHRDLRRARAAALNIVPTSTSAAKAVALVLPNLKGKLNGIALWVPTPNVSVLDLVVQVSRKTLAEEVNQAFRDAAANELQGILEVCDVPLVSVDFRCSDFSSTIDASLTMVMGDDMVKVISWYDKEWGYSQRVVDLDDICANQWK

SEQ ID NO: 3421 - protein, 161 aa, Zea mays
  VARIANT 116..161: note = Derived polymorphism lacks residues 116 to 161
  VARIANT 102: note = Ancestral polymorphism is F, Derived polymorphism is S
  VARIANT 82..161: note = Derived polymorphism lacks residues 82 to 161
  VARIANT 38: note = Ancestral polymorphism is A, Derived polymorphism is G
MGLNLNIRRVVFYTLMKYDGEKMVSVPASQVKQIAGRAGRRSSVYPHGLATTFMFDLDYLTKCLDEPVKEAEKVGLFPSFEQLEMFATHFPELAFNNLLDKFRDTCRIDDTYFMCQHDSMKKVASMIESVQGLSLKDHYIFLLGSREYKESGSHVPYAEIR

SEQ ID NO: 3422 - protein, 124 aa, Zea mays
  VARIANT 111: note = Ancestral polymorphism is R, Derived polymorphism is W
  VARIANT 101: note = Ancestral polymorphism is C, Derived polymorphism is Y
  VARIANT 91: note = Ancestral polymorphism is L, Derived polymorphism is F
  VARIANT 80: note = Ancestral polymorphism is P, Derived polymorphism is L
  VARIANT 66: note = Ancestral polymorphism is R, Derived polymorphism is C
MVADDLTPHDLMATTDLTAPHTWYPSTRAMRRRVVYHCGPTNSGKTHNALASFSAAKCGVYCSPLRLLAIEIFDKMMADPVRGFAWTRALLGLRADEIHLCGDPSVLSIVRKICADTGDDLVLH

SEQ ID NO: 3423 - protein, 403 aa, Zea mays
  VARIANT 40..403: note = Derived polymorphism lacks residues 40 to 403
  VARIANT 65..403: note = Derived polymorphism lacks residues 65 to 403
  VARIANT 93..403: note = Derived polymorphism lacks residues 93 to 403
  VARIANT 176: note = Ancestral polymorphism is G, Derived polymorphism is E
  VARIANT 180..403: note = Derived polymorphism lacks residues 180 to 403
MLSATTVPLQQVQGGGLSEFSGLLRSSASLPMRWNATSDEFMSAVSFRNHAIGTSGGRLRRAPTEAKLKVAINGFGRIGRNFLRCWHGRDNDSPLDVIAINDTGDIKQASHLLKYDSMLGIFDADVEPVGDNAISVDGKVIKVVSDRNPSNLPWGELSVDLFIEGTGVFVDHEGAGKHIQAGAKKVLITAPDKGNIPTYVVGVNADQYNPDEPIINNASCTTNCRVPFVKVLDQKFGIIKGTMTTTHFYTCDQRLLDASHRDLRRARAAALNIVPTSTSAAKAVALVLPNLKGKLNGIALWVPTPNVSVLDLVVQVSRKTLAEEVNQAFRDAAANELQGILEVCDVPLVSVDFRCSDFSSTIDASLTMVMGDDMVKVISWYDKEWGYSQRVVDLDDICANQWK

SEQ ID NO: 3424 - protein, 123 aa, Zea mays
  VARIANT 70: note = Ancestral polymorphism is I, Derived polymorphism is T
  VARIANT 69: note = Ancestral polymorphism is A, Derived polymorphism is T
  VARIANT 63: note = Ancestral polymorphism is S, Derived polymorphism is C
  VARIANT 50: note = Ancestral polymorphism is L, Derived polymorphism is I
MVADDLTPHDLMATTDLTAPHTWYPSTRAMRRRVVYHCGPTNSGKTHNALASFSAAKSGVYCSPLRLLAIEIFDKVNATGVSCSLRTGQEVKEVAFASHLACTIEMVSTEEISTRSPLLTRCR

SEQ ID NO: 3425 - protein, 372 aa, Zea mays
  VARIANT 107: note = Ancestral polymorphism is G, Derived polymorphism is D
  VARIANT 145: note = Ancestral polymorphism is G, Derived polymorphism is E
  VARIANT 168: note = Ancestral polymorphism is Y, Derived polymorphism is D
  VARIANT 206: note = Ancestral polymorphism is G, Derived polymorphism is S
  VARIANT 269: note = Ancestral polymorphism is L, Derived polymorphism is P
MRWNATSDEFMSAVSFRNHAIGTSGGRLRRAPTEAKLKVAINGFGRIRRNFLRCWHGRDDDSPLDVIAINDTGDVKQASHLLKYDSLLGIFDADAELVGDNAISVDDKVIKVVSDRNPSNLPWGELSVDLFIEGTGVFVDHEGAGKHIQVGAKKVLITAPDKGNIPTYVVGVNADQYNPDEPIISNTSCTTNCRVPFVKVLDQKFGIIKGTMTTTHFYTCDQRLLDASHRDLRRARAAALNIVPTSTSAAKAVVLVLPNLKGKLNGIALWVPTPNVSVLDLVVQVSRKTLAEEVNQAFRDAAANELQGILEVCDVPLVSVDFRCSDFSSTIDASLTMVMGDDMVKVISWYDKEWGYSQRVVDLDDICANQWK

SEQ ID NO: 3426 - protein, 206 aa, Zea mays
  VARIANT 164: note = Ancestral polymorphism is S, Derived polymorphism is I
  VARIANT 161..206: note = Derived polymorphism lacks residues 161 to 206
  VARIANT 155: note = Ancestral polymorphism is D, Derived polymorphism is G
  VARIANT 147: note = Ancestral polymorphism is F, Derived polymorphism is S
  VARIANT 141: note = Ancestral polymorphism is N, Derived polymorphism is K
  VARIANT 136: note = Ancestral polymorphism is P, Derived polymorphism is L
  VARIANT 132: note = Ancestral polymorphism is A, Derived polymorphism is V
  VARIANT 84: note = Ancestral polymorphism is G, Derived polymorphism is S
  VARIANT 63: note = Ancestral polymorphism is S, Derived polymorphism is C
  VARIANT 44: note = Ancestral polymorphism is G, Derived polymorphism is S
  VARIANT 32: note = Ancestral polymorphism is R, Derived polymorphism is H
MAADDLTPRDLMATADLTAPHTWYPSARAMRRRVVYHCGPTNSGKTHNALASFSAAKSGVYCSPLRLLTIEIFDKVKQIAGRAGRRSSVYPHGLATTFMFDLDYLTQCLDEPVKEAEKVGLFPTFEQLEMFATHFPELAFNNLLDKFRDTCRIDDTYFMCQHDSMKKVASMIESVQGLSLKDHYIFLLGSREYKESGSHVPYAEIR

SEQ ID NO: 3427 - protein, 141 aa, Zea mays
  VARIANT 14: note = Ancestral polymorphism is T, Derived polymorphism is M
  VARIANT 30..141: note = Derived polymorphism lacks residues 30 to 141
  VARIANT 36: note = Ancestral polymorphism is A, Derived polymorphism is V
  VARIANT 70: note = Ancestral polymorphism is A, Derived polymorphism is P
MNPSLTKRAKRMTTKPAATLCVLVTTVCWYASSVTAAPRHPIRNPLRFRSMPPPLVASRPRSQLLFGFFARMLLRVETTKRRIWELGWGWPDGDKKPQGQRLRRWSGEGPRSQLMKDPEGRAKSGKRRFGMSRSLDNFLLL

SEQ ID NO: 3428 - protein, 322 aa, Zea mays
  VARIANT 162: note = Ancestral polymorphism is I, Derived polymorphism is N
  VARIANT 74: note = Ancestral polymorphism is Y, Derived polymorphism is H
  VARIANT 17: note = Ancestral polymorphism is G, Derived polymorphism is C
MTNCCPTVAGGTPASYGIGDIYNYRYLEVLGGGTYGTVVKAEDLRSGETVAVKWIRPDDQGVTDIDAVSYEAAHLEACRGHPSIVQMKELVYEAGTGHVFIVMEFVGPSLKSDLPRRFSEAETRAIMRQLLRGAEKLHSACIIHRDIKPDNILVGPGGALKICDLGMAVATRTPGEPHSEQTVAALWYRAPELMGRGRYYGTAVDMWALGCVMMELLMGAPLFEDANTEDDVLRRALAMQCQMELDSIMTDLVASKPQLVPQLSKAGHEVLQGLLSFVAEKRLTAADALNHRWFQEREFDLNLPPPECELDLNLTLGVSGWT

SEQ ID NO: 3429 - protein, 177 aa, Zea mays
  VARIANT 32: note = Ancestral polymorphism is A, Derived polymorphism is D
  VARIANT 66: note = Ancestral polymorphism is E, Derived polymorphism is K
MLPMAVHPTTTPALSPRARVSPHRPPISSLADPSSSPCHRIVSFKSRRLPLRSLHIAAAAAAGAEEEEAQLGGSVNAVDEEEAENKVVVPERQDPMLVLKFIWMEKNIGIALDQLVPGYGSIPLSPYYFWPRKDAWEELRAKLEEKEWISQKQMIILLNQATDIINLWQQGGGNLST

SEQ ID NO: 3430 - protein, 261 aa, Zea mays
  VARIANT 93: note = Ancestral polymorphism is G, Derived polymorphism is A
MASAELSREENVYMAKLAEQAERYEEMVEFMEKVAKTVDSEELTVEERNLLSVAYKNVIGARRASWRIISSIEQKEEGRGNEDRVTLIKDYRGKIETELTKICDGILKLLESHLVPSSTAPESKVFYLKMKGDYYRYLAEFKTGAERKDAAENTMVAYKAAQDIALAELAPTHPIRLGLALNFSVFYYEILNSPDRACSLAKQAFDEAISELDTLSEESYKDSTLIMQLLRDNLTLWTSDISEDPAEEIREAPKHDSSEGQ

SEQ ID NO: 3431 - protein, 225 aa, Zea mays
  VARIANT 112..225: note = Derived polymorphism lacks residues 112 to 225
  VARIANT 181..225: note = Derived polymorphism lacks residues 181 to 225
MHVLDEANYLVKRAASIQAAVPSVNSAPAVTSGGPFKLPNGVGKPAAPLADLLDLSSDDAPVTISAPTTAPNDFLQDLLGIGLTHSSPIGGAPSISTDILMDLLSIGSSSVQNGPPTSNFSLPSIETKSVAVTPQVVDLLDGLSSGTSLSDENVTYPTITAFQSATLRITFSFKKQPGKPQETTISASFTNLATTTFTDFVFQAAVLKVAFASDTNLIPDNRDIK

SEQ ID NO: 3432 - protein, 284 aa, Zea mays
  VARIANT 202: note = Ancestral polymorphism is K, Derived polymorphism is M
  VARIANT 192..284: note = Derived polymorphism lacks residues 192 to 284
  VARIANT 183: note = Ancestral polymorphism is E, Derived polymorphism is K
  VARIANT 164: note = Ancestral polymorphism is R, Derived polymorphism is H
  VARIANT 161: note = Ancestral polymorphism is R, Derived polymorphism is H
MAGGPAAVSFLTNIAKVAAGLGAAASLASASLYTVDGGERAVIFDRFRGVLPETVGEGTHFLVPWLQKPFIFDIRTRPHNFSSNSGTKDLQMVNLTLRLLSRPDVQHLPTIFTSLGLEYDDKVLPSIGNEVLKAVVAQFNADQLLTDRPHVSALVRDALIRRAREFNIILDDVAITHLSYGIEFSLAVEKKQVAQQEAERSKFLVAKAEQERRAAIVRAEGESESARLISEATAMAGTGLIELRRIEAAKEIAAELARSPNVAYIPSGENGKMLLGLNATGFGR

SEQ ID NO: 3433 - protein, 115 aa, Zea mays
  VARIANT 94: note = Ancestral polymorphism is S, Derived polymorphism is F
  VARIANT 88..115: note = Derived polymorphism lacks residues 88 to 115
  VARIANT 87: note = Ancestral polymorphism is L, Derived polymorphism is V
  VARIANT 83: note = Ancestral polymorphism is L, Derived polymorphism is R
  VARIANT 82: note = Ancestral polymorphism is N, Derived polymorphism is H
  VARIANT 58: note = Ancestral polymorphism is S, Derived polymorphism is Y
  VARIANT 51..115: note = Derived polymorphism lacks residues 51 to 115
  VARIANT 49: note = Ancestral polymorphism is F, Derived polymorphism is C
  VARIANT 20: note = Ancestral polymorphism is R, Derived polymorphism is G
  VARIANT 3: note = Ancestral polymorphism is P, Derived polymorphism is T
MRPLQGRSTRGKTLVWVAFRRFTVAAPQALQQGGKRQQVRDLAGGGLGFIQSSKEKHSTPKYGLIYHASSIGKASQKHNGKNLGLYLQKLLLLSDRMPLVLMRTTPLALRVDSRS

SEQ ID NO: 3434 - protein, 246 aa, Zea mays
  VARIANT 143: note = Ancestral polymorphism is D, Derived polymorphism is E
  VARIANT 140: note = Ancestral polymorphism is A, Derived polymorphism is T
  VARIANT 85: note = Ancestral polymorphism is Q, Derived polymorphism is K
  VARIANT 47: note = Ancestral polymorphism is L, Derived polymorphism is P
MDGDGATWGQPMLEKRPSHRERHFTAGEVVRDVIMGVSDGLTVPFALAAGLSGASAPSSLVLTAGLAEVAAGAISMGLGGYLAAQSEADHYKREMRREQEEIITVPDTEAAEIGEIMSRYGLEPQEYGPVVAGLRRNPQAWLDFMMRFELGLERPDPRRALQSAFTIALSYVVGGLVPLLPYVLVSAAQDAMLTSVGVTLAALLFFGYVKGRFTGNRPFASAVQTAVIGALASAAAYGMAKAVQAR

SEQ ID NO: 3435 - protein, 332 aa, Zea mays
  VARIANT 5: note = Ancestral polymorphism is A, Derived polymorphism is S
  VARIANT 38..332: note = Derived polymorphism lacks residues 38 to 332
  VARIANT 51..332: note = Derived polymorphism lacks residues 51 to 332
MANRARWMMKYEKGLVDILHENNTSHYRTQNGWRTEGWRKIVRDFNVRYPEAKFSKMQIQEHETQLKKDYKLIKSILQRDGVSWDQSASMVRTTDEIWDDIIEDMPKARKYQSKSFPLLDSLELLFDGPIPEGGQKSPSSVPQNVGENVDDGGNNTSTVPGLSERPSGTFNTSVTEAWNNISLLQQTALGPQGIDDLDTLQKRGEEVLERLQHGADRRLPRADDQAQSSSCVELQRDRRKKRKAPDVQQMMETYLNFRMKQAHVKEQRAKDAGQFTISGCIKALHTMADVSDEVKVLASDVFKDAENREIFLSYEPRLRSLWLKREVGKLLS

SEQ ID NO: 3436 - protein, 773 aa, Zea mays
  VARIANT 12: note = Ancestral polymorphism is I, Derived polymorphism is N
MSPTQAATPLAILSRFLSSPPSPSPVLELLRVHALAVTSGLYQRPDLAAKLVSAYSSAGRPGLAALAFSASPRPDAFLWNSLIRTHHCASDFVAALSAHRRMLASGARPSPFTAPLAASASAELGALGVGAAVHAYCVRYGLLVGDGDSVAVASSLVYMYARCGNVRDAVKVFEEMPERDVVAWTAVISGCVRNGESGEGLRYLVEMVRLAGDGSVRPNSRTMESGLEACGVLDELNSGRCLHGYVVKVGIGDSPMVISALFSMYSKCYSTEDACALFLELPEKDVVSWTSLIGIYCRRGLITEAMELFQQMMESGLQPDEILVSCVLSGLGNNGNVHGGKTFHAVITKRNFGDSVLIGNALISMYGKFEMVDSAGRVFRLLHQRDADSWNLMVVGYCKAGCDVKCLELYREMQLRDKYEFWCVADSLVSAISSCSRLAELRLGRSAHCYSIKHLLDEDSSVANVLIGMYGRCGKFDHACKIFGLAKLKGDVVTWNTLISSYAHLGHSNAAMSLYDQMLIEGLTPNSTTLITVISACANLVALERGEKIHSYVKEMGWDYDVSINTALIDMYAKCGQLGIARRIFDSMLQHDVVAWNVMISGYGMHGEAKQALELFGKMEGGSIKPNGVTFLAILSALCHSGLLEEGRKVFTRMGKYSLEPNLKHYACMVDLLGKSGHLQEAEDMVLAMPIEPDGGIWGTLLSACKLHDNFEMGLRIAKKAFASDPENEGYYILISNSYGGAKKWDEIEKLRETMKNLGVQKGVGWSAVDYGV

SEQ ID NO: 3437 - protein, 506 aa, Zea mays
  VARIANT 410..506: note = Derived polymorphism lacks residues 410 to 506
  VARIANT 364..506: note = Derived polymorphism lacks residues 364 to 506
  VARIANT 351: note = Ancestral polymorphism is F, Derived polymorphism is S
MAPPQTIPRRGLFIGGAWREPCLGRRLPVVNPATEATIGDIPAGTAEDVEIAVAAARDAFSRDGGRHWSRAPGAVRANFLRAIAAKIKDRKSELALLETLDSGKPLDEASGDMDDVAACFEYYADLAEALDGKQQSPISLPMENFKSYVLKEPIGVVGLITPWNYPLLMATWKVAPALAAGCTTILKPSELASVSCLELGAICMEIGLPPGVLNIITGLGPEAGAPLSSHSHVDKVAFTGSTETGKRIMISAAQMVKPVSLELGGKSPLIVFDDIGDIDKAVEWTMFGIFANAGQVCSATSRLLLHEKIAKKFLDRLVAWAKNIKVSDPLEEGCRLGSVISEGQYEKIKKFISTARSEGATILYGGGRPQHLRRGFFLEPTIITDVSTSMQIWQEEVFGPVICVKEFRTESEAVELANDTHYGLAGAVISNDQERCERISKALHSGIIWINCSQPCFVQAPWGGNKRSGFGRELGEWGLDNYLTVKQVTKYCSDEPWGWYQPPSKL

SEQ ID NO: 3438 - protein, 303 aa, Zea mays
  VARIANT 282: note = Ancestral polymorphism is Y, Derived polymorphism is D
  VARIANT 269: note = Ancestral polymorphism is D, Derived polymorphism is N
  VARIANT 221: note = Ancestral polymorphism is G, Derived polymorphism is E
  VARIANT 216: note = Ancestral polymorphism is P, Derived polymorphism is S
  VARIANT 215: note = Ancestral polymorphism is T, Derived polymorphism is M
  VARIANT 134: note = Ancestral polymorphism is H, Derived polymorphism is D
  VARIANT 119..303: note = Derived polymorphism lacks residues 119 to 303
  VARIANT 81: note = Ancestral polymorphism is G, Derived polymorphism is V
MAASPALVSLTPAVSRHPHLLFCSPCPPPRHIRLAPPTATPASDGNGLGPGPGPGVFLSPRALSQLDELAAFRYEHAFPHGLLTVRALSRGPDDDAVAEALVRLLASSFSETVRWAPAQRYAQLLTFVIRRYLHDRRGLAPHAAVLVGFYRPADADAGADNANAAPEDDEGEGGDEGEMACTAEVSFDAVGAPGAPPTPTPPLNFPYICNMTVKTPLRRRGIGKQLLKACEDLVFKMNAKRRVYLHCRIIDQVPFNMYTKAGYSIVQTDSILVWLSLQKRKYLMSKELPQASVVSETSTKNFE

SEQ ID NO: 3439 - protein, 135 aa, Zea mays
  VARIANT 7: note = Ancestral polymorphism is P, Derived polymorphism is L
  VARIANT 15: note = Ancestral polymorphism is A, Derived polymorphism is T
  VARIANT 22: note = Ancestral polymorphism is R, Derived polymorphism is H
  VARIANT 39: note = Ancestral polymorphism is T, Derived polymorphism is I
  VARIANT 52: note = Ancestral polymorphism is G, Derived polymorphism is R
  VARIANT 56: note = Ancestral polymorphism is M, Derived polymorphism is T
  VARIANT 58: note = Ancestral polymorphism is E, Derived polymorphism is G
MLLAAHPDWQDRARAEVLEVCRGQTAMDIDVLRQLKILTMVIQETLRLYPSGSLIMREALTGISLGGVDVPRGTIIQVAISVLHLDMEAWGPDANEFRPDRLANGAAAACKPAHMYMSFGYGRGCAPGRTWQWRS

SEQ ID NO: 3440 - protein, 114 aa, Zea mays
  VARIANT 27: note = Ancestral polymorphism is P, Derived polymorphism is L
  VARIANT 73: note = Ancestral polymorphism is C, Derived polymorphism is Y
MLTATHDVILFIYTSYFELQIWSLGSPDPNFTLDGHQKGVNCVDYFTGGDRPYLITGSDDSTAKVWDYQTKSCVQTLEGHTHNISDVCFHPELPIIITGSEDGTIRIWHSTTYR

SEQ ID NO: 3441 - protein, 379 aa, Zea mays
  VARIANT 188: note = Ancestral polymorphism is T, Derived polymorphism is I
MVKVIQGRPAEMGFRMPAEWEPHEQCWMGWPERPDNWRENAGPAQEVFARTAIAISKFEPVTLCASAKQYPKVHELMEHQTNIRVVEMSMNDSWFRDMGPTFVTCKGDSGIAEQTIAGIDWQFNAWGGIYDDWSLDSDVAKKIVEIERIPRFPQKIILEGGSIHVDGEGTCITTEECLLNPNRNPNMTKLEIENELKDFLGVSKVIWIPRGLYEAFDDSAGDEDTNGHVDNMCCFIKPGVILLSWTDDEKDYQYERSVEALSVLSQSVDAKGRQLQVVKIHVPGPLYMTEEEAQGVVSSGHSVPRPAGTRLAASYVNFYIANGGIIAPSFGDRWDEEAYAVLQKAFPDHEVVMVEGGREIALGGGNIHCITQQQPVRPS

SEQ ID NO: 3442 - protein, 118 aa, Zea mays
  VARIANT 31: note = Ancestral polymorphism is T, Derived polymorphism is I
MSCIRRTSAIMSSLAVSILLIVSLLTLHLPIACGRRHVVVLNPSDNGMMNSRGKKVSSTVGAAAAAATTRTVKMRAAVKHGYAVAEVYEMLRRDYASKARRRRPINNGATPLQVNKKP

SEQ ID NO: 3443 - protein, 319 aa, Zea mays
  VARIANT 72..319: note = Derived polymorphism lacks residues 72 to 319
MVPINFVKDVCIDEGVRPDQRAPADRLVDQEVSIHLDYSECINGDLREEISADSTKTALELKPQMVILPVMCETDGNTGEQNSCKKHDLEDSNTADVSPGSNEDELNPKQLPCHEVAQDCQEVGSVIPESNENQDRFFTAEATHQVSSNDCYGTGIGIVLETSNVIHSDLPAQPAAAAADFSAAATPEEVAVSAASDMEGCKQANHYNPFIAYGSLSLDGTWDQPGYYYPLPATVVDAASTAPTCPVEKTDSFSWEASFFYVQASAMVFNDLSFFLFFCFPIRRLQNEWNSSPVKMAKADRRRVKEDRGWGYRILCCKF

SEQ ID NO: 3444 - protein, 350 aa, Zea mays
  VARIANT 330: note = Ancestral polymorphism is C, Derived polymorphism is Y
  VARIANT 164..350: note = Derived polymorphism lacks residues 164 to 350
  VARIANT 132..350: note = Derived polymorphism lacks residues 132 to 350
  VARIANT 119: note = Ancestral polymorphism is R, Derived polymorphism is C
  VARIANT 117: note = Ancestral polymorphism is A, Derived polymorphism is D
  VARIANT 106: note = Ancestral polymorphism is R, Derived polymorphism is C
  VARIANT 102: note = Ancestral polymorphism is R, Derived polymorphism is W
MQTASERNEVKDMSNRLEARELSTALSKNSSDAMYPIVSKESLLQEMFFSAKTTSGRLHLAKELLKLPTDVLKSFAGSKEGLSTLYSWILDSLGKNATQLLRHCVRLLVLVSTDLVAVRLSATHPYLIDATQSLKRPNSMMPNRSNRASTGTQSVHRTVGKGRETLTCCCGGAGWSGTVAEDARWRGGVWRSEAGLWPAAVRAARQRPQAKCVAQDHLPRWKTLPPFVELWYRPDKNASNPEASELFKEVAYSYNILSDPEKQRQYDNADFEAFENEGVDMEIELSNLGTVNKCLQHFFSKLGVPMKTIIFFYCAGKGHEWHSYGETTPCWKHQLWERLISNVLIFLAYQ

SEQ ID NO: 3445 - protein, 188 aa, Zea mays
  VARIANT 49: note = Ancestral polymorphism is T, Derived polymorphism is M
  VARIANT 54..188: note = Derived polymorphism lacks residues 54 to 188
  VARIANT 56: note = Ancestral polymorphism is C, Derived polymorphism is G
  VARIANT 61: note = Ancestral polymorphism is S, Derived polymorphism is N
  VARIANT 62..188: note = Derived polymorphism lacks residues 62 to 188
  VARIANT 63: note = Ancestral polymorphism is A, Derived polymorphism is V
  VARIANT 66: note = Ancestral polymorphism is K, Derived polymorphism is N
  VARIANT 84: note = Ancestral polymorphism is R, Derived polymorphism is Q
  VARIANT 101..188: note = Derived polymorphism lacks residues 101 to 188
  VARIANT 125: note = Ancestral polymorphism is R, Derived polymorphism is C
MEADGGELCLAPFSDTCALVSVLVSARRSRCLCSLAFVFFRGTLYDAATTAYGQVCAQFHSWAIRKDVGAGMYTLPTREQLIVRLNETGFLLLARICLQTWLAYSLLVDGLAFAGQAILASAFARKDHPKATATASRILQLALVLGLLLSILPGVGLRIGSRLFTSDQGVLHHIYIGIPVRKASTTVK

SEQ ID NO: 3446 - protein, 490 aa, Zea mays
  VARIANT 316: note = Ancestral polymorphism is G, Derived polymorphism is W
MDGDDAGGQLPAAPASPRTEEAIAAAHDDARLPPTPSDGEDYDDLYGDVNVGFNSLLPLSPSPAPTSPPKTPSPGPSFQLPPQWPHRPPPPEPLPAPAPQREPEPQPRQDTKRHQPPQPTPSVPRHHMTPRGGGASNSSSPRCTSLYISELHWWTTDAEVEAALALAPDGAAAALYGLHFYTEKITGMSRGICRADFLHPAAAAAAATALHGHAFHGRKCVASLAPSPSLNLLGDDLDSYAEAAWSRNPTGGLGNGGHGASDATAGRGNVALALADRLPLARPQLSVVPRPTPRSVPFAGIGGYGGFQSMRQYSAGMGIAMMPSALAHRVNPPFLALQGSGFWYDQGISGSFWGAQQERNFGGCQMPWQQLMAPRQQQHQQAQQQFGNWNYGMQGRGLRHERLSNTRSIGNVRYLDRRQANCDGGDRYKENDCEKGRHREGILDKEREQEKHWNQRDRHGGDNQMDRRVRARSRSQSRDDSDDDNPRRRR

SEQ ID NO: 3447 - protein, 693 aa, Zea mays
  VARIANT 189..693: note = Derived polymorphism lacks residues 189 to 693
  VARIANT 77..693: note = Derived polymorphism lacks residues 77 to 693
MQVPGRLRRVLRAPPPRILLYRAISSPPPGGGSGVAVKQVTRGNMEEALEKLRGRVREAAFVGLDLEMSGVTSAPWRDTFELDRADVRYLKLRDSAERFAALQLGVCPFRWDPAKSAFVAHPHNFFIFPRKELPSDCSSHEFLCQTTSIEFLAKYQFDFNTCFREGISYLSRAQEEEALQKFNMLHHGRTVTSSTNSEEDGDMPLKSASDILFTERMKMNFKEWRDAIASKPMVDNHLSGNIKCGSGQFQTVFFKMRPAIILNGFSSHQLKLIQQVLRKNFRDLIFVCTFGEDDTSEKKVVYSDTDEDRILLMKDVQEDLLKNREERIKSAIGIRHVIDLLSSERKLIVGHSCFLDIAQVYSKFVRPLPSSIKEFALSFHKFFPHIADTRHLMSVNQAVQKLMKHKSKSLSSAFLLLCPASYSSVEKPSSHSPVTIEVEGDETMSSRFISGAKHEAGYDAYMTGCIFAQLCAYLGIQFEQFSPLDNLATNTKLQKHINFLSPSWNSGTVLDLSTGMETPDPGYTRRYPAAVYDNIVVIWGFLSKVRPKEIKDCICKVFGSGSVTTVFSIDSTAALVQFKKQESVNDFLDLKAVLERADSAISILHPLSTILEGGQTRAAKYDTYRDICSSSESKYLFADQAEAVCATSKNQLIENVDGNLISDVLDGVALASVTEEDGIIPSSKNQNVAEATC

SEQ ID NO: 3448 - protein, 439 aa, Zea mays
  VARIANT 88: note = Ancestral polymorphism is C, Derived polymorphism is Y
  VARIANT 249..439: note = Derived polymorphism lacks residues 249 to 439
  VARIANT 272..439: note = Derived polymorphism lacks residues 272 to 439
  VARIANT 283..439: note = Derived polymorphism lacks residues 283 to 439
  VARIANT 284..439: note = Derived polymorphism lacks residues 284 to 439
  VARIANT 301: note = Ancestral polymorphism is G, Derived polymorphism is E
  VARIANT 308: note = Ancestral polymorphism is S, Derived polymorphism is F
  VARIANT 410: note = Ancestral polymorphism is M, Derived polymorphism is T
MTFEVEEDDAHPRGRSNVTVTDEQGDCHRKGKGVIGASSSDVTGMSTMPENTVEVVTQNGRRVKLKGGIESPWSHGEPYGNSFSCNYCTSRIKGGGVTRLREHLGGLPGNVAACINVPLNVKAIMTDQVAIRRIRRRRNNDLTHYVERGVRESNKGLGTSSKARIPLDEEGQIQMALRELLREYDEERFYRSPSGSRFASCSANQQTRLDRFYRSPSVSQGPFDMDLAHTIKLAQECGQGVHIPSGKELDGKFLDMNYEDMEAHMAKFKDDWKEYGVTVMCDSWTGPTMMCIINFMVYCNGRMFFHKSINATGRVQNAEFIYDCIREVVVDEIGVKNVIQIVTDNGSNYKKACRQLITRYLHITWQPCAAHTINLMLKDISCFSEVFEVVDDAKRICRFFYNHNRLHAMMREKIGGELIRWNATRFGTVFIFLQSFWDR

SEQ ID NO: 3449 - protein, 417 aa, Zea mays
  VARIANT 297: note = Ancestral polymorphism is K, Derived polymorphism is R
MEALAIGSAPRRPGARYSQLRRPGTLAVTTTATVACRPLTAPSMDAAVGRPSRAPIRCTSAETDSVDEVATSSHAAEANAGGTTEQEGNGSPVAAAAAYSPVVAGVDGIRIRRRPVTGPAVHYVGPFQFRLENEGNTPRNILEKIIWNKDVEVSQMKERRPLYMLKGPLEAAPPARDFVGALKASYDRTGLPALIAEVKKASPSRGVIRENFDPVQIAQAYEKNGAACLSVLTDEKYFQGSFYNLEAIRNAGVQCPLLCKEFIIDAWQLYYARSKGADAVLLIAAVLPDRDIKYMLKICKILGMAALVEVHDEREMDRVLGIDGVQLIGINNRNLETFEVDITNTKKLLEGERGQVIAQKDVIVVGESALFTPDDISFVQNAGVKAVLVGESLIKQEDPGKAIAGLFGKDISHAGAT

SEQ ID NO: 3450 - protein, 481 aa, Zea mays
  VARIANT 424: note = Ancestral polymorphism is I, Derived polymorphism is T
  VARIANT 316: note = Ancestral polymorphism is S, Derived polymorphism is I
  VARIANT 219: note = Ancestral polymorphism is A, Derived polymorphism is T
MEEAPTREPKRLRQDAAVTSAAAAAEEPQYVYLPIADAMKVPGVRVCLFAVVSEIGITDRSRGTDFTLRLRIVDQSCMDGISVTVFADKTTLLPCVKSSGDVISLHNVMITMHGEFFVSFNKEVSSFALFESKVAECSPYQTSVKYHGSKHDKELLTQMRTWLAYNPLGLKDFELQLRSLKSDSTFDLVCKVVHVHEDNDKLIFYVWDGTDTPAVEFQATLDPKAVESPPLFEGPPLPREVLCTMPIIGTVLRIFSDMPIKEVSHMQNRVYWARFCNITCKEEFGIWKGILLASSKVRLLSHEDGSVVDRRKMYAIRKANQVLCQPMASFPSNVTVLSDVEYEEEWHSTLMQSLTHKEVTHKLKTLARVVGAYPCQASGLRLLSTGNIHLRLTLEDPTARIHAYVHKNYLVQFFGGFLTEEAITKKMNKLLGIPEPEDSEEGAPLTRNPPWIWCCLTSFYMDKNNPWDSRKYRIFATEMRD

SEQ ID NO: 3451 - protein, 150 aa, Zea mays
  VARIANT 118: note = Ancestral polymorphism is P, Derived polymorphism is L
  VARIANT 90: note = Ancestral polymorphism is E, Derived polymorphism is G
MSKQKSVIRLGVPNDKNRSKAMQMASKFVGVNSVGIAGDAKDRLEVVGESVDITCMINLLRKKVCRADIVVVEEVKDKKKEEEEKKKKEEEEKKKKAEEEAKKKKEEEELKKKLCPYLYPPPPCSGACCRGPSPPMFLCEPEQPAGCHIM

SEQ ID NO: 3452 - protein, 193 aa, Zea mays
  VARIANT 178: note = Ancestral polymorphism is G, Derived polymorphism is V
  VARIANT 46: note = Ancestral polymorphism is G, Derived polymorphism is R
  VARIANT 22..193: note = Derived polymorphism lacks residues 22 to 193
  VARIANT 8: note = Ancestral polymorphism is V, Derived polymorphism is L
MGTMKRLVSTALAARGLLRSHGLPTTTSVMYQPAFQQFMNYSSPHGGDPNANTNSTTTRIAADPDTHQDFEPKSRISDMTLHDAIAQDIKENPVLIYMKGFPESPMCGFSALAVKVFQQYGVPVCGRDILGDLKLKECVKAHTNWPTFPQIFIKGEFVGGSDIILSLHQKGELKDLLGDIAQRDEQKVHAHDS

SEQ ID NO: 3453 - protein, 346 aa, Zea mays
  VARIANT 22: note = Ancestral polymorphism is S, Derived polymorphism is C
MGRSALAVRLASLLAFGLVLVSVEASLGDVDPRYRTCVRECQATGIVGENVISHCQSKENYTSVGVSWYNQEQIYIQWKELNCRTDCRYFCMMQREGERQSLGLSPVKYHGKWPFLRVSVFQEPLSTALSAVNLLMHFTGWLSFFLLVNYKLPLRPQTKRTYYEYTSLWHIYAILSMNAWFWSSIFHTRDIELTEKLDYSSAVALLGYSLILSLLRAFNVKDEASRVMFAAPILAFVTTHILYLNFYELDYGWNMKVCVVMAAVQLLTWAVWAGVSRHPSRLKLWTVVFGGALVMLLELYDFPPYMGFADAHSLWHASTIPLTYLWWSFIKDDAKFRTSTLSKKAK

SEQ ID NO: 3454 - protein, 36 aa, Zea mays
  VARIANT 7: note = Ancestral polymorphism is P, Derived polymorphism is L
  VARIANT 11: note = Ancestral polymorphism is P, Derived polymorphism is Q
  VARIANT 14: note = Ancestral polymorphism is G, Derived polymorphism is D
  VARIANT 16: note = Ancestral polymorphism is H, Derived polymorphism is D
  VARIANT 20: note = Ancestral polymorphism is G, Derived polymorphism is D
  VARIANT 25: note = Ancestral polymorphism is V, Derived polymorphism is D
  VARIANT 30..36: note = Derived polymorphism lacks residues 30 to 36
  VARIANT 32: note = Ancestral polymorphism is S, Derived polymorphism is L
MDPYPTPTPEPYDGSHFFHGHPRYVENKYWISKMAF

SEQ ID NO: 3455 - protein, 86 aa, Zea mays
  VARIANT 62: note = Ancestral polymorphism is G, Derived polymorphism is R
  VARIANT 43: note = Ancestral polymorphism is I, Derived polymorphism is V
  VARIANT 36: note = Ancestral polymorphism is V, Derived polymorphism is A
  VARIANT 23: note = Ancestral polymorphism is E, Derived polymorphism is V
MATDTCLDKNPPAEQSVRHPPREAAMCELKFTKERVGCYLLVVLVIVLLVGVLFGLGVFRHGYDRFKDLGRNHTCFDCNTTGTNRV

SEQ ID NO: 3456 - protein, 219 aa, Zea mays
  VARIANT 147..219: note = Derived polymorphism lacks residues 147 to 219
  VARIANT 107: note = Ancestral polymorphism is G, Derived polymorphism is D
MAAAAQLHGSAAATVAYRGTRAYSVPSSCRWPQSGSPKLSISTSGVSMKPFGFAAKLSTKCANENARVEELDLRSDQMKELQVEEQVIPQKRSAKIHDFCLGIPFGGLLFSMGLLGYIFSRSTISLVLGIAPGLATLLLGTLSLKFWRSGRSSFLLILAQAAISAFLAWKYSHAYFLTNRLLPWGFYASLSTAMGCFYAYVLLAGGNPPPKKLAAIPPQ

SEQ ID NO: 3457 - protein, 528 aa, Zea mays
  VARIANT 201..528: note = Derived polymorphism lacks residues 201 to 528
  VARIANT 313..528: note = Derived polymorphism lacks residues 313 to 528
  VARIANT 314..528: note = Derived polymorphism lacks residues 314 to 528
MKMTRPREASTVRGGCPRRAVMVPTITDVDGDGERCPTAPAVGGGAAGSTSMGVDADDPASPTGTGGDGTQWGGRTPLPAVEPPLSTYGAHISARFALAHGVQGWRAPVEVLRLAQQQTPPTWHHQQCAELRAYDVTKETTPTFSALSSGICFFDRKFYLLAAEAAAAEDAAHGAEGNEPPKALLLKIQAQGTAVEPALRQGSGLAPTMGTQCLECECDKVFASKKAMFVHLQRDYNGATSPTINMAAAAATTAVEKKLWDLWEEAGLRGRPPVAPLQASRCCSSQEDQEEVEAAMTLLEMASHGRTSSETQQQSVEPVRAPNAASGQHIVKTSAVEQVVAVQVVLPTIPPIFPSLDSSAGDKKAKKRRVMNHPEEAAASTSPLPLPPKGAARTPAPVSGKTHTCRTCGKSFSTHQALGGHVSSSHVKGKTTSVRHDGQSAGNGNITIPDSAGAFQERQDAQPSPAQAPTPQTTQASHVCDVCSLTFTSGQALGGHMGMHRKPAAPVLEPEYFDLNELPGQGENDNQP

SEQ ID NO: 3458 - protein, 488 aa, Zea mays
  VARIANT 301: note = Ancestral polymorphism is P, Derived polymorphism is L
MPKLEFTIRAENLGQYPREPPRDSDMHWGEVPQFGDANKLADLRLKDITIADFDIGVRTENPVRSPPKLPFDKKAVVVPKLALPWLGPLDKLFVETSPRKLCRLRRWRRVRRQSPDNPLQLNINYLVLATGYSLGIIGMKTVGDCNRKRVWVKDFGFAGKGCKAQRRAVRDRRHASFAESYLIASDAGDAFSNYKHRTMLMHYDVDRSEDRQSEEVQSAYRRDSDIGEEMIISSEEQNDENEWSWVNQDRDGGPLAESVSSLHMTQQVLENEIQKLSELGKELEAEESTSGNKDQDVIVLPYAEVDMLKLNEKMEHLEQKVKEVSNTIREKDLRLSKLQILIGTADRATVEEAAASIDQLETEFEHHLQEILEAEIQYLVMMKARQNWQVRAEDQMALEEHRASAAGDNTRMLLKLRETESKIVMLKEQVDKLEVREKDLYRTTEVLKMQSRTFKVSLFGLVQLIMMCLSLKMFFAQVSAPFDEVVPT

SEQ ID NO: 3459 - protein, 153 aa, Zea mays
  VARIANT 137: note = Ancestral polymorphism is I, Derived polymorphism is S
  VARIANT 135..153: note = Derived polymorphism lacks residues 135 to 153
  VARIANT 132: note = Ancestral polymorphism is R, Derived polymorphism is S
  VARIANT 73: note = Ancestral polymorphism is D, Derived polymorphism is N
  VARIANT 12: note = Ancestral polymorphism is S, Derived polymorphism is P
  VARIANT 7..153: note = Derived polymorphism lacks residues 7 to 153
MRSGRACSALASLLLLWLGVAAAQKASSWKTLSGKAPAIVAKGGFSGLFPDSSEYAYQFALLASSPDTILYCDVRLTKDEIGICLPDIKMDNCTNIPDFYAQGQKSYLVNGVPTSGWFSVDYNGTELEQVTRMCYHIVLKIFSKMQESCTSFH

SEQ ID NO: 3460 - protein, 258 aa, Zea mays
  VARIANT 92..258: note = Derived polymorphism lacks residues 92 to 258
  VARIANT 90: note = Ancestral polymorphism is R, Derived polymorphism is C
  VARIANT 76: note = Ancestral polymorphism is P, Derived polymorphism is T
  VARIANT 64: note = Ancestral polymorphism is G, Derived polymorphism is S
  VARIANT 57: note = Ancestral polymorphism is G, Derived polymorphism is E
  VARIANT 53: note = Ancestral polymorphism is A, Derived polymorphism is T
  VARIANT 45: note = Ancestral polymorphism is P, Derived polymorphism is L
  VARIANT 43..258: note = Derived polymorphism lacks residues 43 to 258
  VARIANT 42..258: note = Derived polymorphism lacks residues 42 to 258
  VARIANT 41: note = Ancestral polymorphism is R, Derived polymorphism is C
  VARIANT 40..258: note = Derived polymorphism lacks residues 40 to 258
  VARIANT 33: note = Ancestral polymorphism is R, Derived polymorphism is C
  VARIANT 11: note = Ancestral polymorphism is S, Derived polymorphism is Y
MDVESRMALESDSDSDACGGSGSGSETPPRCPRPHPWLAWRRQLPLLLLLPRAQRRGGRQQGPGLPRGDGERHQGPPALGQRYRLGDRPRARASWFSTTVTSSNFMSLPSPIDSGFNSRQLMWSQNFRPQHVHEEFVDSTKKAFELVDHCIEYLVYDPWTRESRGFGFVTMAATKEADHCIKYLDCSVLQGQVIIVEKECEAKFVEIQLRYSACNSCSYVCCCYSVVLDSKADPVTEEVGALEGLSLPVCTISLKNSR

SEQ ID NO: 3461 - protein, 872 aa, Zea mays
  VARIANT 51..872: note = Derived polymorphism lacks residues 51 to 872
  VARIANT 60..872: note = Derived polymorphism lacks residues 60 to 872
  VARIANT 65: note = Ancestral polymorphism is C, Derived polymorphism is S
  VARIANT 162..872: note = Derived polymorphism lacks residues 162 to 872
  VARIANT 279..872: note = Derived polymorphism lacks residues 279 to 872
MAAATCLPLFVLVSVLMAASTSPSSAAETPQELLLDFKASLQDPSGALSAWSSSTPYCNWPHVACAISAAANATVSVSISLQGLGLSGDLAASSLCRVRGLIALSLASNGFNQTIPLELSRCASLASLNLSAGAFWGPLPEQLAMLTSLVSLDLSRNSFEGQVPAGLAALGGLQVLDLGENLLSGVLHPALFGNLTSLHLLDLSRNQFLDSELPRELGRMSSLRWLFLQGSGFSGVIPESFLGLEQLEALDLSMNNLAGVVPPGFGLRLQKLMTLDLSQNGLSGQLPEEIASCSMLRRFEVHDNAFSGELPAGLWSLPDLRVIRAQNNRFTGRLREFPGGQSRLEQVQIDNNSFSGGIPQSIGLVRTMYRFSASLNELNGSLPDNLCDSPAMSIINISRNALSGTIPAFKNCRRLVSLYLAGNGFTGPIPASLGDLQVLTYIDLSSNALTGGIPTELQNLKLALLNVSYNQLSGRVPPSLITELPAVFLQGNPGLCGPGLPKDCDADAPSRRRQGLAVAATVASFLTGVALLAVGAFAVCKRLRGSESSSSSSPWKLVLFHPVRITGEELLAGFHDKNIIGRGAFGRVYLIELQDGQKVAVKRLVNSSGKLTFRVAKNEMEALAKIRHKNIAKVLGFFYSGSDGEVSIIYDHSQSQVGSLQDLICAPKLTICWKDRVRIALGVAQGLAHLHHDHAPQVLHRDLKSSNVLLLGDELEPRVTGFGIDRVVGEMAYQSCMSSDLNYKCYVAPEQSCTKKPTHLMDVYSFGVILLELVTAAQRPASDGESVDVVKWVRRRANVTDGVSQILDPSIASAATQKGMQATLELALRCTSVVPDRRPAMDEVARSLQAISFASVHPQTPMLTKSPGTLEP

SEQ ID NO: 3462 - protein, 497 aa, Zea mays
  VARIANT 11: note = Ancestral polymorphism is P, Derived polymorphism is S
MAPLRRWADLPADLLCRIGDRLDLKWYASARGVCTAWRCALPPPSPALLVVADDARCCPYAASLPTRRSFELTAIVSGSRCIGSSNGWIALSVVLFNGKTVFVLLNPIAAVEILLPPLIYESRWVSKVVFTPSPAKDDFAAAAICDIDRIAYVTAGARRWAVMDPVRLTCGDQLTDVVYTDKGKVFCLTKCGDVHVLRLPERRRRKPANADEAGSSEPEFSVLQSPQPNERTITFRPLRWQHQRNFRMMRYEQARPRDQDLTIPLRVTFCAETLIPYKKVPPESQGPHLNAPATVEPLLSEANLPFNPATVFAPPYDTVSSFTSAKNLVFCEGNLYQVWRNASCTVTLQLPAGGQHRVAENEILVLRYYPRRRPCWDVVKDLGGHSLFVGRNNAVSMYGEGVPGLRGNCVYWIGGRGRDQGMVFDMESGRSTPCRVPPVGFLPGHPHSTICWYFLSDVMSINNCYSNSVSSSNSSGGRKIYQTRARARADLAQDMEE

SEQ ID NO: 3463 - protein, 81 aa, Zea mays
  VARIANT 13: note = Ancestral polymorphism is L, Derived polymorphism is H
  VARIANT 21: note = Ancestral polymorphism is E, Derived polymorphism is K
  VARIANT 25: note = Ancestral polymorphism is N, Derived polymorphism is D
  VARIANT 34: note = Ancestral polymorphism is R, Derived polymorphism is H
  VARIANT 37: note = Ancestral polymorphism is A, Derived polymorphism is V
  VARIANT 38: note = Ancestral polymorphism is D, Derived polymorphism is N
  VARIANT 62: note = Ancestral polymorphism is I, Derived polymorphism is N
  VARIANT 64: note = Ancestral polymorphism is D, Derived polymorphism is G
  VARIANT 71: note = Ancestral polymorphism is T, Derived polymorphism is I
MQPTVNLSSEMILKYFKADIETVENVLSNMVDIRDVADALLLTYEKPEASGRYICSSHAIKISDMINILKTMYPSYPYPKR

SEQ ID NO: 3464 - protein, 157 aa, Zea mays
  VARIANT 37..157: note = Derived polymorphism lacks residues 37 to 157
MLSGRVVTCCHCQVIQDFELKSEKENAEIRLSDPLQYQSIVDAEWNIIYDKLDKCVKSGAKIVLSRLAIGDLATQYFADRDILCARRVTEEDLQRVATATGGTVQTSVNNVVDDVLGSCEVFEEKQVGNERFNIFSGCPSGQTMTIVLRGGADQVFY

SEQ ID NO: 3465 - protein, 420 aa, Zea mays
  VARIANT 220: note = Ancestral polymorphism is N, Derived polymorphism is S
MAAPLLPSSVSVLLSLHIALLLVLCSSQVGDSCSSVRDCGTGLYCGNCPAAGRTKLSCIRDLAIQPTSIVKGLPFNRYSWLVTHNSFSILGEPSRTGVERVTFYNQEDSVTNQLRNGVRGLMLDMYDFNDDVWLCHSLQGQCYNFTAFVPAVDTLKEVEAFLSENPTEIITIFIEDYVHSPMGLSKVFTAADLMKYWYPISEMPTSGKDWPSVTDMVAKNRRLLVFTSDASKEASEGIAYQWSYLLENEPGDPGIVPGSCPNRKESQPLNSRPASLFLQNYFPTIPVQNEACKENSGLPQMAQACYAAAGNRIPNFIAVNFYMRSDGGGVFDVQDRINGRTLCGCDTIAACQAGAPMGACKDTGAPNQTTSPSVNGNVYSGTIEFKTHSTSAASNNNIRSRSVFLLRLQLTLLLFFSFRL

SEQ ID NO: 3466 - protein, 182 aa, Zea mays
  VARIANT 17..182: note = Derived polymorphism lacks residues 17 to 182
  VARIANT 27: note = Ancestral polymorphism is V, Derived polymorphism is F
  VARIANT 37: note = Ancestral polymorphism is R, Derived polymorphism is H
  VARIANT 40..182: note = Derived polymorphism lacks residues 40 to 182
  VARIANT 64..182: note = Derived polymorphism lacks residues 64 to 182
  VARIANT 109..182: note = Derived polymorphism lacks residues 109 to 182
MQFVAMKRRDLLELCRQHGFATRGSKFVLTGALLAQRGPGGVPLDGKGPSFPSRCYNYGMDGHWVRDCKSGDWRDRRGRSYLRSASPHHGKVRRRSYSRSLSPYLGRGRGRSYSRSPSHYHRRGRSWSYSWSQSPRNNSKAYGEELPSIRSGYSRGPRRSSPPMERAECNGGSPMRGEARGK

SEQ ID NO: 3467 - protein, 132 aa, Zea mays
  VARIANT 75: note = Ancestral polymorphism is K, Derived polymorphism is Q
MFDCFQQLRLDMSHSGTGPGGGAHHLGSMPTESETGNNNLGLGSMLPQPPSQPQRPPLPPSVRGSSSNSVSAGNKRKASGSSMCAQIGQSSSSAQAAKNKEANELVVVGTSNTGTRVVASVDIAGLDDDDDI

SEQ ID NO: 3468 - protein, 201 aa, Zea mays
  VARIANT 47..201: note = Derived polymorphism lacks residues 47 to 201
  VARIANT 21: note = Ancestral polymorphism is T, Derived polymorphism is M
MSSSMPRTKKDPSRTAYSRATDRWERVAAVLPGRTVADVTAHYDDLEFDVGSIEAGFVPFPRCGGGASQSAAGFTFEVGGTSFKRSCHVVGSGKRERGPDHERKKDIPWTEEEHKYEIEDQLTGVVLAYLCSSSVQGMPFLRSWSGPHSRLPLPTTWQERLKPVPPASNVNPAADCDAPPPQRGKGTKPTSMEPTSNSRSS

SEQ ID NO: 3469 - protein, 264 aa, Zea mays
  VARIANT 154: note = Ancestral polymorphism is P, Derived polymorphism is L
MAHTWPPAARSRGVSTQGGGRRGEQWANGVRDRWERVAAVLPGRTVADITAHYDDLEFDVGSIEVGFVPFPRCGGGASQSAAGFTFEAGGTGFKRSCHVVGRGKRECGPDHERKKGIPWTEEEHKRIVGLHQNTTTGSTGITDMWEPLEEGLLPLRQQDMSLCLYDHYNSFKEGAGHIIYQITACNLSRFVEPTPIQSQGWPMTLKGRDLIDIAQTGSGKTLSYLLPRLVHVGAQPRLEFKSGKSPIMAATDVAARGLDLKLTP

SEQ ID NO: 3470 - protein, 488 aa, Zea mays
  VARIANT 123: note = Ancestral polymorphism is R, Derived polymorphism is Q
MSAPMEISFSAPPPPPDAASTAAASPLLEPAAAQMLPPVAAVSSSQPMQQTAAAAAVVAPSPADDKVLVSVEVLLHATSVARHEDVQVAVERMLEARSLSYVDGPVPIPADNSFLLENVKRIRISDTDEWVENHKVLLFWQVKPVVHVFQLSEDGPGEEPSEDDTLSSFNEWALPAKEFDGLWESLLYEVGLKQRLLRYAASALLFTERGVDTCLVSWNRIVLLHGPPGTGKTSLCKALAQKLSIRFKSRYSMCQLIEVNAHSLFSKWFSESGKLVRLFVAKLFQKIQEMVEEESNLVFVLIDEVESLAAARQAAISGSEPSDSIRVVNALLTQMDKLKSWPNVIILTTSNITTAIDIAFVDRADIKAYVGPPTLQARYEILRSCIQELLRVGILTYPQGSSVPCILNYSTLNEKKHCPEAAEPHGALHLSNLLYEASKLCEGLSGRSLRKLPFLAHASVTNPSCCDASTFLHTLIQTARREVLESRG

SEQ ID NO: 3471 - protein, 479 aa, Zea mays
  VARIANT 198..479: note = Derived polymorphism lacks residues 198 to 479
MPLILCIQILLMDFQDTTSRIMAHRGHLDGLTAQAPALMRHGSFAAGSLSSHSPLESSSTLEMLENKLAMQTAEVEKLIMENQRLASSHVVLRQDIVDTEKEMQIIRTHLGEVQTETDLHIRDLLERIRLMEADIHSGDAVKKELHQVHMEAKRLITERQMLTLETEDVNKELQKLSASGDSKSLPELLAELDGLRKEHLNLRSQFEFEKNTNIKQVEQMRTMEMNLMTMTKQAEKLRGDVANAERRAQAAVAKATGHAAGAQVTASQPGTAQATAVPAAATDPYAGAYASYPPAYQQGAQAGAYQQGAQAGTYQQGAGTQAGGYQQGAQAGAYQQGAGAQAGAYQQGAQAGAYQQGAQAGAYQQGAQAGTYQQGNQAGAYPYAYDAATAYTYAGYSGYPVAGYAQSAVPNYSYAAPPQPISSGAATDAASLYGAVGSAGYPTAQVQPSSGPANAAPPPPPPPAAPYPSTYDQTRGAQR

SEQ ID NO: 3472 - protein, 195 aa, Zea mays
  VARIANT 64: note = Ancestral polymorphism is F, Derived polymorphism is L
  VARIANT 141: note = Ancestral polymorphism is R, Derived polymorphism is M
  VARIANT 163: note = Ancestral polymorphism is C, Derived polymorphism is Y
  VARIANT 185: note = Ancestral polymorphism is S, Derived polymorphism is R
MQCHCRRSPPPAHRRRSGASVGVVVASMDWPQVTTYKALVSAQAHMEEIIQNLDGMIRELLISFYKRTGKKPKRIIFYRDGISEGQFNHVLILEMDAIRKACASLEDGYLPPVTFVELWLIPRFAIRGSLISTFVAMLEFREPAGQYTIMSSTMKTVSRMMGCRYLQTACATHTHDARALSQLVSLYASFTKFFV

SEQ ID NO: 3473 - protein, 526 aa, Zea mays
  VARIANT 401: note = Ancestral polymorphism is P, Derived polymorphism is Q
MELNLVSWVSSLLLLALSAAYVYYTTRRRSPQRLPPSPPGWPVIGHLHLLSEMPHHAMAELARTMKAPLLRLRLGSVRAVVISKPELARAALTTNDPALASRPHLLSGQFLSFGCSDVTFAPAGPYHRMARRVVVSELLSARRVATYGAVRVKELRRLLARLTKNTSPAQQPVDLSECFLNLANDVLCRVAFGRRFPHGKGDKLGDVLAEAQDLFAGFTVGDFFPELEPVASTVTGLRRRLKSCLADLRAVCDEIVDEHISGKRQRIPGDREEDFVDVLLRVQKSPDLEVPLTDDNLKALVLKLTTRLIPQDMFVAGTDTTFATLEWVMTELVRHPRILKKAQDEVRRVVGGKGRVEESDVGELHYMRAIIKETFRLHPAVPLLVPRESVAACTLGGYHIPAKTRVFINTFAMGRDPEIWDSPLEYRPERFENGGEIDLKDPDYKLLPFGGGRRGCPGYTFALATVQVSLASLLYHFEWALPPGVAAEDVNLDECFGLATRKKEPLFVVVTKSEAYEFKGEELNEV

SEQ ID NO: 3474 - protein, 555 aa, Zea mays
  VARIANT 110: note = Ancestral polymorphism is G, Derived polymorphism is D
  VARIANT 371..555: note = Derived polymorphism lacks residues 371 to 555
  VARIANT 417: note = Ancestral polymorphism is R, Derived polymorphism is W
  VARIANT 433..555: note = Derived polymorphism lacks residues 433 to 555
  VARIANT 449..555: note = Derived polymorphism lacks residues 449 to 555
  VARIANT 476..555: note = Derived polymorphism lacks residues 476 to 555
  VARIANT 488..555: note = Derived polymorphism lacks residues 488 to 555
MAASTSPLLLALLLLPALTAAASLLALPLSTASRWIVGVDGRRVKLACANWASHLEPAAAEGLARRPVSDIAARVAAMGFNCVRLTWPTYLVTNATLASLPLRWSLERLGMLESVAGVRVNNPALLDLPLIDVFREVVSSLARKGIMVILDNQMTTPGWCCSRTDGNGFFGDVYFDPNEWLKGLSAMATMFNNTKYVVGMSLRNELRGPKQNVSLWYRYMQLGAEAVHAANPNVLVILSGLDFDNTLSFLFKEKVRLSFSGKLVYEQHWYGFSDGGNWETQNQNDVCGMVVDFIWAKGLFLLQHGWPLFFSEFGFDMSGTHIGDNRYLTCFLSVAAEMDLDWAIWALQGSYYIREGILAYDESYGLLTWDWCTARNPSFIKRINSLQSAFQGPGLPNTQQPYYIIFHPQSGLCVLARSSKLLELGPCDESNAWNYTSAYELVVKSTGQCLQAQSVGKNAKLGTDCSKPSSKWHLISDSKMHVSAELAKNGTRVCLEASPDGAIRTNQCKCLSVDPTCDPESQWFKVILSSRDIPGGDSILQLPSLGPWPPTSLSS

SEQ ID NO: 3475 - protein, 567 aa, Zea mays
  VARIANT 328: note = Ancestral polymorphism is D, Derived polymorphism is Y
  VARIANT 60..567: note = Derived polymorphism lacks residues 60 to 567
  VARIANT 45: note = Ancestral polymorphism is T, Derived polymorphism is M
MCNTYTSLIYFPAAVFSNVYAIFGSTLQMGDVLILSLQCGNLSVTICVRVSRFWDFSDPQDAARLLHCDMVLLDEEGNSIHATIYPPFIEKFRPLIKEGSVYNMTYFRVRASNNLYKPVPNDIMITFTNWTKLEQVIEIPPAFPTLTYSLTHIEQIHSRIDHKDYYTDAIGIVNSVSDVSPHRSKGQQASSLKRNISICSARGASVNVVLWGAQATLFPGERIYEDGQNSPQIVLFVGTLVKKYADVLCLTGSSPCKWYINPSIPEVETLTSSARGDHKPVKWNATVTSSQLISPVAEEQKVSYIKYLHPFENKGKEFLVTVTIRKIDSKWWYNSCRKCACTAVTHGDSYKCTNHDCANIVMPVQRYKILVTAGDETADTDFILFGHMAQRIVKRPCDMLIANTPSGFIPDAITKLLERTFIWNVSFSGHTINSGNVCFQVNATVKELGNQNVDISTSTIGTHQSSLMFSQGASSSMEDTPHKTDTLPSPLTPLTPQGSVATTKYLETVDAGDAERVTTQSSTTRKRSCSLPGKSIAKKLFIADDEEGSISQSSGGGVGGSSDDKDN

SEQ ID NO: 3476 - protein, 173 aa, Zea mays
  VARIANT 1: note = Ancestral polymorphism is M, Derived polymorphism is V
  VARIANT 87: note = Ancestral polymorphism is A, Derived polymorphism is V
MKIEKIRPLPPADSSIVDTSDSEPEVTQIDVKEVGNEGTLEKEEKATDGLKTDGSGIVNTMVEVQLMEKNSNNATLDGVIHANSEIAVESYFLVLDAKNSLESIEDRRKQKTDTISVKEQDQLEEAQGSLKSDVKTGQSKEARLARVCAGLSSCLQEYKSKNAQLEELLVQEV

SEQ ID NO: 3477 - protein, 267 aa, Zea mays
  VARIANT 142..267: note = Derived polymorphism lacks residues 142 to 267
MILQVNWIVLASLNIFYLILVLVVGKISIFCVLFSRNFIFSVVAETRYLNASNRELGDHFQTKRDGKNGVDASIEKRTLKLLQFTFQELKSATLNFRPDNILGEGGFDYVFKGWTEPNSTAPAKPGTGVTVAVKSLKPDALQGHREWVVRTLPLPWSNRMKIALGAAKGLAFLHGGPKHVIYRDFKTSNVLLDVEYNAKLSDFGLAKVGHQGDKTYVSTRVVGTHGYAAPEYVMTGIRDKLLTSVATCSRNYVPCLSVACWFFTLFF

SEQ ID NO: 3478 - protein, 99 aa, Zea mays
  VARIANT 62..99: note = Derived polymorphism lacks residues 62 to 99
  VARIANT 33: note = Ancestral polymorphism is V, Derived polymorphism is I
  VARIANT 25: note = Ancestral polymorphism is E, Derived polymorphism is G
  VARIANT 19: note = Ancestral polymorphism is A, Derived polymorphism is V
  VARIANT 16: note = Ancestral polymorphism is R, Derived polymorphism is L
  VARIANT 14..99: note = Derived polymorphism lacks residues 14 to 99
  VARIANT 10..99: note = Derived polymorphism lacks residues 10 to 99
MSHPVQMKWQEPFQIRMEAIIIYLEALFMFSEVMLLMIDSFISLLQVYDMSDSQMKLNDFISSPVVEDGQDEFEKGDFIVDDEEEVEGEEEEQKSDDEK

SEQ ID NO: 3479 - protein, 341 aa, Zea mays
  VARIANT 259: note = Ancestral polymorphism is G, Derived polymorphism is R
MATGDLRSLATVAAAVIACMGYARFAARRLRPVLSRLAAFLPVLAVLPFLPLAFRALHPRGISGFFLAWAAEFKLLLLACGQRPLDPSLPLPSFTAIATFPVTLRDPKSSASRPGLGLVESASMAALLAAIVSLYRYEERMNGYVLLTLYSVHVYLALELVLAAAAAASRALMGLELEPQFDRPYLSSSLRDFWGRRWNLSVPALLRQCVFRPVRARLGAAAGVLAAFVVSGLMHEAMFSYLTLLRPTGEAAAFFTLHGACAVAEGWWAAHEGWPRPPRAMATPLTLAFVGVTAFWLFFPPLTRPGADKQAIAECEAMVAFLRDTAAWAVDSAWSVLSSWS

SEQ ID NO: 3480 - protein, 341 aa, Zea mays
  VARIANT 32: note = Ancestral polymorphism is Y, Derived polymorphism is H
  VARIANT 36: note = Ancestral polymorphism is S, Derived polymorphism is L
  VARIANT 70: note = Ancestral polymorphism is L, Derived polymorphism is I
  VARIANT 113: note = Ancestral polymorphism is A, Derived polymorphism is T
  VARIANT 123: note = Ancestral polymorphism is A, Derived polymorphism is T
  VARIANT 306: note = Ancestral polymorphism is K, Derived polymorphism is E
MVLYADLDALRASAADVRIVTSDGQTIAAHSYVLASASPVLERMIHRARRGWGAADCTVAVFGVPSDAVIAFLHLLYSSRVAPGTEEELVAAHGPQLLALAHAYRVEWLKRAAEAAVSARLTADRAVDMLKLARLCDAPLLYARCARLAAKDFAAVEATDGWRFARRHDPALELELLQLLEGADQRRARWARARASQEAYRQLGEAMGSLDCIFDAASAGPGTCRDGDATCQGLRLLMRHFAACARKAAPGGCARCKRMLQLFRLHASVCDRAELQDQPCRVPFCSHFRAKMQAEKADKTWRLLVKKVRRARAMVSLANRQVPEVVAMSWVKYSSSKWARN

SEQ ID NO: 3481 - protein, 814 aa, Zea mays
  VARIANT 31..814: note = Ancestral polymorphism lacks residues 31 to 814
MDLVVHSQCRATDLWAGWRVTSLKWVMSSSSGPHFQVKIEDTIFHYSTFMSKLKMTDMRRHSVDVPLSRTLVQLKRLRSLRDPATNSMGKFASPADHMVWETASSNGVALELGRSAHNHQVEEDEDVGAEPTMGSERSFRGPNARTASYRRSSAVRIRGLNPPRNKQVHRVRRDGHRKSVDSSHSNHSSIRQLANNLVNNVDAEEEVNSYERPKFAMPGKSDEDEVKMPGHSKFRSKPSAAMSRVGSPCMSASEARSGHGTEDTRLRSNDVVGSNFSGCGISYCWSGASKCRELYSDSDGPDQPLLSTDGTEAAFQGNVPYTETPSGSLRDSEVMLDQLSLLGKKITISLVHELVGSVSDDELIELLDLALSSDTTNTVRRARELMGSAIDPLQLVSQLANLIMDILSGRCQSAVSEVSKSFLGRYALSEVGIKKLRHALKILSETEKQLRTSRNQATWVTVALLQFGTNEPNLIAEPNDMHSHSVTGYTDDWVSKVHSNTNFCQACNSSKSNCSERHCRRLKLENIWRRAIGKCRSRSAKSFLRKEGFLSSVHVTEELAIAEVGFGHPDHLSRAEKMQSLIECSLQHVLGCNVEIRFKLVPCPVRKDARLKRHSFSFLSCSGRKQELSDSVVTDEDEAVRPGARETPLKGYTSSQQESPYTMQRVDSKPTAYGCEDDGRSTLTSNRSMTDDMTRTCRSETNYSKGGVSDQGRFGSIQEPDLQPSCFSRTLRLQKKLLSSGAAHTICLRIQPHNKMEFLPKKEFDTYFCAYEPYEQCPRSVSRATYSSRDDDLWSKNSRFGSNLLCWKAPKQPM

SEQ ID NO: 3482 - protein, 143 aa, Zea mays
  VARIANT 44: note = Ancestral polymorphism is E, Derived polymorphism is A
  VARIANT 42: note = Ancestral polymorphism is V, Derived polymorphism is I
MAMVASTSFAYHKPRFAVVCRKNRDGRDRERDGKEHKHPFKVVEITPPPRNSAKRRCRFLANGAVVLGYGRRRTRTRTDDYGEQNIHCGESVTIEGQAYTVSAVTHRYQLRKGRYEPSEKRLDVLSTGRYILNLYLQNLLDQS

SEQ ID NO: 3483 - protein, 510 aa, Zea mays
  VARIANT 236: note = Ancestral polymorphism is I, Derived polymorphism is T
MIKQILGRLPRKPGKAGDSREAAAAGNGTEPSNSYSVARSMDPGNKRAGNGDYPVPSGVIPNPVMNGAVVYHSNEPLPAFKDVPMSEKQNLFVKKVSLCCAVYDFVDPTKNLKEKEVKRQTLMELVDYVASANGKFSEVVMLEITKMVSINLFRSSSPTPRENKAIEGVDLEEDEPLMDPAWSHLQIVYEVFLRFVASQETDAKLAKRYIDHSFILRLLDLFDSEDPRERDYLKTILHRIYGKFMVHRPFIRKAINNIFYRFIFETEKHNGVAELLEILGSIINGFALPLKEEHKLFLVRALIPLHKPKCVSMYHQQLSYCITQFVEKDCKLADTVIRGLLKYWPVTNSSKEVMFLGELEEVLEATQLAEFQRCMVPLFRQISRSMNSFHFQVAERALFLWNNDHIETLIKQNYKVLLPIIYPALERNSRDHWNQAVRSLTLNVRKIFSDHDSTFFGECVQRFSDEELKQAESDSKRDAMWKRLEEMGASKPGGNHPLGAPNGKPSHAAG

SEQ ID NO: 3484 - protein, 98 aa, Zea mays
  VARIANT 76: note = Ancestral polymorphism is R, Derived polymorphism is H
  VARIANT 55: note = Ancestral polymorphism is A, Derived polymorphism is V
  VARIANT 12: note = Ancestral polymorphism is L, Derived polymorphism is P
  VARIANT 3: note = Ancestral polymorphism is T, Derived polymorphism is M
MKTQVVTMQRQLMRDLEVLPLEEATASAKSMNVNGACQRGKLLRFLEQVVVMVVAVDVDEVLGSFLAALNKFIVDRCSWNHSVSKYHVYEFFKVNLKS

SEQ ID NO: 3485 - protein, 323 aa, Zea mays
  VARIANT 10..323: note = Derived polymorphism lacks residues 10 to 323
  VARIANT 228: note = Ancestral polymorphism is L, Derived polymorphism is H
  VARIANT 247: note = Ancestral polymorphism is P, Derived polymorphism is L
MSRLWRVETGGGRDHRWPLPQCASAAGGPMADYLDYSRILEATEPSGIVDGLFSGHGNRRFLGSWSIGTSPVGEVGGGDPGPAEAGAGVAGHLPHRRGRRTLLRRRRAKLNSPEDAAAHRARDAEAAFAAARAGPPAALLDSQAVGDDMTDYLDYSRILEATEPSGIVDGLFSGHGNGRFLGSGFEMGSAAAGADEGWWGRARAGATEHIHAHRRWAAPLLSVLLSSLLISASLSSSSRALLISFSPLPSAASVEPLFVEAPRGAPCPGCNNRTEQRQKNEVRSSCIHGTPWAVATITVSERRTQPPPSAVSSRTPSLEILLH

SEQ ID NO: 3486 - protein, 379 aa, Zea mays
  VARIANT 57: note = Ancestral polymorphism is A, Derived polymorphism is S
MLLSGPPPVPTPPLLLPESSGEDGGHDSSSRAAAAVGSAPKRRAETWVREETLCLIALRREMDAHFNTSKSNKHLWEAISARMRDQGFDRSPTMCTDKWRNLLKEFKKARSHSRNSGGGSGSGGNGNAKMAYYKEIDDLLKRRGKATGSGTAGCVGSSAGKSPKSNCKIDSYLQFTTDNGFEDANIPFGPVEANGRTILSIDDRLEDDRHQLPLTAADAVATNGVNPWNWRDTSTDGGDNRGNFGGRVILVKWGDYTKRIGIDGTPEAIKEAIKSAFGLRTRRAFWLEDEDEVVRTLDRDMPVGTYTLNLDDGMTIKLCDASRMQTPEDKTFYTEEDFRDFLSRRGWTFLREYGGYRNVDSLDDLRPGVMYQGLRSLGD

SEQ ID NO: 3487 - protein, 215 aa, Zea mays
  VARIANT 39: note = Ancestral polymorphism is Q, Derived polymorphism is H
MASRSASKDIITLRGSAAIVSEFFGYAANRYGTLYSARQTAAVPVHPGLDRKVKKYGLTMLLTQDEGVKNFIASLTSQLSEWLEAGKLQRIVLVIMSKATSEVLERWNFNIVTDAEVVEKGAIKEKSDKEIMREIQAIMRQIASCITYLPCLDEPCVFDVLAYTDTDVDAPGTWVESDAKLIDNPQMVKLHSFDTKIHKVDTLVSYKKDEWDEEE

SEQ ID NO: 3488 - protein, 425 aa, Zea mays
  VARIANT 286: note = Ancestral polymorphism is Q, Derived polymorphism is K
  VARIANT 247: note = Ancestral polymorphism is M, Derived polymorphism is R
  VARIANT 213..425: note = Derived polymorphism lacks residues 213 to 425
  VARIANT 209: note = Ancestral polymorphism is L, Derived polymorphism is P
  VARIANT 199..425: note = Derived polymorphism lacks residues 199 to 425
  VARIANT 191: note = Ancestral polymorphism is P, Derived polymorphism is S
  VARIANT 181: note = Ancestral polymorphism is G, Derived polymorphism is S
  VARIANT 165: note = Ancestral polymorphism is P, Derived polymorphism is T
  VARIANT 162: note = Ancestral polymorphism is A, Derived polymorphism is P
  VARIANT 138: note = Ancestral polymorphism is P, Derived polymorphism is S
  VARIANT 118..425: note = Derived polymorphism lacks residues 118 to 425
  VARIANT 85: note = Ancestral polymorphism is L, Derived polymorphism is F
  VARIANT 83: note = Ancestral polymorphism is R, Derived polymorphism is C
MKQPWPPPRAVPPRLDYSDDEASIGSAGSAGTRLYPLTKKRAKPAVPLGANYRLIDIPVNSCLNSNISKIYVLAQFNSAFLNRHLSRAYGSNIGGYKNEGFVEVLAAQPSPDNPNWFQSTADAAHRETYADITVAALPMAEKRATAFGLMKIDEEGRIIEFAEKTKGEQFTEMMVDTTILSLDDVRAKEMPYIASMGIYVFSKDVMLQLLREQFSEANDFGSEVIPGATSIVKRVQAYLYDGYWEEMWAVLIRIFAHQEKVDWMYFVPFAGTTVGLVIYSYRGSRQNPKETARDHQHFFIPYDRRVLMIGGLRSSFAMDAPCSTVLIFRQDLATMEWEEAGRMPPNMYCCFTGLCEAASQGGAIPTDAAGGNNKVKVLGGDGKVWFAGKRVRGKLAMWEEYEMGSSGKWDWVDGLPGYGDVESLF

SEQ ID NO: 3489 - protein, 93 aa, Zea mays
  VARIANT 11: note = Ancestral polymorphism is R, Derived polymorphism is K
MVAAGVLITLRSSFLSLMWLVEPLHPLLLTAPSLRRHRWPLQILQHLLRRPLQRCLLSFVHKQLIRRAGKVTGPWMEVWEVARHYHTAKDFVQ

SEQ ID NO: 3490 - protein, 467 aa, Zea mays
  VARIANT 131: note = Ancestral polymorphism is T, Derived polymorphism is I
  VARIANT 338..467: note = Derived polymorphism lacks residues 338 to 467
MTAVATPTPPPPRQLSLEDLKAISVLGRGAKGVVFHVVHAHGEPDGEGEGGAAAAAMALKAVSREAARHKKAGSGDGDGHRRIWFERDVLLSLRHPLLPSLRGILATEAVVGFAIDRCGGGDLNSLRRRQTEKMFSDSVIRFFAAELVLALEYLHSLGIVYRDLKPENVLIQDSGHIMLVDFDLSTRLPAPPQEPDAPVTSPNAKPALPVAAPSPSRGSARKPAGAALCFPFRTAIATKPAAPATDSRSPLSTSRTASSSSSSSSSTATTASSAASAGGRTPAKSNSFVGTEDYVAPEIIAGRGHDFTVDWWGLGVVLYEMLYGRTPFRGQSRKETFYRVLTKQPELVGEQTPLRDLIARLLEKDPEKRIGARGVRAHPFFRGVDWDRILQVARPPFIPTPPPQDEGEDGDGDEALDVEKVVREVFASNDAEGGKAWPVADGGRVGGDGDCDGRGDQSKDGDFSVFF

SEQ ID NO: 3491 - protein, 175 aa, Zea mays
  VARIANT 20: note = Ancestral polymorphism is I, Derived polymorphism is T
  VARIANT 30: note = Ancestral polymorphism is N, Derived polymorphism is T
  VARIANT 73: note = Ancestral polymorphism is P, Derived polymorphism is S
MSRDPLVVGHVVGDILDPFTKAASLKVLYNNKELTNGSELKPSQVANEPRVEIIGGRDMSNLYTLVMVDPDSPSPSNPTKREYLHWLVTDIPESANASYGNEIVSYENPKPTAGIHRFVFVLFRQSVQQTVYAPGWRQNFNTRDFSAFYNLGPPVAAVFFNCQRENGCGGRRYIR

SEQ ID NO: 3492 - protein, 763 aa, Zea mays
  VARIANT 51: note = Ancestral polymorphism is S, Derived polymorphism is I
MVHSNALLWKKGPVHTVWKASFCKESELSRDKVAGTDIVASVGEIMLDVRSPHGLHLAVLAKLLFGIVRIFSKKMEFLLHDFNELSRSFRLSQLAEPTLPSGRLTLGVLKQANKDVRVGRLVVGQQNTCKVQKTVHAVRTTEVSSAISSEGHSVRVETEVTLGISVVIKETRLPDGLPTFTIPRSFELDSFNLGIAEDIDDEGDDHHQLAHQDILLRDERHHAPYFYEPYQRVSCSYAVDSAGFLPEYIALPNNILDFTEGGKSEIENKNADSAWFTPLKDVLPPEMMGMVAEAKDLAKESKTGDNSVRQVNMNENNRGSDCTMISIPLQESQELQCSDNALENMACGSRSANYTTTEASENDSLENTAPPAAVFPVLGSDTGEESLKPLVRKCKIRPDNELSPSTPEPLQEDTPGPSSSRFRVRTPAKTEKSQSTRKRRRALLYRKQDYIWTERESQQRVRRKLTWSLFDDEGTVLLNEMLRGAIEDASDLVQQRRKAPHTHLDIWRVAKLGSLSYTFMDPLIPYQTSIPLARVTAPEAPKSSYEESVKARRRLSYEQSESIHVCKDTGSTERENTLDTSRKRKLKEPIDSEVRVDCQTESWPVQDEVCTCNEDTIKEKSAQVKADEPSSKVPLKNGLHESENQILLHTEVLNAAVDNIDENIIVDEGHSTDEGLQNSTRTRKIASILHQLFLDQKRKEGTTTLSLSQVLEGTKRKIAALFFYETLVLKNRGLVEVKQEHHYDDIILSETPKLKAELQRCRN

SEQ ID NO: 3493 - protein, 353 aa, Zea mays
  VARIANT 183: note = Ancestral polymorphism is S, Derived polymorphism is R
  VARIANT 194: note = Ancestral polymorphism is T, Derived polymorphism is M
  VARIANT 237: note = Ancestral polymorphism is N, Derived polymorphism is I
MARPRAKKRTTPQAAATDSVEPDATVGASSKLEEAAAEPATRERGKRVKAPPKPKPETEYFDEKGNFEDLWLSAFPVGTEWENIDKIKEFNWSFENVEEALEEGGELHGKTLYMFGSTEPQLLYVNGESKIVLIPIVVAVDCPFPPSDKIGINSVQRENEEIVPMKAMKMAWVPYVPLEDRLSRIDIFKTKIFTLGCTQRRSALKHLKIERVKKFDYCMPYYMPLQPLEDEENTTINFLYPLEPPIVDEFDWEMDDYEDFADQKVQEGSLPEGEKEKFKEFLKEKVRERKRELRQAKEARKKAIDDMDPAMKEAFENIKFYKFYPVKTPDTPDVNNVKARYINRYYRNAHYLK

SEQ ID NO: 3494 - protein, 163 aa, Zea mays
  VARIANT 88: note = Ancestral polymorphism is R, Derived polymorphism is S
MEQSREDDARRNKESETGAKDEMVVYFSIPVFFAIIILAACGVVLADVVTSIWGFAVSSLSSSSSHVKAWWHSRPVLLFRLGGVTTLRQKLNDPFAMCQDSMEPGEKVRTLSCNHMFHYGATVKCQKTLDEWLLKEEMSCPICRGIPHPVLPWKRPPPSLLML

SEQ ID NO: 3495 - protein, 87 aa, Zea mays
  VARIANT 1: note = Ancestral polymorphism is M, Derived polymorphism is I
  VARIANT 22: note = Ancestral polymorphism is A, Derived polymorphism is T
  VARIANT 23: note = Ancestral polymorphism is G, Derived polymorphism is R
  VARIANT 38: note = Ancestral polymorphism is P, Derived polymorphism is L
  VARIANT 42: note = Ancestral polymorphism is P, Derived polymorphism is L
  VARIANT 48: note = Ancestral polymorphism is T, Derived polymorphism is I
MCIFSLALGPGEEPITFVGKTTRKIMPARGPNDFGWDPVFQPDGFEQTYAEMPKSVKNEISHRGKALALVKEHFTSASYTVQSDDST

SEQ ID NO: 3496 - protein, 103 aa, Zea mays
  VARIANT 48: note = Ancestral polymorphism is K, Derived polymorphism is N
MAVYFSITAFLVVIILVLAACGVVFVNVVVIIWGFALAASPFSFLLSKVKWHSRLPPSSRMPEEELMFPSHWFDETLLQADSEEEVLLPTHWFDETLLQESTS

SEQ ID NO: 3497 - protein, 666 aa, Zea mays
  VARIANT 51: note = Ancestral polymorphism is P, Derived polymorphism is S
  VARIANT 143..666: note = Derived polymorphism lacks residues 143 to 666
MASALLSYLQALWPFSALLREEDDLRASARLVGSLSVPEETKQFVLALREPGGSPHDRHRDGAGVIYILAAQNLSEQSASDAERLIREVRPRAVVTQVARPALEDVRIEEDCLAGNGGGGVPVPASPFQVIKRCVTEKRSRDQYVKAAACQVLQEIFGVGFYGHLLAAKRAAEETGSCFLLLESPYERNCGGGGSASQNSTADDNSAQSLQASCSLAHITMDDASGLQLQANCLTPRSATSIVSSHGRSICLMDDNGGQLLKSLAPTLNFLMSQAAPSNAATECRPSECKLIDRYEAPPFAQSVYPLLADLYHIFADIPSIGRAMVSAQKLLTQVHKGEPISSDMLSDVYVFRIAIEALRMGLNSAARSQIDTGDKHGSNDLDFSKLQSDEKCHILLVQALRSQLREFGSVVAIVDASCLAGIRRHWNTPVPSEITQLASRCFNHYGAENDDKIEVPSADDTDKKSWISEKPVVAVGAGGTALLGFSSLSKSLQASAFLKMAPYKSPAVLKYGLMQLQRHAAIVLSKILPHGVVTAGSKASALQFTASAEKIRAVTHTVISSAERTSLLVMRTSFYEIMQKRHRQPFRIFPWATFGCSMAACAGLVMHGDGIECAAEAAPSVPMIASLGRGLESLRLTSQEVRQTKGQNVKEALRALMSSLKKSAK

SEQ ID NO: 3498 - protein, 366 aa, Zea mays
  VARIANT 261: note = Ancestral polymorphism is G, Derived polymorphism is C
  VARIANT 221..366: note = Derived polymorphism lacks residues 221 to 366
MLQVRASSAFLPSTSSPSPPSSSQAPAPAPFRLSGKSQRRGGLIAVPQASRVARRSVMAAAGAAAAAPAAAKLEDADALIDSVETFIFDCDGVIWKGDKLIDGVPETLDLLRSKGKRLVFVTNNSTKSRKQYGRKFETLGLSVDETGRGSLLACAQEEIFASSFAAAAYLQSIDFPKDKKVYVIGEEGILKELELAGFQYLGGPYGLTQLRFHRRAADRRRQEDRAQAWSLHGARRRCTYDPSPRSGGGCGMLLEVDQPNGTLLEGLFYRWERSWWDLIATSTTTKFSKSSELRIAEAYMYGTLCIRENPGCLFIATNRDAVTHLTDAQEWAGGGAMVGALLGSTKQEPLVVGKPSTFMMDYLAKK

SEQ ID NO: 3499 - protein, 549 aa, Zea mays
  VARIANT 38..549: note = Derived polymorphism lacks residues 38 to 549
MEGEQVYVDWRGNAADERRHGGVRATVFLYVLFMLRSCSNSSNFTVVAYLHGTLHLDIVTSSTVIGYLVGTVMISAALMNFISDACMIKRTTAIFVFGPCVILGYMLLALQAHFPALHPETCAIDEEPNSCEAARGWKLTLLYLGLFMFAVGEGCMRACVPSLGGDQFSDSDPKKPQLRSTFLTRLKLANSIGAMIGLAFLVWIENNLGWDIGFMTCALAVLVGLLVAASGCPFYRMQKPSGCGSPLTRTLQVLITSSNQKSAANVDDIELQDTNTQGHVFKSGTNQADETRVLIQMLPIFISCFLVYLPFVLLMTLTIQVGRAMDRGAGAIQIPSAASLIAIPTAFHTLMQPCYDRILTPLLRTATGHQHGATPLQRIGAGSACGIAAACVAALVEARRLNVAEQRGLTTSTGTGVPALSVFWLVIQFFLLSVMDTASFGGLAEFIRSEAPSAMKSIAPAVQSCVAGLAAWSCCAFIHLVNRMTRSGGGGDGGWLDGTDFNRARLDRFFLSLGAFELLALVNYTFWARRYARKLRRVNFDLNVSADLE

SEQ ID NO: 3500 - protein, 371 aa, Zea mays
  VARIANT 219..371: note = Derived polymorphism lacks residues 219 to 371
  VARIANT 236..371: note = Derived polymorphism lacks residues 236 to 371
  VARIANT 264: note = Ancestral polymorphism is S, Derived polymorphism is F
MKAPSLLVRCFPGLLPSKDTSCVPIVSEKDLQLPSLAVEIIPSKGKVSVADMISFSPSEVASSKYDGALKSWENSITLVNIIRNEIRDGQLSFRGKRVLELGCGSGVSGIFSCLKGASTVHFQDMNAETIRCRTIPNVLANLEQARDRQNRPSEESPVTPSRQLLDPNVHFYAGEWDELPTVLSAVPPPAAPADLSFSEDDFMDGGSSSHDGSSVVVGQDYCPRRSRKLSGSRRAWERANNETDQADGGYDVILVSDVPYAANSLKKLHALISKCLRPPYGVMYYVASKKSSVGSNGGARQLRALMEEGGVLGGHLLTEVCDREIWKFFFKFNYVGSMARDFWRKNWTLFYYRGTIFQTSSDPSPKKTVVL

SEQ ID NO: 3501 - protein, 186 aa, Zea mays
  VARIANT 137: note = Ancestral polymorphism is S, Derived polymorphism is Y
MCPARSLSTALRCAHPSLNPPARVGLVLSFPSTTTARGTTRTATSVARPSPSPPPRPPARRSSAACRRRSRGMPAPDSRPYHQEKKDKIGERVAALQQLVSPFGKVRHGFCPAGGVGVHQVPAPAAAGPELPLHARSSGRWRCAQDPQRYSLRSRGLCLVPVDLTLQLTQSNGADLWAPAHTARRR

SEQ ID NO: 3502 - protein, 255 aa, Zea mays
  VARIANT 214: note = Ancestral polymorphism is K, Derived polymorphism is E
  VARIANT 206..255: note = Derived polymorphism lacks residues 206 to 255
  VARIANT 196..255: note = Derived polymorphism lacks residues 196 to 255
  VARIANT 191..255: note = Derived polymorphism lacks residues 191 to 255
  VARIANT 183: note = Ancestral polymorphism is S, Derived polymorphism is P
MGANGHPPLASTRAHNGSHSGGSGGGGGGGGGANPSNGGTAAALRHDPGLAREWLTEEHAILDELLVNLQNDCRIKCTCLHLDLASMHPTYLSFVMQNCNEVARENSSGCSFALQMDDCKKKESAKRKKEDHYSSKKSKDKKEKVSDSSSKPPVLMADRPTVPPYPLPVLPVDDDEISSKGKSVLYLLHDWYNSIQNNISLLCQTRDNILRILKDRLFYVEFNLLALFRIISFISLEYTGVLLTATYYHEEVHLG

SEQ ID NO: 3503 - protein, 261 aa, Zea mays
  VARIANT 45: note = Ancestral polymorphism is E, Derived polymorphism is D
MFLHSLLMQKMAKNTQQPRKDGGARSSGGGLSSSKKSRWYQRAVEVLLLVWKQQPAAPPTTKAAAASGVTAAASGNKGAAPPGGRLRKSSSLNVAASFTRVCLCAPISSYNSESLYCFPADGAAPRRSYSYPRASSASASGCGAGTGVSPLVAPASAPPPLPPLPAGSRGGEGARRVFRGKSLTDDVLMRRFVVDEEATRRRNEMEVVRRRHAAASKRRRLGPSPLRRMALAESEAEAEEEEAAPGTGRGTDNRVAAAAVA

SEQ ID NO: 3504 - protein, 191 aa, Zea mays
  VARIANT 21: note = Ancestral polymorphism is R, Derived polymorphism is G
MGGLSVIAPPARDTASPQHRRARRAFLVSNYLILGCASGCGFLTLSLRLVPSVDGFLLILLHALTVAAAVAGCAVIAAPDPPRGRCYTAHMSATAVVSILQGAAAVLAFSRTSEFLAGGLRSYVREEDGAVILRMVGGLGVAIFCLEWVALALAFVLRYYAYVDRECGGNPQRRSAKVGGEDGAGTWPFQV

SEQ ID NO: 3505 - protein, 256 aa, Zea mays
  VARIANT 222..256: note = Derived polymorphism lacks residues 222 to 256
  VARIANT 183: note = Ancestral polymorphism is S, Derived polymorphism is C
  VARIANT 140..256: note = Derived polymorphism lacks residues 140 to 256
MSTIPPYHQPSSHNSRQAETRTTRPAAERKGSPVPRPRLLPFRFQSGLAGPGGEGEMGKNQAYKAMQRARLGSSSGAPGAADAPEDGMTDGSFHSPEWHAARLASLNKTHTLTWEEFKKKQKEEELKRGELEADKDKMMREYRAQLDAERAQKLANGRNHSRSNSKSSSSKKERKDKDAKKRSKKRRKHKSSSESSSSSSSESSSSDDEDRGSRKSRSRSRSKRTRKEKKSRSRSKRRGSESEEEGPVRLSKFFGK

SEQ ID NO: 3506 - protein, 450 aa, Zea mays
  VARIANT 273..450: note = Derived polymorphism lacks residues 273 to 450
  VARIANT 190: note = Ancestral polymorphism is R, Derived polymorphism is G
  VARIANT 186: note = Ancestral polymorphism is P, Derived polymorphism is S
  VARIANT 157: note = Ancestral polymorphism is S, Derived polymorphism is F
  VARIANT 61..450: note = Derived polymorphism lacks residues 61 to 450
  VARIANT 57: note = Ancestral polymorphism is G, Derived polymorphism is R
  VARIANT 41..450: note = Derived polymorphism lacks residues 41 to 450
  VARIANT 29: note = Ancestral polymorphism is G, Derived polymorphism is R
  VARIANT 18..450: note = Derived polymorphism lacks residues 18 to 450
MEKKDMKTRGKTLMERYEMEKLLGKGTFGKVHYARDLESSQGVAIKIMDKDRVLKVRLSEQVKREITTMRLVEHKNIVCLHEVMATWNKIYIIMEYAKGGELWDKVKRSGRLTEADAHRYFQQLISALDHCHSRGVYHRDLKPENLLLDENGDLKVSDFGLSAFSESRRTDGLLHTVCGTSMYIAPEVIRKTGYDGAKSDIWSCGVVLFILAAGYLPFQGPNLMEIYRKIHDSDFKCPNWFSHKLKRLLYKILNPNPSMRPSIQEIKESTWFRKGPREISAVNKKVLSENATTTNAARVLPSRRKEIAHEDMKSLVATNLNAFEIIALSAGLDLSGLFIKECRKETRFTSDKPVLAIIAKLEDAAKALNLRIRKTDNNTVSIQGRKEGRNGVLQFDTQIFEITPSCHLVQMKQTSGDLLEYEKLLEEGIRPRLKDVVWAWHGDDLQQKQE

SEQ ID NO: 3507 - protein, 162 aa, Zea mays
  VARIANT 12: note = Ancestral polymorphism is I, Derived polymorphism is T
  VARIANT 13: note = Ancestral polymorphism is P, Derived polymorphism is R
  VARIANT 40: note = Ancestral polymorphism is A, Derived polymorphism is V
  VARIANT 46: note = Ancestral polymorphism is P, Derived polymorphism is A
MSLTAAFRATKIPRALPPKCGEPAASSSASASGDPPPGAAKSTKAPPPWCVYLIASSRIRRTYVGVTTDFPRRLRQHNGELKGGAKASSAGRPWNLACLVEGFANRSEACEFESKWKIVSRKIARKRTELSMKSVLQHREAALSRVETFMDCSHLKIKWQSS

SEQ ID NO: 3508 - protein, 234 aa, Zea mays
  VARIANT 174: note = Ancestral polymorphism is P, Derived polymorphism is S
  VARIANT 78..234: note = Ancestral polymorphism lacks residues 78 to 234
  VARIANT 50: note = Ancestral polymorphism is P, Derived polymorphism is T
  VARIANT 38: note = Ancestral polymorphism is E, Derived polymorphism is D
MGGSPVWDGTLSPDSFNTSAAALVKRWKEIEVDDSLPEWTWKPCSKLGVPSEVEGYLALERVYRSCGTSQSVLPGADRRDEVRWCRGCSLGKCFCELLIDKLAKSRAPATMFMFMISMLSTASPTKSQCYTFAVITLVCGQLLTLDEVKEGLPSHSQKVLSESKWTFITQEEHPHLSKPWLALHPCATSGWMKLLLEETEATDKEHSVQYLPAWLSVVGQAVGLKIPLELHSNS

SEQ ID NO: 3509 - protein, 316 aa, Zea mays
  VARIANT 164: note = Ancestral polymorphism is T, Derived polymorphism is A
MAEVQDGHYDSMSQATDSLRVEPIYESFLCPLTKQVMRDPVSIDSGVTFERNAILNYFNECLSSGRRLVCPVTKMELSNTELNPSIALRNTIDEWMNRNEAAKLDVARKSLTSDSTESDILQALQYVDEICQRSRSNRQVVRRDGLIIMIADLLKNSSTKVRQAALGTLCSIAKDDNENKVEIAAGDNIRTIVKFLNHGQTQEKEQAVSLLFELSENKALSERIGSVSGAILILVGLSSSKVENLLIVDRAEKTLENLESCEKNVRQMAENGRLQPLLRLLLDGIILSHVHVSFSQPSDFVLFYSCNIVSATRYSH

SEQ ID NO: 3510 - protein, 393 aa, Zea mays
  VARIANT 48: note = Ancestral polymorphism is A, Derived polymorphism is S
MAVLSAAGAPPASAIGFEGYEKRLEITFSEAPVFVDPHGSGLRALSRSQIDSVLDLARCTIVSELSNKDFDSYVLSESSLFIYPLKIVIKTCGTTKLLLTIPRILELAEELSMPLAAVKYSRGTFIFPGAQPAPHRSFSEEVAVLNRYFGGLKSGGNAYVIGDAARPGQKWHIYYATEYPEQPMVNLEMCMTGLDTKKASVFFKTNADGNTTCAKEMTKLSGISEIIPEMEICDFDFEPCGYSMNAIHGSAFSTIHVTPEDGFSYASYEVMGLDATALSYGDLVKRVLGCFGPSEFSVAVTIFGGRGQAGTWGKELGAEAYDCNNMVEQELPGGGILIYQSFCAAEDAVASSPKSVLRCFDGENAAPFAKDCKLANLVCLEEVGCYRGEGWSA

SEQ ID NO: 3511 - protein, 184 aa, Zea mays
  VARIANT 93: note = Ancestral polymorphism is G, Derived polymorphism is D
MSLQETVAGHTASSNLFAASMTLNPPSERFAGSVLSKLGESWPNAEDVVGVEFDGGCSGAGGGGGGGGGFGAGGTGVTGGGDGLGAGATDGDGFGAGAVLGGGEDGFGAGEAAGDALGAGVATAGDLVGAGLGDGDGFPAGAAGGGDDGFAAGGAGGRDSLGAGAAGDGNDGLADGAVGGRDAL

SEQ ID NO: 3512 - protein, 484 aa, Zea mays
  VARIANT 131: note = Ancestral polymorphism is P, Derived polymorphism is S
MGRGRGGAFSCSMLDLLVLSALLPFAASQSPSSLLSPAQSASRPPTAPSARPSFPSPAAPAPRLSRPPAPPAAKPSSPPPAAPAGKPSPSPRPAPTRSPAVATPAPRASPAASPAPKPSSPPPKTAPAPKPSPSVAPAPRPSPPPVTPVPPAPKPPPPPPPPPAPLQPPSNSTPTTSSALGQLSPSFYAQSCPDVELAVRDVVRSASTLDPSIPGKLLRLVFHDCFVEGCDASVLIQGNGTERTDPANLSLGGFNVIDAAKRLLEAVCPATVSCSDIVVLAARDAVVFTGGPAVPVALGRRDGLVSLASNVRRNIIDTGFSVDAMAASFTAKGLTLDDLVTLSGGHTIGSAHCNTFRERFQQVANGSMTPVDGSMNADYANELIQACSANGTVPAGTAAVGCDSGSASVFDNTYFANLLGGRGLLRTDAALVQNATTRAKVAEFAQSQDGFFASWASSYARLTSLGVKVGADGEVRRTCSSVNG

SEQ ID NO: 3513 - protein, 785 aa, Zea mays
  VARIANT 635: note = Ancestral polymorphism is R, Derived polymorphism is C
MQSDQPVISLRPGGGGGPRAGRLFSPAFATSVSGDFLRLHVGGASGISKIGDSHFEPRERVRYTRDQLLELRELVDVSEDILRLKQEIDIELHGEDQTWIHNDSAVQGQVQGQTQAQNRYAETDNRDWRARSAQPPSANEEKSWDNIREAKEAYTSSGRQQEQANRQDQLSSQFASKAQFGSTPALIKAEVPWSARRGNLSEKERVLKTVKGILNKLTPEKFDLLKGQLMEAGITTADILKDVINLIFEKAVFEPTFCPMYAQLCSDLNEKLPTFPPEEPGGKEITFKRVLLNNCQEAFEGASSLRADIAKLTGPDQEMERRDKERLVKLRTLGNIRLIGELLKQRMVPEKIVHHIVMELLGSGPDKKTCPEEEDVEAICHFFNTIGKQLDENPKSRRINDTYFIQMKELTMNPQLAPRLRFMVRDVIDLRSNNWVPRREEIKAKKISEIHSEAEKNLGLRPGAASGIRNGRSSPGGALLPGGAFPMNRPGTGGMMPGMPGSRKMPGMPGLDNDNWEVARSKSMPRGDSIRNQGPLLNKPSTVHKTSSINTRLLPQGSGAGLIGKSALLGTGAPPSRPLSFGPEPTPQITPSPKPLSAAPALAPAPDKPASAPKGNSAELKKKTIALLEEYFSIRILDEAQQCIEELQNRGYYPEIVKEAVNLALDKGTNFVDPLVRLLEHLYTKKIFKTQDLESGCLLYGALLDDIGIDLPKAPTQFGEIIARLTLLGALRFEVMEEILKKMEDTMYRKAVFDAVKKTLEANPSGQTILGSHAAVIDACNSLLE

SEQ ID NO: 3514 - protein, 100 aa, Zea mays
  VARIANT 46..100: note = Derived polymorphism lacks residues 46 to 100
  VARIANT 44: note = Ancestral polymorphism is D, Derived polymorphism is Y
  VARIANT 29: note = Ancestral polymorphism is S, Derived polymorphism is C
  VARIANT 25: note = Ancestral polymorphism is L, Derived polymorphism is R
  VARIANT 20: note = Ancestral polymorphism is R, Derived polymorphism is W
  VARIANT 14: note = Ancestral polymorphism is C, Derived polymorphism is F
MENVVAAMEAVAACVPRKWRNVRALHVKSLESTALSLYSAPGTDGEDNYGDDDLEAAKSEGTPTKEEQGRMKRRKKGTMGCNYVLEHHFPVVTYLCSCRK

SEQ ID NO: 3515 - protein, 193 aa, Zea mays
  VARIANT 105..193: note = Derived polymorphism lacks residues 105 to 193
  VARIANT 84..193: note = Derived polymorphism lacks residues 84 to 193
  VARIANT 57: note = Ancestral polymorphism is S, Derived polymorphism is L
  VARIANT 55: note = Ancestral polymorphism is W, Derived polymorphism is R
MGPACDLLGPRRASGFASLLAALAVAATTSSPAGFVALCFVAGLSLANFVANQHWMSGIFVPSAVGLANAVTASWANVGSTAAQLVMPLVYELVLRLDVPITVAWRVTYLLPCVLLITTGLAVITFPYDLPCGAGVGGGAKTGKSLWKVVRGGVDNYRAMGAAKAPSLAATMAVMVLCAAFVLASSGFTFGIQ

SEQ ID NO: 3516 - protein, 182 aa, Zea mays
  VARIANT 71: note = Ancestral polymorphism is T, Derived polymorphism is K
  VARIANT 99..182: note = Derived polymorphism lacks residues 99 to 182
  VARIANT 131: note = Ancestral polymorphism is D, Derived polymorphism is E
  VARIANT 158: note = Ancestral polymorphism is G, Derived polymorphism is R
MIFYFLLCFFTHLTLWSSFSVSSSGEFREAEMAPKAAPAKKGDAKTQALKVAKAVKSGSVKKTKKIRTSVTFHRPKTLKKARDPKYPRISTTGRNKLDQYQILKYPLTTESAMKKIEDNNTLVFIVDLKADKKKIKAAVKKMYDIQAKKVNTLIRPDGKKKAYVKLMPDYDALDVANKIGII

SEQ ID NO: 3517 - protein, 74 aa, Zea mays
  VARIANT 36: note = Ancestral polymorphism is D, Derived polymorphism is Y
  VARIANT 38: note = Ancestral polymorphism is S, Derived polymorphism is I
  VARIANT 43: note = Ancestral polymorphism is R, Derived polymorphism is W
  VARIANT 44: note = Ancestral polymorphism is P, Derived polymorphism is L
MGELVLRSMHQHLLQEPKVAGVQCRLGWGWWGRPGDGSHTRFRPPPASLRRQGARGGPAGPRIGDGTCSTTTHT

SEQ ID NO: 3518 - protein, 385 aa, Zea mays
  VARIANT 269: note = Ancestral polymorphism is W, Derived polymorphism is C
MSGASARGRLSPASGGAGDSEPRSAGGRTRSVSATRGRKPSPRPGRDAAAAAGATEERKPAAVPTLLPSLSAPAGMRRQELLLRSGLSLDASCSSDASTDSFCSRASTGRIGRPAFGARKKKTLSQTDYKPVSMLEREGGLAYQTDAAGVKRRCAWVTANTDPCYSAFHDEEWGVPVHDDRKLFELLVLSGALAELTWPAILNKRDIFREVFMDFDPVSVSKLSEKKIIAPGSPSSSLLSEQKLRGVIENARQILKIIEEFGSFDKYCWSFVNHKPILSRFRYSRQVPVKTSKADAISKDLVRRGFRSVGPTVVYTFMQVSGMTNDHLISCYRFAECVASSAGAAKLTDGSLADASDSNHATAEQKVNGTNDIELSRAIDELSIS

SEQ ID NO: 3519 - protein, 648 aa, Zea mays
  VARIANT 595..648: note = Derived polymorphism lacks residues 595 to 648
MASSLLSSPAKPTITTTTKTTPAPRPARSAHVHVLSAARCLRLRLRASSQHPPPPPTPRSRRPDYVPNRIDDPNYVRIFDTTLRDGEQSPGATMTSAQKLVVARQLARLGVDIIEAGFPASSPDDLDAVRSIAIEVGNPAPGPAGEEDAVHVPVICGLSRCNRKDIDAAWEAVRHARRPRIHTFIATSDIHMQHKLRKTPDQVVAIAREMVAYARSLGCTDVEFSPEDAGRSNREFLYHILGEVIKAGATTLNIPDTVGYNLPYEFGKLIADIKANTPGIEKAIISTHCQNDLGLATANTLAGARAGARQLEVTINGIGERAGNASLEEVVMAIKCRRELLDGLYTGIDSRHITLTSKMVQEHSGLHVQPHKAIVGANAFAHESGIHQDGMLKYKGTYEIISPDDIGLTRANEFGIVLGKLSGRHAVRSKLVELGYEIGDKEFEDFFKRYKEVAEKKKRVTDEDLEALLSDEIFQPKVIWSLADVQATCGTLALSTATVKLVAPDGEEKIACSVGTGPVDAAYKAVDKIIQVCWHHTFNLSCTEILIELNNLQIPTVLREYSMTSVTEGIDAIATTRVVVTGDVSNNAKHALTGQSFNRSFSGSGASMDIVVSSVRAYLSALNKICSFAGAVKASSDVAETASVPSTE

SEQ ID NO: 3520 - protein, 446 aa, Zea mays
  VARIANT 357..446: note = Derived polymorphism lacks residues 357 to 446
  VARIANT 292..446: note = Derived polymorphism lacks residues 292 to 446
  VARIANT 273..446: note = Derived polymorphism lacks residues 273 to 446
  VARIANT 251: note = Ancestral polymorphism is G, Derived polymorphism is C
  VARIANT 65: note = Ancestral polymorphism is A, Derived polymorphism is G
MAAGGRVRFNVGGQVFETTTTTLANAGRDSMLGALLDSSWNVSSSGGGGGGVAEYFIDRNPACFAVLLDLLRTGSLHVPPHLPEKLLYREALYYGLLDHVRAARWGAFDGDRLRLAASVPGRAPGDGTAIRAAPDGGCCVAHGGAVRVYNWMLDERRPVSLDHSQVNDAAYLDAATLLVAARERLGKRDGGMAAFSAASGELRHRFRVAHDRQAKSFTAGALAFDQDASVFASCKGRLNEYGVGVWDRATGEQADFFYEPPGCALGDADRLQWLDAAGALMVATLFPKADNCFIGLLDFRAKDVVWSWSDAGAAASLDDKRVLHAIAMEDERSVCVINQYDDLGFLDLRSGAGGVRWSSRSKLMNRKVPGEESCYPKLATHGGQLFSSMNDSISVFSGPEYVLTSTLRRSHGGAICDFSIGGDRLFALHNEENVFDVWETPPPPII

SEQ ID NO: 3521 - protein, 883 aa, Zea mays
  VARIANT 376..883: note = Derived polymorphism lacks residues 376 to 883
MFPLHDSNGGESRKIGRRESAPTMAEDAPPAAPAMTPEEVQAETELRMRDIGQRFGAIPEDHDELLRLLEEAETWLSRVDQSPPEGMYNALRPTMAVLITNELLEHPDPNVKVALTSCLTEVTRITAPEAPYDDDVMKDVFKRIVETFAELDDMNNPSFARRVSILDSVARVRCCVLMLDLDLDHMILDMFRHFFKTASTRHSEQVTHCMEIIMMFVIQESDDVHAELASCLLQNLTREAQETLPASFGLAERVLGLCRDKLKPVLHELLKGTPLDEYSNVVTTLFQDAGENNVDASGEDMAAKGKLSEKPVSDESPQETSKVDQNVNCLGQEGSSPNSTPTTAISNGAAPVDNVKSPDGPDSSKQKQELTSGDEQTPDSSKQKQELTSGDEQTPDSSKQKPELTSLDKQTKSSEQLISCDQEVREPVTVETEKLSDVNSKKDHKLCSSIGSEMAEQSKVVKDNESIVASEELSPGTNDVDKKQITETGNITTEESSKPSDTKPAVVKPKRGRPPAAKSQEKKPAGKKHASDLKSAKLDPITDSGGRATRHLNKDAAKSSSTKAAEGESEKKQHKTSMKLQKEDAVSDKDTNEDISLKEMMSPTKIDKSKGQQEDNGASSKRKSLQEAQETPLSKKNKILDENLIGSRIKVWWPDDKMFYAGVVESFDASSKKHKVSYDDGDVEVLMLKKERWEFISEEQDTDPDAVSNMPRGRKAKGSSGPQMKGGKTGTPQSDVKNPPKKRGRPKGMHDSNNMPNADSSVTPARLKGKSVEKDTQVTPKTGNNSKKEGARHSRSTTGKAQNAVVKASSKDEPDSTDNSKDDAGSEDKNSKDEVKSSEGNDGSKTNGLSTKRKLEENEGESSEEKGSAKTTTRKKRRRKSRN

SEQ ID NO: 3522 - protein, 715 aa, Zea mays
  VARIANT 95: note = Ancestral polymorphism is V, Derived polymorphism is A
MDPAPATPRWNLERPYLTGRFHQEAKAAAAAQGLGSKPFSLDSFSRGAGAGSVIGSYAVSVQELLVIDDLLSALVGIEGRYVSIKRVRGKEGYVVFQIDSSMDLALQELTRRIFPLCEDYVLVSQFVESRSHFKNGLVNHALAAALRAFLLDYQAMVAQLEHQFRLGRLSVQGLWFFCQRMMSSLNALAVLVEKATSNNTNGSATLNLLQSQAKAMGGDSAVRSLLEKMTEYASAAYLRMLERWVYEGVIDDPYGEFFIAENKSLQKESLTQDYDAKYWQQRYSLKEGIPSFLTNVAATILTTGKYLNVMRECGHNVQVSLSDNSKLMSFGSNHQYLECIKSAYDFASGELLTLMKDKYDLIGKLRSLKRYLLLDQLLILSVLSSLQGDFLVHFMDIAREELTKKPEEISAEKLQSLLDIALRSTAAASDPSHEELICCVERSSLLKKLATLKDLDPADKLAAADVDRSMQLSITGLETFCLSNKVQWPLSLVISRKALTKYQLIFRLLFHCKHVSRQLCAAWQIQQAFRSVKILGTPILRSSILCRSMLKFVNSLLHYLTFEVLEPNWHLMHDRLQTARSIDEVIQIHDFFLQKCLKECLLLSPELLVKVEKLKGLCLQYATSIQILMPSIDVANSENTSKSRKSRSRIDKSQDRDQQLKLASENVVMSESILKFEAAFNSELQSLAPTLSNSSQAEPYVTHLAQCILGVRIGQ

SEQ ID NO: 3523 - protein, 1013 aa, Zea mays
  VARIANT 360: note = Ancestral polymorphism is R, Derived polymorphism is I
MSSHRSAAHVLSGVRPKAGLAHRLQLPSRSCLTGIGCRTRVRGVPHAYEVLGDGPGWAAWLVNRVVASFDEVGVRAELAAWPRGPRFTFVESRGPDIIDPALLRPERLDQLIYIPLPTEQSRLQIFKACLRKSPVAKDVDLNALAKYTQGFNGADITEICQRACKYAIRENIEKLTSSKRIMAMRILKLVNTLMRKWILTRNMRVIPFACNAIDLSQTLSGKKRDTIIMFPPSDQQSLELHMLTMIQDLAASLLMEFEKWVLRAESTGTILKTPLDSQSSLGSEEVIKAKKRRLGRAQKIIGDYCLLPGSPVDANAHYTTAIELARLTGDVFWHAGALEGSVCALVFCYILHKLILFLLRVSPVSFELEAALKLARYLCRQELAKEVSDLLMGAADGAKALIDASDRLILYIEIARLFGTLGYKRKAAFFSRQVAQLYLQQDNAYAAMSAMQVLTMTTNAYHVQSRKAVKMNHDLSKEPRAVNTDSVKVHPQSIVSLFESQWSTLQMVVLRDILMSSIRATDPLSSWSAAARLLRSFYPLITPAGQSGLASSLANSAGKLPTGTRCADPCLPGFYQVLQDLSFTLLSAKQELLGLPSKRCCGSSKFKCVNFPSISVVPPLPLLVANVVGGDGSILLYEGEIRDVLITLTNARTVPVEEAHVALSGKNQDSVISIAHSTWKSALPIKPGGEVTFAVTLRAWHLSSADLETDGSRSPANPRRIAREGINPFLDIHYAGPAANLENGDISLPPGRRLVVPLNICVVQGMRLVRARLLSMEIPAQFTETHIKPVSGKDVNLLKVDPYKGSWGFRLLELELFNPTDVVFYVDVAVHLDDVDVGEEVISEGDAACHKTRIDRDYSARVLVPLENFKLPVFDASFFVKESSSDEPLGSRAATIAERNAKAELNVSIDNLISKIKVKWHSGRNSSGELNIKDAILAAIQASIIDILLPDPLTFSFKLAKNGTVNNVDSSKDSDDVLRCKDPISAHEMIHMEVQVCNNTKEIIRMNLNISCK

SEQ ID NO: 3524 - protein, 409 aa, Zea mays
  VARIANT 115..409: note = Derived polymorphism lacks residues 115 to 409
MSGRGGGPGPGRVKAGSRPPWVGLAAAVWVQVAAGSAYVFPLYSHAIKEALGYNQQALTMLGVGNDVGENVGLVPGVLANRLPPWLILVIGSACAFFGFGTLWLVVTKTVAMPYWVAVTYLLFSIMILLLLAPLVIPIKMTLYPNKQTKENSSTLAPSYSSDSLSGADPENSQPLLGSASTTLATGTNESDDSTDLDVLLAEGVTVLNNLAQIGMSVGANDTTILLCLFGFCNFAGRIFGGSVSEYFVSKLYDDSNGNFLGLVEMLAEFDPIIQEHVRRITNEETQVSDTDNDQAKGLANNELGQYEFIVAVVIWYEVLYAVNLVSKQMQAKDMLIDVAIEKVQGLLSFFEGYWETGFLEALESAKKIALEMDIDTTFPKKDKLKERDITMKTQKTQILPQCLERTYFE

SEQ ID NO: 3525 - protein, 503 aa, Zea mays
  VARIANT 187: note = Ancestral polymorphism is N, Derived polymorphism is Y
MAPLSRAARLLRCAVGRLRLPPPARAFSSAAAATETGAGNGREAVIAAAAVAMAGSGLGLWLKPPSLADSGEAPGGQISVTCAASTEAQEEKGRFLFADSFRRRVFFNYEKRIRLLSPPEKIFEYFASVRNPEGEVYMLPGDLMRAVVPVFPPSESTIVREGRLRGERSPGELHCAPSEFFMLLDTNSDGLISFAEITDVLYISINHYVTPQLIYLAQKTPLLFMSMFNHLTCLLMVNEGYEQILATSTVNLLFSSWTGHFFRVIDREEFKKVMSLMRSFNRQGSTHKDGLRIGLKVGQPVENGGVVEYFFGSDGNEPLHCVRFSNFLKELHDEIIRLEFSHYDVKSSKTIPAKDFALSMVASADMNHINKLLDRADGLVKEPDLKDIRITFEEFKAFADLRQRLEPLSMAIFAHGKVNGLLTKEDLKRATQHVCGVNLTDRVVDIIFHVFDTNQDGNLSSEEFLRALERRETAIRQPTIPGPWGFLSCWFSGRKCSLKQVVL

SEQ ID NO: 3526 - protein, 383 aa, Zea mays
  VARIANT 115: note = Ancestral polymorphism is G, Derived polymorphism is R
MVAATIAGMFLVCFESLCTCFGTKRKDESEDHVLAEHSNSLSSYQMRSVSDRISASSLRAPASPSRFSLSSPPSRNEPLNISLEHVVKLTHNFAPTLMIGEGYFGKVYRATLRDGRVVAIKRAKKENFVSLRTEFSNEVALLKSIEHKNLVRLLGYIDKPNERILITEYVPNGNLREHLDGQHGLVLGFNQRLEIAIDVAHGLTYLHLYAEKPIIHRDVKSSNILLTEGFMAKVADFGFARTGPTEPGQSQIETDVRGTAGYLDPEYLRSNHLTIKSDVFSYGVLLLEILSGRRPIEARRGPTERITVRWAFYKYNRGNVRDILDPMLTEAVNENILNRIFDLAFQCVAPTREDRPSMKEVVERLWKIRRDHTKIQRIAELTL

SEQ ID NO: 3527 - protein, 350 aa, Zea mays
  VARIANT 171: note = Ancestral polymorphism is C, Derived polymorphism is R
  VARIANT 64: note = Ancestral polymorphism is A, Derived polymorphism is S
  VARIANT 60: note = Ancestral polymorphism is R, Derived polymorphism is H
  VARIANT 42: note = Ancestral polymorphism is W, Derived polymorphism is G
  VARIANT 18: note = Ancestral polymorphism is R, Derived polymorphism is G
  VARIANT 15: note = Ancestral polymorphism is L, Derived polymorphism is Q
MVYLQSRLLDNAVVLKHRYEKLIAKVVQNLSRELDAFSKRKWDLIFVNQFLRDVREAKKRGRKAKRHKEAQAVLAAVAIASSSRNSTVRKDAKEDAPKSSPKLVAGSSRVGQRTSLPQANDSSKSSNSKISSDKKSGSFLMPISSKENGLYCDVCMRTETLLNRIFVCYRCKAAVHINCYRNLENSIGPWNCELCEDQDISSEAATVSDKSHCNGKKLPFAQCGMCHGTSGAFRKTVDGKSYNFSNISQWLLDTKYVRGQDKPVEGTEALVEGKDTCCVCLHNVGVCLRCSSGDCNITFHPTCARSCGFYMNTKGFGTTPQHKAYCGKHSVQQKEADAQQYGPEEHTSMK

SEQ ID NO: 3528 - protein, 214 aa, Zea mays
  VARIANT 174: note = Ancestral polymorphism is S, Derived polymorphism is L
  VARIANT 151: note = Ancestral polymorphism is A, Derived polymorphism is T
  VARIANT 142: note = Ancestral polymorphism is T, Derived polymorphism is I
MVERSRGRTTQRSPPSCPRTTSMSEQGVASKAWRGDGLSQPRGEVFFPCFLCETGEDQLADEAATGSRAELQQDLAMANRGIVTHRGFLNATLLAPSWSKVNRKSLVFVKPGLLWLSMLLGPLIKVEDMDAYAPKDLLVVTTGSQGEPRAALNLASYGRSHALKLSKEDVLLYSAKAPARAVFLPCNPAPTRAVFPASRPQPRRLPQDKVSDFN

SEQ ID NO: 3529 - protein, 73 aa, Zea mays
  VARIANT 32: note = Ancestral polymorphism is V, Derived polymorphism is A
MDSHLRYFKQGYELLHQMEPYNNQVRSLTLDVRVWEPSVINLFQSLGNMFVNSIWEQTLPYDNSSNFMSIALQ

SEQ ID NO: 3530 - protein, 161 aa, Zea mays
  VARIANT 143..161: note = Derived polymorphism lacks residues 143 to 161
  VARIANT 102: note = Ancestral polymorphism is E, Derived polymorphism is K
  VARIANT 99: note = Ancestral polymorphism is A, Derived polymorphism is S
  VARIANT 95: note = Ancestral polymorphism is L, Derived polymorphism is W
  VARIANT 92: note = Ancestral polymorphism is G, Derived polymorphism is D
  VARIANT 89: note = Ancestral polymorphism is I, Derived polymorphism is T
  VARIANT 84: note = Ancestral polymorphism is L, Derived polymorphism is Q
  VARIANT 68: note = Ancestral polymorphism is Q, Derived polymorphism is E
  VARIANT 62: note = Ancestral polymorphism is A, Derived polymorphism is T
  VARIANT 46..161: note = Derived polymorphism lacks residues 46 to 161
  VARIANT 10: note = Ancestral polymorphism is A, Derived polymorphism is V
  VARIANT 4: note = Ancestral polymorphism is D, Derived polymorphism is N
MLADPFPLSAYTMVTMGLLKLKEEDNAEERDFAVCDVQIGGTSSVQMALEHSVGYSGRVEAARATLDQVKVEDIDTNVVVLKELLFPLIEIDKRLLALAGWEEPFKSYVFLLCFLYMAYREEHSPMKIIDFGLSDFIRPDINRFAEKHQEHSKTFMLTPDK

SEQ ID NO: 3531 - protein, 96 aa, Zea mays
  VARIANT 1: note = Ancestral polymorphism is M, Derived polymorphism is I
MMELHEALLESNQATKDANVAYVFGQSVVISARGERPDDWVPPEDVSAVYYAKCDDIDETLPMGADENDGIVDIFSAHSYYDAAGHNCDESFYYLF

SEQ ID NO: 3532 - protein, 546 aa, Zea mays
  VARIANT 320: note = Ancestral polymorphism is L, Derived polymorphism is H
MGHSPSSLSKSGPSSPPRRSRSFSPMAPPQQLRLTAPLQVAAGGSGSDSSSSFVPPARDYTQDLPDEILALVFASLSPTDRNACSLTCSRWMEVDATTRHRLSLDARAALGNAATALFSRFTAVTKLALRCARDSGLDSLSDHGAAALAAALPSERLARLKLRGLRKLSDAGLASLAAGAPAIRKLSIASCTFGPRAFVAVLQSCPLLEDLSVKRLRSVADTSGAASSIAEEIKFPPALSLRSVCVKDLYNALCFVPLVASSPNLRSLKILRCSGAWDLPLEVIAARAPGLVELHLEKLQVGDRGLAALSACANLEVLFLVKTPECTDSGIISVAEKCHKLRKLHVDGWRTNRIGDFGLMAVARGCPDLQELVLIGVNPTVLSLRMLGEHCRLLERLALCGCETVGDAEIICLAERWAALKKLCIKGCPVSDRGMEALNGGCPGLVKVKLKRCRGVSYECIENLKVTRGESFSISLDVVLEHDAGSTSENGAQENGQAQNTELAGQMTGMDLLTNAAGTQSSIHTINRMRSVMSAIRRRFGNPLPP

SEQ ID NO: 3533 - protein, 374 aa, Zea mays
  VARIANT 98..374: note = Derived polymorphism lacks residues 98 to 374
  VARIANT 103: note = Ancestral polymorphism is R, Derived polymorphism is W
  VARIANT 107..374: note = Derived polymorphism lacks residues 107 to 374
  VARIANT 119: note = Ancestral polymorphism is P, Derived polymorphism is L
  VARIANT 154: note = Ancestral polymorphism is A, Derived polymorphism is V
  VARIANT 166: note = Ancestral polymorphism is L, Derived polymorphism is Q
  VARIANT 169: note = Ancestral polymorphism is R, Derived polymorphism is W
  VARIANT 182: note = Ancestral polymorphism is R, Derived polymorphism is W
MKRQWSHPSVVLPLLAAVFLLLTFRCSLRHAQQQASSLRADDAGTSTSYAVDATLAELAAVDPAASAVLRAAEALLEANLTRAPPERRNAAVRGLRDWLGKQRFEPQVMAELVDLIKRPMDRYAAGARGGDGDGDAPRPYASCAVVGNSGVLLAREHGALIDAHDLVIRLNNAPAGDGRYARHVGTKTGLAFVNSNVLSRCAARATPGCRRCRTYGDRVPILTYMCSAAHFVEHAVCAGGGGGPDAAAPVIVTDPRLDALCARLVKYYSLRRFVRDTGRPAEEWGTRHEEAMFHYSSGMQAVVAAAGVCARVSVFGFGKAPGARHHYHTLQRGELDLHDYEAEYEFYRDLQERPGAIPFLRDSGFRLPPVVVYR

SEQ ID NO: 3534 - protein, 254 aa, Zea mays
  VARIANT 14: note = Ancestral polymorphism is I, Derived polymorphism is T
MLRGRVYDQKKAMINLFDLRAGMSSTNKLTDRARIDGSPACRSWQDVKRTVDPAKVYANDKVGASNWSSSRNNSNASPLDMASEKEMSKELESKKKSPSVVARLMGLEEDLPGQELALHPAKGKLKKRHLNGNLAETNNLHQHQEQYLSSITTCDKHIGPKETVEFKDVYEVSEEPLRTYHLHDQTFPREMSSRSKRDIRMEIVRQNFMEAKRLATNEKLLHSKEFQDALEVLSSNRDLFLSFLRNRTLLSQSS

SEQ ID NO: 3535 - protein, 1452 aa, Zea mays
  VARIANT 1266: note = Ancestral polymorphism is R, Derived polymorphism is L
MEAALEAARAKDTKERLAGVERLHEALDAAARRGLAAAEVTALVDTCMDLTRDANFRIAQGGLQALSAAAVVAGDHFKIHLNALVPAAVERLGDGKQPVRDAARQLLITLMEVSSPTIIVERAGSYAWTHKSWRVREEFVRTVASAVGLFASTEISLQRVLLSPVLQLMNDSNQSVRDAAISCIEEMYKHMGSQFHEELQRHNLPSYMLKEINSRLDKIEPKVRSSDTAMQYKAVESRSVSANPKRGSPRTKNIPRESTLYGGDTDVTEKPVEPVKVHSEKELLREFEKIAATLVPEKDWSLRIAAMQRIEALVYGGAIDNPSFLMLLKQLVPPLSTQLSDRRSSIVKQACHLLNILSKELLGDFEPFAELFIPMLFKLVVITVLVIAESADTCIKTILRNCKVARILPRIVDTAKNDRSAILRARCCEYALLVLEYWADAPEIQRSADLYQDMIKCCVADAMSEVRATARTCYRMFAKTWPERSRRLFMSFDPAIQRIINDEDGGVHKRYASPSLRDRVVQPSRASSHSSGTHVPGYGTSAIVAMDKSAAISSDSSFPSNTLRLSQSKTIDRSSERSLESVLSSSKEKVSAIESLLKGVSMSGQNFSAARSTSLDLGVDPPSSRDPPVPLAAPASNVLSLQNSALLDSSLPTIPPSSRNGGSRLLDTMTTHLPTKERSRSPYLSNMSSESMSGLSLPYSRKSLERLQEGGRMDESYDIRSTRRIPQMHLDRNYVDMPYRDSHNNHVPNFQRPLLRKQVMSRASASGRHSFDDSHVPLGDVPGYTDSLASLNDALSEGLSPSSDWVARVSAFEFIRNLLKQGQKGIQEIIQNFEKVMKLFFRHLDDPHHKVAQAAFSTLAEIIPACKKPFESYVERILPYVFSRLIDPKELVKKPCSITLEIVGRTYAIDMLLPALVRSLDEQRSPKAKLAVLEFANKSFSKYSVDSDGYSNSGFLKLWLSKLAPLVNEKNAKLKEASISGIISVYSHFDSTAVLNFILSLSVEDQNLLRRALKIKTPRIEVDLVNYLQSKKERPRPKPYDQVDFGTSSEDGYALTSKKSYPFGRFSSSSLDAEGGKMISSMQEPALHNVSIGRTVSDMSMDHAIQSLESSTGAEVHLTRGREPKNNSNLVAEAARSWTSYPEKTDASVDGETATGTPRLDFGRFITSDGHNTVGSTTEGSVQDGDMIVNLSSIKTSLQTDNGLSVPQLLHQISNGTEVSSSEKREALQQLVDASLDNNTSIWAKYFNQILTVVLEVLDDSDSSMRELALSLIAEMLNNQKDAIEDSTEIVLEKLLHVTKDAVAKISNEANQCLNVLLAKYDPFRCLDVIVPLLVSDDEKILVVCINCLTKLVGRLSQEELIDKLPTFLPALFDAFNNQSPDVRKVSAFIFPLPILYMTFLLCTDPFLYLEISWCIALVTYRCHFLTLDCCVLLGGYVHHAWESIRSILGRA

SEQ ID NO: 3536 - protein, 367 aa, Zea mays
  VARIANT 201: note = Ancestral polymorphism is R, Derived polymorphism is S
MDAALLVTVLVPAVAALLVLGAASASPPRAFFVFGDSLVDNGNNNYLMTTARADAPPYGIDFPTHLPTGRFSNGLNIPDIISEHLGSQPALPYLSPDLRGDQLLVGANFASAGVGILNDTGIQFVNIIGIGQQLHNFQDYQQRLAAFVGDDAARQVVSNALVLITLGGNDFVNNYYLVPFSFRSRQFAIQDYVPYLISEYRKILTRLYELGARRVVVTGTGMIGCAPAELAMHSIDGECARDLTEAADLFNPQLVQMLSDLNAAIGGDVFIAANTNRLSFDFMFNPQDYGFVTAKVACCGQGPYNGIGLCTPASNVCPNRDVYAYWDAFHPTERANRIIVAQFMHGSTDHISPMNISTILAMDNRGD

SEQ ID NO: 3537 - protein, 266 aa, Zea mays
  VARIANT 33: note = Ancestral polymorphism is S, Derived polymorphism is L
  VARIANT 21: note = Ancestral polymorphism is R, Derived polymorphism is C
  VARIANT 18: note = Ancestral polymorphism is P, Derived polymorphism is R
MVALTAGISVATGVVFSPAGRRRGRGHAAFRCSSSSAGERQALFSRIAPVYDHLNDVLSLGQHRTWKRICVSWSRAKMGDRVLDLCCGSGDLAFLLSQKVGLDGEVMAVDFSSQQLQTAAGRQEQRWKLCYKNIKWIEGDALDLPFTDCYFDAVTVGYGLRNVVDKSKAMQEIYRVLKPGSRASILDFNKSSSLFTASLQSWAIDNVVVPLASGYGLTEEYKYLKSSISQYLTGEELEKLAKEAGFCAAKHYELGGGLMGNLVATR

SEQ ID NO: 3538 - protein, 344 aa, Zea mays
  VARIANT 4: note = Ancestral polymorphism is G, Derived polymorphism is S
  VARIANT 65..344: note = Derived polymorphism lacks residues 65 to 344
  VARIANT 94: note = Ancestral polymorphism is A, Derived polymorphism is V
  VARIANT 151: note = Ancestral polymorphism is E, Derived polymorphism is D
  VARIANT 157: note = Ancestral polymorphism is S, Derived polymorphism is P
MDLGSCYLGGNADAVEFCPHRPFRHVLAAATYTLQEQERDRAGSISLFSVDVASEDASRRLQLLYTVETAGIFDMKWSPKSPLLAQADAHGRLALRRLEQEDGSDTGILLTDVSAEDISSSMCLYVDWNQTAESLSVGLSDGSLSLVSVREDRLEISEQWTAHQFEVWTCYFDRTRPHLLYSGSDDCCFSCWDLRESPSNIVFQNKKSHKMGVCCITQNPLEGNMLLTGSYDEFLRVWDMRFMAKPVNQKLINLGGGVWRMKYHPSIADVVLAACMHNGFAIVKVGSGDATVMETYCKHESLAYGADWQKSEEVEQNGNSSVVATCSFYDRLLRVWQPENLAEL

SEQ ID NO: 3539 - protein, 67 aa, Zea mays
  VARIANT 12: note = Ancestral polymorphism is S, Derived polymorphism is N
  VARIANT 17: note = Ancestral polymorphism is E, Derived polymorphism is Q
  VARIANT 19: note = Ancestral polymorphism is F, Derived polymorphism is C
  VARIANT 32: note = Ancestral polymorphism is F, Derived polymorphism is L
MAGGNLFGRALSYVVNEFFVQGLANNRAVQRFAVKTNKTLESLSSKAKEMREELSEQFKDARGQKDV

SEQ ID NO: 3540 - protein, 275 aa, Zea mays
  VARIANT 119..275: note = Derived polymorphism lacks residues 119 to 275
MSSSWNSVGLAILYQVLGWVAFAAWSFSFYPQVLLNYKRKSVVGLNFDFLVLNLTKHSSYLIYNAALFFSPFIQQQYHDKYGDKEMIPVAANDVAFSLHAVALTAFTVFQVFIYERGTQKVSKVCISISAIVWIAALVCLIIAWPKSDWLWLIDVFNSIQVGMTAIKYIPQAIMNFRRKSTIGWSVGNILLDLTGGVLNFCQMGVQSIDQHTLVNFYGNIGKTLLSLETVFFDVLFIIQHYVLYPVKKDENGKAIISERVAPLIRPSDKPEEDNV

SEQ ID NO: 3541 - protein, 278 aa, Zea mays
  VARIANT 22: note = Ancestral polymorphism is G, Derived polymorphism is V
MEEGPLGWGRRQEEVVDGWRKGPWTSQEDKLLVEHVRQHGEGRWNSVSKLAGLKRSGKSCRLRWVNYLRPDLKRCKITPQEESVIVQLHALWGNRWSTIARSLPGRTDNEIKNYWRTHFKKGKPSKNVERARARFLKQRREMMQQQQQQSSLGRQHLHLDEGGDQRRGACCTTGATAASGDNDCGSATGDACAPPPTTTVATEGAGADLVMHDAMDCFLCPMSCCDDLLVLHGAGGQAGTGSCCGSTASDEYGSSEEDGATWGSLWNLDGAGEVCTLW

SEQ ID NO: 3542 - protein, 39 aa, Zea mays
  VARIANT 39: note = Ancestral polymorphism is V, Derived polymorphism is I
  VARIANT 30..39: note = Derived polymorphism lacks residues 30 to 39
  VARIANT 7: note = Ancestral polymorphism is H, Derived polymorphism is Y
MVDMLLHDMWMYLLEGDKFNDFSNQDTFIWHEVNIPYAV

SEQ ID NO: 3543 - protein, 45 aa, Zea mays
  VARIANT 17..45: note = Derived polymorphism lacks residues 17 to 45
MWRSQRDLNPRGRSPVQICDPPFSTLRSEFSHVMLDLSSVPDQSK

SEQ ID NO: 3544 - protein, 498 aa, Zea mays
  VARIANT 430..498: note = Derived polymorphism lacks residues 430 to 498
MSTCAADLAPLLGPAAANATDYLCGQFADTASAVDATYLLFSAYLVFAMQLGFAMLCAGSVRAKNTMNIMLTNVLDAAAGALFYYLFGFAFAFGTPSNGFIGKQFFGLKHLPRTGFDYDFFLYQWAFAIAAAGITSGSIAERTQFVAYLIYSAFLTGFVYPVVSHWFWSADGWAGASRTSGPLLFGSGVIDFAGSGVVHMVGGIAGLWGALIEGPRIGRFDHAGRSVALKGHSASLVVLGTFLLWFGWYGFNPGSFTTILKSYGPAGTVHGQWSAVGRTAVTTTLAGSVAALTTLFGKRLQTGHWNVVDVCNGLLGGFAAITAGCSVVEPWAAVICGFVSAWVLIGANALAARFRFDDPLEAAQLHGGCGAWGVLFTGLFARRKYVEEIYGAGRPYGLFMGGGGKLLAAQIIQILVIAGWVSCTMGPLFYALKKLGLLRISADDEMSGMDLTRHGGFAYVYHDEDPGDKAGVGGFMLKSAQNRVEPAAAVAAATSSQV

SEQ ID NO: 3545 - protein, 313 aa, Zea mays
  VARIANT 251: note = Ancestral polymorphism is M, Derived polymorphism is T
  VARIANT 152: note = Ancestral polymorphism is G, Derived polymorphism is D
MQGGATAKQQARDGDRGAAKTPTTEGKGDAAGAKASADVAKGDAAVAKAAGDDVVVGKGDAGNKAGAGAMHHGLSAVEAKDSQTIVALQSPVTVMRPVRGDLEEHLPKPYLARALVAPDIYHPDGTAADEHGHHHMSVLQQHVAFFDRDDNGIIYPWETYSGCRALGFNMILSLLIALVVNGTMSYATLPGWLPSPLFPIYVHNIHKSKHGSDSGTYDNEGRFMPVNFENLFSKYARTSPDRLTYRELWSMTEGFRDAFDLYGWIAAKLEWTILYVLARDDEGYLSREAMRRVYDGSLFEYVERQRAQHAKMS

SEQ ID NO: 3546 - protein, 581 aa, Zea mays
  VARIANT 433..581: note = Derived polymorphism lacks residues 433 to 581
  VARIANT 421..581: note = Derived polymorphism lacks residues 421 to 581
MEGGVTVADKAEFKECLRLSWTQPYILQLVLSAGIGGLLFGYDTGVISGALLYIRDDFAAVEKSTVLRETIVSMAVAGAIVGAAFGGWMNDKFGRRPSIILADALFFGGAVIMAFSPTPRVIIVGRVFVGLGVGMASMTAPLYISEASPARIRGALVSTNGLLITGGQFLAYLINLAFTKVPGTWRWMLGIAGVPALVQFVLMLMLPESPRWLYRKGRKEEAAAILHKIYPANEVEEEIDSMRRSVEEEVLLEGSIGESGFMGKLRKAMGSKVVRRGLTAGVIVQVAQQFVGINTVMYYSPTIVQLAGYASNNTAMALSLITSGLNAIGSIVSMFFVDRAGRRRLMLISLVGIVVWLAVLGGTFLGAAHHAPPVSDLETRLLANQNQTQTQTCPEFNPNVRWSCMDCLKAASTCGFCAHQGDKASAPFLVAVYHREFYTEGCPNNFGWLALIGLGAYIVSYSPGMGTVPWIVNSEIYPLRFRGICGGIAAVANWVSNLIVTQTFLSLTKALGTSATFFLFCAVSLLALVIVFLTVPETKGLQFEEVERMLEREDYKPWKRYHGGSSSIEPAKNSDIGLTPP

SEQ ID NO: 3547 - protein, 736 aa, Zea mays
  VARIANT 262..736: note = Derived polymorphism lacks residues 262 to 736
  VARIANT 87..736: note = Derived polymorphism lacks residues 87 to 736
MTDMNSDEILEVPDTPDRLQQSKYHVSSSIVGRDGTMAAANPSPQRKFRIRFKNNSVQGSSSQNNGCSILPAALDTDHIFKQAEAAQILELSKDYKAKFSLQKPDSTRISVDSEKRAGKHGFDQSRSISNNISCSVTGGRNPTFQVKDGEVGQQDAGHQSANFLDIGPGFPTIQVGKPGYRLCTRTTDKLKGVTGADVCPGSSSGEVKGDLITNKVIAGPTSPLRVFPRRHVGQKRLVRNGCISPSNIAKTDAKVNEKQEMCSLSEHLDHPHQPDAFDGGDVIDLTENSPIMTRQRSEVNNKLMSGHNMDTRAAKKLRTDRFGRTLVRQSKCHANNSSCSEVSLSGLNNNGKGIDCDILDSDQTGEANLRGVDLSTAGTYLNKNFSDISTEQGWRTTHNHTSKLPISFMGNITSSSGWESGSSTTRSNQNHGSAGGKHSSVSGANIIVPDKIGNKTIMLGRERRKQTSTSSHIGESSSAADEPRGDLQSSKISAGPNHSSHQHNIPVINIDDVSPEARPSSSGFTNRTLDPTIEAQLESDELLARQLQEQLYNESARFAPTEEIDAIVAMSLQHEEDTHRTSRTLRRFQNHTRGARATRLSSYRNALRAELATANNMISRQRNTAPINLGLRAALARYPGALHIQPNIDLNDYDALLALDENNHQHTGASESQINNLPQSVVQSNSIEDPCSVCLENPSVGDTIRHLPCFHKFHKECIDEWLRRKKLCPVCKFGIN

SEQ ID NO: 3548 - protein, 110 aa, Zea mays
  VARIANT 9: note = Ancestral polymorphism is G, Derived polymorphism is S
  VARIANT 18..110: note = Derived polymorphism lacks residues 18 to 110
  VARIANT 34: note = Ancestral polymorphism is R, Derived polymorphism is C
  VARIANT 40: note = Ancestral polymorphism is A, Derived polymorphism is G
  VARIANT 42: note = Ancestral polymorphism is E, Derived polymorphism is K
  VARIANT 66..110: note = Derived polymorphism lacks residues 66 to 110
MNFLLTTIGSWRINKNSWKEPIAFLSTLLEADDRAVRMAAGEALALCFELNLLDVSSREDDGVNTGGTTGSKNKLFLDMQALKTKISGLATNLSTEAGVQGVEPEKIIML

SEQ ID NO: 3549 - protein, 168 aa, Zea mays
  VARIANT 4: note = Ancestral polymorphism is E, Derived polymorphism is K
MEQEHLHLTMVHSLYSSLSPLDSTNRCSCLQLNWQTEGGAGGAKFSQFGADLSTIMDKHLKTLAPVYVGTKFVKLDAEYAPFFVAKLAIKTLPCVILFKKDIVVDRLVGFQDLRSKDDFLTRALEHILILKTKGIIDEKKKDDDDDDEESEAKNRRVRSSTAQDSDSD

SEQ ID NO: 3550 - protein, 133 aa, Zea mays
  VARIANT 107: note = Ancestral polymorphism is W, Derived polymorphism is C
  VARIANT 15: note = Ancestral polymorphism is G, Derived polymorphism is A
MSLSEKLEAARVVLGKRKERERELLQAQPLPVAARAEPWNPAPARAAPSAAAAAAGDNKLLAGHLAHEFLAHGTLLGRRIEPSRGAPAPAPARAEPDPRKRYAEVSWLLVARGAHVPGVVNPTQLGRWLQIKD

SEQ ID NO: 3551 - protein, 206 aa, Zea mays
  VARIANT 81: note = Ancestral polymorphism is G, Derived polymorphism is R
  VARIANT 83: note = Ancestral polymorphism is T, Derived polymorphism is K
  VARIANT 88: note = Ancestral polymorphism is A, Derived polymorphism is T
  VARIANT 125..206: note = Derived polymorphism lacks residues 125 to 206
  VARIANT 144..206: note = Derived polymorphism lacks residues 144 to 206
  VARIANT 145: note = Ancestral polymorphism is P, Derived polymorphism is L
  VARIANT 169: note = Ancestral polymorphism is A, Derived polymorphism is V
  VARIANT 181: note = Ancestral polymorphism is T, Derived polymorphism is A
MTPSIPRTGGRACTTRRTTGTRTTSGPSSRRRPSPRRSRNPGWPSSPRPSRRCSLAPLLMCSQLWRCRGFARFVNVRDDTGATPLHLAARQGWRRCVHVLLENGAIVSASSGAFGRIPYEVAAKRGHVACAALLNPSSAEPLVWPSALKFISELEPDAKSLLEAALMEANRERERRILKGAKNALPSPSHPDDGAHDTAIAEASDA

SEQ ID NO: 3552 - protein, 158 aa, Zea mays
  VARIANT 83..158: note = Derived polymorphism lacks residues 83 to 158
  VARIANT 107..158: note = Derived polymorphism lacks residues 107 to 158
MAPPAVSISPICCVPYPASGPRRARTPPSSLRRFPRFAARRSSGGGGGTRPEPKPDDNESKAVLDAFFLGKAFAEALTERVESVVGEVFSVVGQWQAEQQKQVQDFQEEVVQRAQKAKEKAATEVSDDKGAKSLREPSATIVATTTTSSPPATPTQTE

SEQ ID NO: 3553 - protein, 519 aa, Zea mays
  VARIANT 432: note = Ancestral polymorphism is G, Derived polymorphism is R
  VARIANT 331: note = Ancestral polymorphism is Y, Derived polymorphism is N
MATARAVAAAAAALAAVVLVALLAPAVRGVDRSEFPPGFLFGAATSAYQIEGAYLEDGKGLCNWDVFTHTHSGGVMDGRTGDVADDHYHRYVGDLEILQSLGVNAYRFSISWARVLPRGRVGGVNAGGVAFYNRLIDALLQKGIQPFVTLNHFDMPRELEVRYGGWLDAGIREEYEHYADVCFGAFGDRVRLWTTFNEPNLLVKFQYMLGAYPPSRCSPPFGSCGSGDSRREPYAAAHNIIMSHAAAVRAYREKYQATQGGSVGIVAAMKWYEPLTNSTDDILAARRAQAFETDWFLEPIFLGDYPGAMREILGSDLPTFTAEEKALLLRYKADFIGLNHYTAIYARDCLRSPCNLGSYEGNAFVSATGERDDGVKIGGDTALAGFFDVPEAIELAIQYVNGRYKGTPVYITENGYSQWSDASREELIDDVRRKNYLQGYITYLSKAVRNGANVRGYFVWTLLDNFEWAFGYRLKYGLYHVDFDTQERTPRMSARWYQGFLTARTSQRDEAAQARRADS

SEQ ID NO: 3554 - protein, 558 aa, Zea mays
  VARIANT 442: note = Ancestral polymorphism is G, Derived polymorphism is D
  VARIANT 440: note = Ancestral polymorphism is L, Derived polymorphism is H
  VARIANT 244: note = Ancestral polymorphism is H, Derived polymorphism is Y
  VARIANT 136: note = Ancestral polymorphism is R, Derived polymorphism is T
  VARIANT 40: note = Ancestral polymorphism is A, Derived polymorphism is P
MAGRARARRFVLAGALMIAWLLCLLPRATAAAVRRSDFPPSFLFGTATSSYQIEGAYLEGNKSLSNWDVFSHVPGRIEDGSTGDVADDHYHRYEDDIELMHSLGTNAYRFSISWARILPRGRFGEVNPAGIAFYNRLIDSLLLKGIEPFVTLSHYDIPQELEDRYGAWLGGAEARRDFGHLADVCFAAFGDRVRHWATFNEPNVAVTRGYMLGTYPPGRCSRSCARGNSDAEPYVAAHNVVLAHAAAVQIYKTKYQSKQKGLIGIVMSTVWFVPLTDAPADRLATERALAFDVPWFLDPIIYGDYPPEMRRLLGSRLPTFSPEERRTLGYGLDFIGINHYTTLYARDCMISPGYCPSGQEFHQSLAAYTGERDGIPIGPPTAMPTFYVVPDGIEKMVTYIMNRYSNLPMFITENGYAQGGDGYTTRAEDWLDDQGRIQYLEGYLAKLAKVISDGADVRGYFIWSLIDNFEWLYGYTLRFGLHYVDYQTQERKPKSSALCDGADVRGYFIWYLIDNFEWLYGYTLRFGLHYVDYQTQERKPKSLALWYKRFLQSSLEAQ

SEQ ID NO: 3555 - protein, 116 aa, Zea mays
  VARIANT 64: note = Ancestral polymorphism is A, Derived polymorphism is T
  VARIANT 61: note = Ancestral polymorphism is H, Derived polymorphism is Y
  VARIANT 60: note = Ancestral polymorphism is L, Derived polymorphism is V
  VARIANT 56: note = Ancestral polymorphism is A, Derived polymorphism is V
  VARIANT 36: note = Ancestral polymorphism is L, Derived polymorphism is F
  VARIANT 25: note = Ancestral polymorphism is S, Derived polymorphism is N
MFRRSRSAEELYEADVQIRRSATSSFLDIRFHRGTLYLLPITVDDTTEYVLLNLMAFERLHVGAGNDVTAYVFFMDNMVDSARDVALLQCIIWYTLMLFMFEYRVVRLLIVLFFLV

SEQ ID NO: 3556 - protein, 362 aa, Zea mays
  VARIANT 338: note = Ancestral polymorphism is R, Derived polymorphism is W
  VARIANT 328..362: note = Derived polymorphism lacks residues 328 to 362
  VARIANT 320..362: note = Derived polymorphism lacks residues 320 to 362
  VARIANT 113: note = Ancestral polymorphism is C, Derived polymorphism is Y
  VARIANT 87: note = Ancestral polymorphism is G, Derived polymorphism is E
  VARIANT 81: note = Ancestral polymorphism is R, Derived polymorphism is Q
  VARIANT 64..362: note = Derived polymorphism lacks residues 64 to 362
  VARIANT 62: note = Ancestral polymorphism is A, Derived polymorphism is V
MSHPHRALAEHHDARSRASTTTTSSLSSSARRDDDPDPPPRSLRDPPYTLGPKIFDWDEQRAAWHRRHPETPPFLNDIKPRVLLVTGSSPKPCENPVGDHYLLKSIKNKMDYCCVHGIEVFYNMALLDAEMAGFWAKLPLMRALLLAHPERYGPYNLIMHGWDEMVYDDKNWIGLNTGSFLLRNCQWSLDMLDTWAPMGPKGPVRIEAGKVLTKSLKDRPVFEADDQSAMVYILATQREKWGDKVYLENGYYLHGYWGILVDRYEEMLENYKPGLGDHRWPLVTHFVGCKPCGKFGDYPVERCLKNMDRAFNFGDNQILQMYGFTHKSLASRRVKRIRNETSNPLETKDELGLLHPAFKAST

SEQ ID NO: 3557 - protein, 458 aa, Zea mays
  VARIANT 53: note = Ancestral polymorphism is S, Derived polymorphism is L
  VARIANT 48..458: note = Derived polymorphism lacks residues 48 to 458
  VARIANT 45..458: note = Derived polymorphism lacks residues 45 to 458
  VARIANT 43..458: note = Derived polymorphism lacks residues 43 to 458
MEHVVGGKFKLGKKIGSGSFGELYLGVNMQSDEEVAVKLESVKSRHPQLHYESKLYMLLQGGTGIPHLKWFGVEREYNVMVIDLLGPSMEDLFNYCSRKFSLKTVLMLADQMISRVEYMHTRGFLHRDIKPDNFLMGLGRKANQVFVIDYGLAKKYRDLQTHKHIPYRENKNLTGTARYASVNTHLGVEQSRRDDLESLGYVLMYFLRGSLPWQGLKAGTKKQKYDIISEKKMLTPVEVLCKSHPSEFTAYFHYCRSLRFEDKPDYSYLKRLFRDLFLRKGYQLDYVFDWTIMKYPQFRDKNKFQSSGKTSGLAGPSAERTNRTAAEALFRRTRSGSGHNREHTKHRSLLESLMPSKVTVDSDKIRPSSSSRNGSTSRRAVLSSSKPSSSGDPSDPNRVGGLAPSSSIRPLSAQRAHHSGGTEIKSLSWSKMGRSSHDDAIRNFELLSLCADKRKIRN

SEQ ID NO: 3558 - protein, 354 aa, Zea mays
  VARIANT 298: note = Ancestral polymorphism is N, Derived polymorphism is Y
  VARIANT 297..354: note = Ancestral polymorphism lacks residues 297 to 354
  VARIANT 258: note = Ancestral polymorphism is F, Derived polymorphism is I
  VARIANT 208..354: note = Derived polymorphism lacks residues 208 to 354
  VARIANT 169..354: note = Derived polymorphism lacks residues 169 to 354
MSMAEEGSEAEEGSEAEALEKDGSKASSPSGPDLGKKGPGAMSMAEEGSEAEEGSEAEALEKDGSKASSPSGPASRLVSSNAAGVGSLEVGAAADTSNASRQGLGGLEDEELQVQDAVASGSKRSKDSAAAATRSANVSSPSVVHSHPAILPAPAQQIPEVKQAATIGQSEETEELSKITLENKDIQLDINIREESRSSSQQGNFDTEGTSSSEAFLLGTVASEKMLEKLKHKSGRCEPALEKAIVELEHGINGLKYFVCLDPRLQVCSATDTRRIKETLPWYMPVATMDKRRLVLYNFMSGLKVVFDRERKVLGWKNFDCYSVGNSRSNLPVNPNPSGVPPAPGLGPNSYTHS

SEQ ID NO: 3559 - protein, 138 aa, Zea mays
  VARIANT 27: note = Ancestral polymorphism is G, Derived polymorphism is S
MEGDKKAGAVAEKKAAAADQSKEVAAGDVSLKELSRRLNDFAKERDWEQYHSPRNLLLAMIAEVGELSELFMWKGEVRKGLADWDEAEKEHLGEELSDVLLYLVRLSDMCGVDLGDAALRKIVKNAVKYPAPSKEQGA

SEQ ID NO: 3560 - protein, 293 aa, Zea mays
  VARIANT 49: note = Ancestral polymorphism is A, Derived polymorphism is E
  VARIANT 163: note = Ancestral polymorphism is V, Derived polymorphism is G
MGLREIESTLPPGFRFYPSDEELVCHYLYRKVANERSVQGTLVEVDLHAREPWELPDAAKLTASEWYFFSFRDRKYATGPRTNRATKTGYWKATGKDREVRDPAARAVVVGMRKTLVFYQGRAPSGVKSCWVMHEFRLDSPRTTTTPPKEDWVLCRVFQKRKVDGSEQDNGVSPSPPVFAGASQSQGVVLPPDQPCVVDAYVVVDQPGSSSVGLAPPQENLGSGLDALLTNGAMWQYTSSVFGHLLPQEATSSPPVMDLGSRGGEGGDYGCSFFYDSSFEDMANIGFRQGWMG

SEQ ID NO: 3561 - protein, 377 aa, Zea mays
  VARIANT 241..377: note = Derived polymorphism lacks residues 241 to 377
MATKVVVDLRSDTVTKPSEAMRASMAAADVDDDVRGADPTARRFQEEMAALMGKEAALFVPSGTMGNLVSVLAHCDVRGSEVILGDDSHIHLYENGGISTLGGVHPKTVRNNSDGTMDIDSIVAAIRPPGGGLYYPTTRLICLENTHGNSGGKCLSAEYTEKVGEIAKSHGLKLHIDGARIFNASVALGVPVDRLVRAADSVSVCISKGLGAPVGSVIVGSKAFIDKAKILRKTLGGGMRQVGVLCAAAHVAVRDNVGKLADDHRKAKALADGLNKIEQFRVDSASVQTNMVFLDIVDSRISSNKLCQVLGTHNVLASPRSPKSVRLVLHYQISDDDVQYALTCFKKAAEQLLMGSTELEHLAEQLLMGTTKNSYGQ

SEQ ID NO: 3562 - protein, 168 aa, Zea mays
  VARIANT 117: note = Ancestral polymorphism is R, Derived polymorphism is C
MPQSSPSRYEAQKRRDWNTFGQYLRNHRPPLSLAQCSGAHVLEFLRYLDQFGKTKVHGPACPFFGHPNPPAPCPCPLRQAWGSLDALVGRLRAAYEENGGRPESNPFAARAVRLYLCEVREHQARARGVSYEKKKRRKPQQLPGPGDSSGLHGHAHQPPPPPPAGAAC

SEQ ID NO: 3563 - protein, 277 aa, Zea mays
  VARIANT 31: note = Ancestral polymorphism is S, Derived polymorphism is R
MGRAPCCEKMGLKRGPWTPEEDKILVAHIQSFGHSNWRALPKQAGLLRCGKSCRLRWINYLRPDIKRGNFSKEEEDAIITLHEQLGNRWSAIAARLPGRTDNEIKNVWHTHLKKRLEPTTKQLEQEQHGAHAGGGAARKRSRPKRAGARKTTTAAVAPATTAPASPERSAASSSVTESTEQEQGNTGTSSPGFPKEESFTSSSEAAEEFQFDDTFWSETLSMPLDSFDDVPMEPCSGAFGDVAASSSSSSVGADADLDYWLGVFMKSGDAHQQLPQV

SEQ ID NO: 3564 - protein, 536 aa, Zea mays
  VARIANT 23: note = Ancestral polymorphism is V, Derived polymorphism is F
  VARIANT 25: note = Ancestral polymorphism is A, Derived polymorphism is V
MRSPALLAAALAAVALLAAGAGFAVAATEEAYVTLLYGDEFVLGARVLGKSLRDTGTRRDMVVLVSDGVSEYSRKLLQADGWIVNRITLLANPNQFRPKRFWGVYTKLKIFNMTSYKKVVYLDADTIVVKSIEDLFKCGKFCGNLKHSERMNSGVMVVEPSETLFNDMIKKMDQLPSYTGGDQGFLNSYYSDFANSRVYEPDSPLTPEPATQRLSTLYNADVGLYMLANKWMVDEKELRIIHYTLGPLKPWDWFTAWLVKPVETWQDIRQKLEESLPGTGGGRNPHDQLVVKILFILPFCLLLFGYYQSCFQTDKELVSIRSLCAFARRARHKYKSEESLPSYSVVGSSSAFGISSQRLSNGHLKLPSYFGAIAVLVCFVSAGFSLAFAFAIIPRQVMPWTGLLLMLEWTFVAFFLLFGSYLRFVYRWGSISANHVGFSNSDSSENHMGPGHQRNMSDCDMDATFYWIGMASIATITVLLPTILGITALFTKLGLMVAGGIVLASFMTYAAEHLAISVFNKGQKYRNASRTRSFCF

SEQ ID NO: 3565 - protein, 214 aa, Zea mays
  VARIANT 3: note = Ancestral polymorphism is P, Derived polymorphism is R
MSPSASTCSIGGSATSSVSFFRLLLSLPPLLKPVDSFSTQLSLVVFSWFCFARSEKDILMVCLFWYILRYLLGFFQRLQGIPPSRTSSCCCCWTRSVYPRTPVLSPSSTCQFRTRTQRSASCVAGAGFTLRPASPTSTAAILSTISDSMDYKRRQVQNIKQHTVAVSFWREGALECHSSEAAYWECHKRKCLVRDRAVVGLMVQSRHVCLITCH

SEQ ID NO: 3566 - protein, 253 aa, Zea mays
  VARIANT 54: note = Ancestral polymorphism is G, Derived polymorphism is A
  VARIANT 123: note = Ancestral polymorphism is A, Derived polymorphism is G
MDAAEHHVEETKEEEAAQVMETTTAHSRFGRICVFCGSSQGKKKSYQDAAVELGEELVSRNIDLVYGGGSVGLMGLVSRAVYNGGRHVMGVIPKTLMPREITGETVGEVKAVAGMHQRKAEMARQSDAFIALPGGYGTLEELLEVITWAQLGIHDKPVGLLNVNGYYNSLLSFIDKAVEEEFISPTARHIVVLAPTPKELLDKLEEYSPRHEKLGRAEDEVGDGAADEQLQELRGPAGAQAQRWEADRPGAES

SEQ ID NO: 3567 - protein, 823 aa, Zea mays
  VARIANT 430..823: note = Derived polymorphism lacks residues 430 to 823
MFVDVLAQLWSDWGLRFSVISSLVTIVVLSLLSWTRRRSTSGRWRSILLWFVTRVVWLAYQGAEIAATGALGSLSLSGSDGSAEEQQVIAFWAPFLLLHLGGPDTMAAYALEDSALSVRKFLEMVFQVGGAFYAQYKYIYRARTWTPLATASAIMLPIGIVRYVEKWYALWKSKSMMEEEEGEEEEEEKKKVAGAGPGPGRFTSATSSNDALCLAQDLFHVCRRALSDSSVLPGTEKQRASEEIFLLGWERMCKVVEMELSLMYEALYTKAIVLHTCPVAGYLNRLVSPLATAAAVLLFNQYIGSRSRRAIIIRRSFVDITYLLLVVAFAMDLMWLLRALGSTWTYAALREARPWAWWLRHHLLCSGRWRRIHRAVDALHPLSWLFGSDPVSYYRTWSGTIGRYNLLQACSVAAAHRGARRPWWTRFGSWLEKKLELEETEYLRELPQDVKESLIQRVQRILVSTKNNNADKKTDENGIGCRYTLVDIRTLWGQQALEDAKTNLFGRGRKNGRKTSNKKPKLPSFGREFEEDVLMWHMATCILFSSSSGKESIVSIPGGSSADAADAHVTAIKVMSEYLMFFVAVRRHMLPGLVLHSLLEKIRQTLHEIWDDGKKKTTGGSSSSSSTAAKDTPPPQDKLAEMLLERLKAGRRWFDRNEGRLVVGNAAALANTLIEAGISVQKRQQVPQLLEFIFNVWVDKLLYAAARCSVESHAKQLSRGGDLTTILWLIVQHAALFRIGELKPKEEPQEEEEKKKEEEEEKKKKEEEELKPFWPQYPMPAPPSKPAYAYPVHYIADEEESDDAEESDDAEEDDDMTRHAILY

SEQ ID NO: 3568 - protein, 284 aa, Zea mays
  VARIANT 230: note = Ancestral polymorphism is M, Derived polymorphism is I
  VARIANT 225: note = Ancestral polymorphism is A, Derived polymorphism is T
  VARIANT 223: note = Ancestral polymorphism is R, Derived polymorphism is L
  VARIANT 219: note = Ancestral polymorphism is E, Derived polymorphism is K
  VARIANT 217: note = Ancestral polymorphism is M, Derived polymorphism is T
  VARIANT 209: note = Ancestral polymorphism is E, Derived polymorphism is K
  VARIANT 189..284: note = Derived polymorphism lacks residues 189 to 284
  VARIANT 188: note = Ancestral polymorphism is T, Derived polymorphism is I
  VARIANT 87: note = Ancestral polymorphism is L, Derived polymorphism is R
  VARIANT 36..284: note = Derived polymorphism lacks residues 36 to 284
MDLLKRELEKKRKAATADFGGKSFVWRSELEKKQLQKRLDEHRQLLAKAGTSAPSANSAAAATGSEERRIDELDLPRHEVVRRLRVLREPVTLFGENDDARLARFKLVLKSGVIDDIDMTEGQTNDFLRDMIEMRKRQKAGRDTYAKGKSKRVDGGDGGAAGGSADDGDAKGSGDDADADKDSKRMRTKFEELCNEDKILVFFKKLLNEWNQELDEMTELEKRTAKGKSIVATFKQCARYLSPLFEFCRKKVLILMQFPSVVCINCAINTDAHLNIDYVYTVDN

SEQ ID NO: 3569 - protein, 387 aa, Zea mays
  VARIANT 301: note = Ancestral polymorphism is S, Derived polymorphism is Y
MDLLKRELEKKRKAATADFGGKSFVRRSELEQKQLQKRRDEHRQLLAKAGTSAPSANSAAAATGSEERRIDELDLPRHEVVRRLRVLREPVTLFGEDDDARLARFKLVLKSGIIDDIDMIEGQTNDFLRDMIEMRKRQKAGRDTYAKGKSKRVDDGGAAGGSADDGDAKGSGDDANADKDSKRMRTKFEELCNEDKILVFFKKLLNEWNQELDEMTELEKRTAKGKSMVATFKQCARYLSPLFEFCRKKVLPHDIRRALLVIVECCMKRDYLAAMDQYIKLAIGNAPWPIGVTMVGIHERSAREKIYTNSVAHIMNDETTRKYLQSIKRLMTLSQRRYPALPSKSVEFNSLSNGSDLQALLSAENGSAKASEERLRFMPSQTRLDFK

SEQ ID NO: 3570 - protein, 641 aa, Zea mays
  VARIANT 20: note = Ancestral polymorphism is R, Derived polymorphism is C
MVLSTKILNLEKKWNEYCVRLHQGCNRINRDPCQLFPHHIGVRVDRERCANPNQSAQTIALQRDIIKPCALSSPYTNITAKSISAPDQINADLVLNLQVRQSRSNEPLQSGVVPFQHINSSNYNKPEESSAAPVTTDLVLATPRGSSFKDSSSALCKRVEDIEETIQLMPNKVDDLNLKPPHLSIQPYTCSKSSSSNWEQTSPSALHSTSLGGTSAFGQWQRPSPLATQSFDLSNYKLLMEHLFKVVGRQEEALSAICASIVRCRSMERRRGANKKNDIWFSFYGPDSIAKRRVGVALAELMHGSSGNLIYLDLSLNDWGNPSFRGKRATDCIFEELRKKRRSVIFLDNIDKADCLVQESLIHAMETGRYKDLHGGRVTDLNDSIVVLSTRMIQGCQDASLGVEEGNAFSEEKAVAARGHQLKIIVEPGTTNIGGGNVVVSSRHSLGSSEASSYSSKRKLHISDGQEKTEESASTSKRLHRTSSIPFDLNLPGDDEEAHDDGDDDKSSGSHENYLEGSVGNLLRWVDGSINFKPFDFGKLCEDILQEFSNTTSKILGTRGCRLEIDAGAMEQVVAAAWASDSHENEKRPVRTWVEQVFGRSLEQVKMRCENLSSCTLRLVSCEVKEDGFGALLPSRIILDW

SEQ ID NO: 3571 - protein, 223 aa, Zea mays
  VARIANT 214: note = Ancestral polymorphism is R, Derived polymorphism is W
  VARIANT 202..223: note = Derived polymorphism lacks residues 202 to 223
  VARIANT 169: note = Ancestral polymorphism is M, Derived polymorphism is I
  VARIANT 144: note = Ancestral polymorphism is I, Derived polymorphism is T
  VARIANT 122: note = Ancestral polymorphism is G, Derived polymorphism is R
MSGIINDIDMIEGQTNDFLRDMIEMRKRQKAGRDTYAKGKSKRVDDGGAAGASADDGDAKGSGDDANADKDSKRMRTNPLFEFCRKKVLPDDIRRALLVIVECCMKRDYLAAMDQYIKLAIGNAPWPIGVTMVGIHERSAREKIYTNSVAHIMNDETTRKYLQLIKRLMTLSQRRYPALPSKSVEFNSLANGSDLQALLSEENGSAKASEERLRLMPAYAFAN

SEQ ID NO: 3572 - protein, 533 aa, Zea mays
  VARIANT 7: note = Ancestral polymorphism is L, Derived polymorphism is M
  VARIANT 38: note = Ancestral polymorphism is L, Derived polymorphism is Q
  VARIANT 468: note = Ancestral polymorphism is L, Derived polymorphism is H
MELNKVLYMYAATVALLLCSSANFIQSPSDVLGSVALQDPTPSAAHDFGAVVSDAPVAVMQPGSPADIARLLSALSSAGPDRRPKAAVAARGAGHSLHGQAQARGGIVVETRALPRLVEVVRRGDGDGDGDGGAAYADVGAGALWVEVLEECLRAGLAPRSWTDYLYLTVGGTLSNGGISGQAFKHGPQISNVLQLEVVTGTGEVVTCSPTQSPELFFAVLGGLGQFGIITRARIPLQLAPPKVRWVRAFYDSFETFTKDQELLVSMPELVDYVEGFVVLNEQSLRSSSVAFPAQVDFSPDFASGAGSNKVHYYCIEFAVHEFQQQDSAADHVVDLVSGQLSYLRPHAYSVQVAYLDFLNRVRMEEESLRSRGLWDVPHPWLNLFVPRHGVARFKDLLMDTITQGDFEFEGPVLVYPLLANRWDGNTSAVVPAAPDGVMYVFSVLRSTDPARCGRACVEGILEQHRRLADEACRRLGAKQYLARQPSPAHWRDHFGASWDRFVARKARFDPSHVLGPGQGIFPWTDSATASSV

SEQ ID NO: 3573 - protein, 226 aa, Zea mays
  VARIANT 6: note = Ancestral polymorphism is C, Derived polymorphism is S
MEATLCPKPHFVVIPWPATSHMIPIVDIGCLLAAHGAAVTIITTPSSSQLVQSRVDRAGQGSAGVTVTAIPFPGAEAGLPDGCERTDHIPSPDLVPNFFVATARFGEAVARHCRRLPTATAAHPRPSCVVAGMCHTWAHGVARELGAPCFIFHGFCAFALLCCEYLNTHRPHEAVGSPDELFDLPALPPFEFRFQERCRPGKLCPGLRVDRTGAEEKRQQKRQNEE

SEQ ID NO: 3574 - protein, 718 aa, Zea mays
  VARIANT 163..718: note = Derived polymorphism lacks residues 163 to 718
MAPHTTAAAGGGGGEEALEEASTLRHRHSAAKDGGEEGQANNGVAAAADDDGEGNALSVERAFADQAVPSWREQLTVRAFVVSFFLAIMFSVIVMKLNLTTGIIPSLNVSAGLLGFFFVRLWTAAIERVGLLRQPFTRQENTVIQTCVVAAYDIAFSGGFGTYLFGMSETIAKQATEADNPQNVKNPHIGWMIGFLFLVSFIGLFALVPLRKVMIVDYKLTYPSGTATAYLINGFHTPEGAKLAKKQVKTLGKFFLMSFLWGFFQWFYTGGDNCGFQNFPTLGLQAYKNKFYFDFSPTYVGVGMICPHIVNVSVLLGGILSWGIMWPLIGNQKGNWYDASLPESSLHGLQGYRVFISIAIILGDGLYNFVKVLIRTTAGFISMMKKNSTLPVSNNGSPITEGVSFDDERRRDLFLKDQIPRSVAYGGYVAVAAISIGTLPQVFPQLKWYYILVAYIFAPVLAFCNAYGTGLTDWSLASTYGKLAIFIFGAWAGASNGGVLVGLAACGVMMSIVSTAADLMQDLKTGYLTLASPRSMFISQVIGTAMGCVIAPCVFWLFYKAFADIGLSGSEYPAPYAIVYRNMAILGVDGFSSLPKNCLTLCYIFFAAAIVVNLVRDLVPKKVARFIPLPMAMAIPFYLGSFFAIDMFIGTVILFAWETINKAKANAFAPAVASGLICGDGIWTLPQSILALAKVKPPICMKFLSRSVNAQVDGFLGS

SEQ ID NO: 3575 - protein, 260 aa, Zea mays
  VARIANT 17..260: note = Derived polymorphism lacks residues 17 to 260
  VARIANT 55: note = Ancestral polymorphism is F, Derived polymorphism is Y
  VARIANT 76: note = Ancestral polymorphism is S, Derived polymorphism is Y
  VARIANT 79: note = Ancestral polymorphism is V, Derived polymorphism is G
  VARIANT 93: note = Ancestral polymorphism is P, Derived polymorphism is A
  VARIANT 94: note = Ancestral polymorphism is V, Derived polymorphism is D
  VARIANT 100: note = Ancestral polymorphism is S, Derived polymorphism is C
  VARIANT 122: note = Ancestral polymorphism is V, Derived polymorphism is G
  VARIANT 135..260: note = Derived polymorphism lacks residues 135 to 260
MLRRIAAVAPRAFFSSSPPHAPSLPASGYIPRREYGLVPMVIEHTSRGERAYDIFSRLLKERIVCIHGPITDDTASLVVAQLLFLESENPAKPVHLYINSPGGVVTAGLAIYDTMQYIRSPVTTLCIGQAASMASLLLAAGASGERRALPNARVMIHQPSGGASGQASDIAIHAKEILKVRDRLNKIYAKHTGQAIDRIEQCMERDMFMDPEEAHEWGLIDEVIEHRPVSLVSDAVGSDPPNLGGGGTEVNKGTDEPSPA

SEQ ID NO: 3576 - protein, 1132 aa, Zea mays
  VARIANT 976..1132: note = Derived polymorphism lacks residues 976 to 1132
MTMMTPPPLEQQQGDEMLVPHQELPVAGPEPAPQPMEVVAQTEPANTAETQPPEDPQTSRFTWTIESFSRLNTKKHYSDAFVVGGYKWRVLIFPKGNNVDHLSLYLDVADSGSLPYGWSRYAQFSLAVVNQVHPKYTIRKDTQHQFNARESDWGFTSFMPLSDLYDPNRGYLVNDTVVIEAEVAVRRMVDYWTYDSKKETGFVGLKNQGATCYMNSLLQTLYHTPYFRKAVYHMPTTENDMPSGSIPLALQSLFYKLQYSDNSVATKELTKSFGWDTYDSFMQHDVQELNRVLYLQLDVKGCRDVYASFDKYVEVEHLEGDNKYHAEQYGLQDARKGVLFLDFPPVLQLQLKRFEYDYMRDTMVKINDRYEFPLQLDLDRDNGKYLAPDADRNRIHFFYADVACIFFLFSVLVHSGGVHGGHYYAFIRPTLSDQWYKFDDERVTKEDTKKALEEQYGGEEELPQINPGFNNTPFKFTKYSNAYMLVYIRESDKEKIMCNVDEKDIAEHLRIRLKKEQEEKEHKKKEKAEAHLYTIIKIARDEDLKEQIGKNIYFDLVDHEKVHSFRIQKQLPFTSFKEEVAKEFGIPVQFQRFWLWAKRQNHTYRPNRPLTPHEEAQSVGQLREVSNKAHNAELKLFLEVELGPELCPIRPPEKSKEDILLFFKLYNAEKEELHFVGRLFVKALGKPSEILTKLNAMAGFSPNEEIELYEEIKFEPNVMCEHIDKKLTFRSSQLEDGDIICFQKAPVPDGDAQVRYPDVPSFLEYVHNRQVVHFRCLDKPKDDDFSLELSKLHTYDDVVERVAHQLGLDDPSKIRLTSHNCYSQQPKPQPIRYRGVAHLLDMLVHYNQTSDILYYEVLDIPLPDLQRLKTLKVAFHHATKDEVVVHSIRLPRNSTISDVITDLKTKVELSNPDAELRLLEVFYHKIYKIFPPHEKIENINDQYWTLRAEEIPEEEKNLGPHDRLIHVYHFMKDPNQNQQIQNFGDPFLMVIREGETAAEVMERIQRKLRVPDDEFSKWKLAFISMNRPEYLQDTDVRRDVYGAWEQYLGLEHTDTTSKRSYTSNQNRHTYEKPLWEQWQRLYNGFGIILRAVEKRTRITRSDSRVLRPVKQNLLKLTYPLYQKGRLQVFYYT

SEQ ID NO: 3577 - protein, 490 aa, Zea mays
  VARIANT 127..490: note = Derived polymorphism lacks residues 127 to 490
MACCSAVLHHPLGFSLTPCSASRAPPRIQRVGVATPSAASARPLSRARISPRCTYSGGASAAPGPGELPAAALRRVLEMPGAHQAPACYDALSARLVERAEFRACFTSGFSISAARLGLPDVGLISYGEMIDQGRLMTEAVSIPVIGDADNGYGNCMNVKRTVKGFINAGFAGIILEDQVSPKACGHTQGRKVVSREEAIMHIKAAVDARNESGSDIVIVARTDSRQAVSLNEALWRVRAFADAGADVLFIDALASREEMKAFCAIAPGVPKMANMLEGGGKTPILSPVELEEIGYKIIAYPLSLIGVSMRAMEDALIAIRGGRIPPPSSLPTFEEIKNTLGFNHYYEEDKRYAVTPAQPLYGTGYDNYTSEPNSPGDSRSRAKKTQEPVIDILPQLYDIGSSDSRGPSTGMWSRTLRLKITGRDGIQKIDARIPAGFLEGMTRIIPGLAGANIMERLRNAPVDTDNPQNGQILLDFEDAMGDRIQVFIA

SEQ ID NO: 3578 - protein, 207 aa, Zea mays
  VARIANT 142: note = Ancestral polymorphism is P, Derived polymorphism is R
MASRDGATFQVYRAMPAPTPMSLASAAPAAADAAAPKKAGAGAGKDRHSKVNGRGRRVRMPIVCAARVFQLTRELGLKSDGQTIEWLLRQAEPSILAATGSGTTPAVFSCSSAPSTSAASAGAGAGVSLPLLGKRPREEHEPAVAVAVAPAPFWATLQARPVAAAWGLSPAQEAAAQAYASVAAQGHHLNLLSVLSGAARPSEEESR

SEQ ID NO: 3579 - protein, 809 aa, Zea mays
  VARIANT 259..809: note = Derived polymorphism lacks residues 259 to 809
MGIPSFYKWVVSKYPSIISPVKDEPEECPDGIIYDNLYLDMNCIIHCCFHPQDQLTHADIDVRPPTTANEVFESMFEYMDRLFRIVRPTSLLYLAVDGVAPFAKMNRIRRGRFHSAMERLAEEPPREISEVSDPNVISPGTEFMEKVSEALEYYIRARFNSDPWWRDIMVILSDASVPGEGEHKIMSFIRAQCSMEGYDPNTRHCLFGHDADLIMLALASHEVYFSILREDVLYQNQEETEGNPKKSFLFLNMWVLREYLEIEFKILDPVCETDIERLIDDFIFICFLMGNDFIPHIPSLKTQEGAVDLLIEVYKTTFNKMGGYITNTDKVKDKYGAYLEVSRLETFFHELSMYEDKIFLKRYDLKQDSLLETYHEMLREAPESERPELRQKLDDLLFNEENPYDSIRLGLPGWKSRFFREHFGAKTSSEIGKLQNDMAQKYLEGLCWVLQCYFADVPSWSWYYPFYVAPFVSDLKGLSRIEISFTVDKPLRPFDQLMAVLPMQSWGALPKCYEKKRDTPFYYPRLVHAKDGKYFLWRGISEELRLSASEMVDRKLTTLESRRNTTRKEKVFLHRSSNSVPHNGGSSSLPHNEVTEQASHCSMQKLPIDSATSGIGGWIAPAYNDGFCDGFFPSPTPNLQDITSDQTISGMFFNPEAANPVPRLLGNVRVPDKTVTGADISKRPLWHTYPGSRPPRIVQRPDTVWKPSTPASPREEHKNAGTGWIGRGRGNALAAAAAAETQWKSSSYSYRRGGGFQRAAMAQSRGSSSSFDGGGAYSFRPLGSAPWTAGDGSRSGGAGHGGIVQPRGW

SEQ ID NO: 3580 - protein, 223 aa, Zea mays
  VARIANT 197: note = Ancestral polymorphism is D, Derived polymorphism is H
  VARIANT 193: note = Ancestral polymorphism is H, Derived polymorphism is R
  VARIANT 191: note = Ancestral polymorphism is V, Derived polymorphism is I
  VARIANT 2: note = Ancestral polymorphism is E, Derived polymorphism is K
MEKAGQHEHVIGIPVNNRAFGIEEPDFPSNGPAKNAAAGAGGRRRVTGDRVAQGLKEHVTLGPKLYETVKGKLSLGARILRAGGVGKVFRRWFSSPVGGGGERLLRASQCYLSTTAGPIAGMLFVSTERVAFRSDRSLALPLTSPAGGGSGSGTTTVLRVPYKVSIPLRRVAAARPGQNRDRPEHKYVQVVTRDGFDFWFMGFVRYQASLQELEKAVAQSQSQ

SEQ ID NO: 3581 - protein, 413 aa, Zea mays
  VARIANT 40: note = Ancestral polymorphism is A, Derived polymorphism is P
MGCGASSQKDAGAPRRRPVSVGDVVVFLPGLRVPRAVDLAQALGGCLARSAVDRLSALRSRVVDMAMRESAAALKPRRRAAARHGSSTANLLQALEDYLPALLGLVKEGSVLRNKVHFTWSNQEDNAEETAMPDAWYEVLSMLHLMAMVCLLQANALLLPRSYGDGYAPRVSEESRRATVDVFLKAAGYLDCAVRHVLPKMPLELRRQLPVDLAEGNLKALSLQALGQGVDMQLGLAIDSPKATLAVKRRLACEMVKYWQQVQESIPELPISDGWGKKHRLFIKWKYVEAKAAAYYFHGLILDEGNTEKSHGMAIAALQASEEFLKESKRVSEAFHATPPTSRSPNPFGTAKYLFDKIPRDASSKVRINQDLYTQEKVIGAPPPLPDFALALTPEEYDLPPLDPLWNKEDTSH

SEQ ID NO: 3582 - protein, 415 aa, Zea mays
  VARIANT 298..415: note = Derived polymorphism lacks residues 298 to 415
  VARIANT 61: note = Ancestral polymorphism is A, Derived polymorphism is S
MDPQIPPRLLSSCLTSLAAFRHFWGGCVPALQAAEMVGGSKPLGESVFAVHAVAGAAAISASAVAVYPLDTVKTLLQLGATGQKQKMGLRQVVDRLMAASGPAGFYNGIGWSILGKLPGLGARFGTYELLTAFYKDGREDNYVYYSEAMKAGIAAGAVEAVFCTPFELFKLRNQVSSVIPSKAMGPANVAQESFPLLSKLLPGYVPDIRVWNNTMSLLSDLSPKHPDMLGALKQHPWMLTGSGKPPLPSDVHLPSRVILLEGWGALWRGLRSGIARDCVFGGMFFSTWQFLHTVMLTWKAVNMSPKPRNLEAAGPVPPFASSVAAGFAGAIAAAASHTFDTAKSRSECTVVPKYIAMERKFLKWKAPGTWIERKTGISPADRNVLFRGIGLRTARSGIASFVLVGSYYLAVNHLS

SEQ ID NO: 3583 - protein, 66 aa, Zea mays
  VARIANT 22: note = Ancestral polymorphism is T, Derived polymorphism is M
  VARIANT 39: note = Ancestral polymorphism is P, Derived polymorphism is L
MPLLPSLKLDLFHRVAAAGTGTGAAVVRFPFGSIPVTHLYYFFGQTAATAEAGCRVLKLASTVTVA

SEQ ID NO: 3584 - protein, 329 aa, Zea mays
  VARIANT 293: note = Ancestral polymorphism is G, Derived polymorphism is D
  VARIANT 269: note = Ancestral polymorphism is M, Derived polymorphism is T
  VARIANT 204: note = Ancestral polymorphism is T, Derived polymorphism is I
MKFKAFFTDDGISLLDKRFLPAMDKVGRVCHVFFTPTHAMLLHNLLGATAAGPDGGGPQCVAQFAKDLLFREYNLSSRNGNQIAFSVEVALLHRALRSVLAVHAQPPAAGDAAGAPAIQVRLVNKLPAGSRTATPFLTFETKGAHAAVVQDVPISRPLSRSDVERLHAALDAAKDLPKTLVQVPDLPQLQSLVDRLKNVGDLLTVAVTQYGDLHLQVSTSLVTVGSEFRKLRVIGDRANAPVGDQNLTSSTRMDMAVERREALSVQVNMKHLVKSLHCHLAKPDCTFYGIAPDGACLTVVFQYFIPGTRLADKSISFYCRLPVLDPGSS

SEQ ID NO: 3585 - protein, 464 aa, Zea mays
  VARIANT 290: note = Ancestral polymorphism is G, Derived polymorphism is D
  VARIANT 302: note = Ancestral polymorphism is R, Derived polymorphism is M
  VARIANT 314..464: note = Derived polymorphism lacks residues 314 to 464
  VARIANT 374: note = Ancestral polymorphism is R, Derived polymorphism is L
MVTPASPTTTLPAARKPLPLLLFSLSLPALLLLLSLVFLLSHTTFSLLICPLLPRMSSTRNATSAGSSGTHLGVSMDKTLQVFHATMPTTPSRRNATSSSSSTSFGVSADRTLQTFHAFAAAPPPPPAWPAAPSVTKSSRKKASAKRNKSLLKLLLRKTPQTRQFAACTDELFAAPCTDRFFMTWLSPLEQFGRRELLVLESLFRWHRDGCLLVASDTMDSTGGRDKLRPFLERGFRLAVASPDFAYLLNGTPAEAWLGAVQRGRVSLGSIPLGQNLSNLLRLALLYRYGGIYLDADVVVLRPLSELRNTIGAQAMNDATGDWRRLNNAVMVFDRAHQLVHEFIAEFAAAFDGSKWGHNGPYLVSRVAARLRHLSPGLAFTVLPPRAFYPVHWSKIGGLFVAPKDRKGERWVKAKVENIKGQSFGIHLWNRESSRMEMEVGSVIETLISDSCLFCNSSMFVNQG

SEQ ID NO: 3586 - protein, 150 aa, Zea mays
  VARIANT 111: note = Ancestral polymorphism is K, Derived polymorphism is N
  VARIANT 110: note = Ancestral polymorphism is N, Derived polymorphism is Y
  VARIANT 52: note = Ancestral polymorphism is G, Derived polymorphism is S
MAPKAEKKPAAKKPAEEEPAAEKAPAGKKPKAEKRVPAGKSAAKEGGEGKRGKKKGKKSVETYKIYIFKVLKQVHPDIGISSKAMSIMNSFINDIFEKLAAEAAKLARYNKKPTITSREIQTSVRLVLPGELAKHAVSEGTKAVTKFTSA

SEQ ID NO: 3587 - protein, 113 aa, Zea mays
  VARIANT 13: note = Ancestral polymorphism is P, Derived polymorphism is H
  VARIANT 20: note = Ancestral polymorphism is W, Derived polymorphism is L
  VARIANT 25: note = Ancestral polymorphism is G, Derived polymorphism is E
  VARIANT 45..113: note = Derived polymorphism lacks residues 45 to 113
  VARIANT 50: note = Ancestral polymorphism is E, Derived polymorphism is G
  VARIANT 64: note = Ancestral polymorphism is S, Derived polymorphism is L
  VARIANT 68..113: note = Derived polymorphism lacks residues 68 to 113
  VARIANT 78: note = Ancestral polymorphism is L, Derived polymorphism is P
MHSTRLEFMLIAPKRQCKNWDFEIGGSFAGRDCTIVDCTRKIVAQMGKKELMGGKDFYHVEVQSGYDQAFIIGVMAILDSIHGERHGTNRRHLKLSKADASRGYLLSGHMIDA

SEQ ID NO: 3588 - protein, 316 aa, Zea mays
  VARIANT 18: note = Ancestral polymorphism is A, Derived polymorphism is S
MSRVRDRTEDFKEAVRVAALSHGYTEAQLAALMSSFIIRKPSPKSPFTNAAIKTLESIRELERFIVKHRRDYVDLHRITEQERDNIEHEIGVFVKACKEQIDILKNRIQEEEKNGSGKTWLGTRDGSSRLDLIAHQHGVVLILSERLHSVTAQFDRLRSMRFQDAINRAMPRKNQKRPEKKPAEPSKSSLVLKSDVSKIVDQEASTAPMRVQEQLLDDETKALQVELTSLLDAVQETETKMIEMSALNHLMSTHVLQQAQQIQYLYDQAVEATNNVERGNKELSQAIQRNSSSRTFLLLFFFVLTFSVLFLDWYNN

SEQ ID NO: 3589 - protein, 318 aa, Zea mays
  VARIANT 304..318: note = Derived polymorphism lacks residues 304 to 318
  VARIANT 26: note = Ancestral polymorphism is Y, Derived polymorphism is H
  VARIANT 16: note = Ancestral polymorphism is E, Derived polymorphism is K
  VARIANT 8: note = Ancestral polymorphism is D, Derived polymorphism is G
MNIFECLDSLIILCNEFWRVALSKLYVFLLTTSGFSVYCSAVITELKQFLRASVTIAMEAGRMDQPCMASINSQPFVADTEPVKKASGDMPAAPTGSGCFDCNICLDFAAEPVVTLCGHLYCWPCIYEWLRPGVESTASDNGSSARRQCPVCKATLSPDTLVPLYGRGGSSKKSLDGMAIPRRPMVHREAVEQQNARSHVNDQHYHQSTGDSPQHQPLMQAHHHPVPPGFDFIYPPAPVGRGLIHSTAGGVLGGMAEVVLPWVLRGQLPASLHYTSPYHVAAQNVNPRLRRQQMEIERSLHQIWFFLFVFVLLCLLLF

SEQ ID NO: 3590 - protein, 420 aa, Zea mays
  VARIANT 19..420: note = Derived polymorphism lacks residues 19 to 420
  VARIANT 56..420: note = Derived polymorphism lacks residues 56 to 420
MPHQAPGCWVWASRSSRCQPVATRFISPTQPKPEDTVPSAVLPALPHHKQARARRQVASTATSTAYSLPPSSRLRLQVSRGPRFLPEQSRSALRHGDEVGMEYRDKLVLAPMVRVGTLPFRLLAAEYGADITYGEEIIDHKFLKCERVTNESLGTTDFVEKGTDSVVFRTCPQERGRVVFQMGTSNAVRALKAAQIVCRDVSAIDINMGCPKSFSLSGGMGAALLSKPELIHDILTTLRRNLDTTVTCKIRLLNTPKDTVELARRIEKTGVPALAVHGRKIKDRPRDLAKWDEIADVVSALSIPVIANGDVFEYEDFKRIKDATGAASVMVARGAMWNASIFCAKGKTPWEDVKREYVRKSILWDNDVKSTKHTLKEMIMHYSCLELPEGKGVIKCDTSEDLARLYGEEDYYNFVVANRK

SEQ ID NO: 3591 - protein, 669 aa, Zea mays
  VARIANT 444..669: note = Derived polymorphism lacks residues 444 to 669
  VARIANT 255: note = Ancestral polymorphism is R, Derived polymorphism is C
  VARIANT 250: note = Ancestral polymorphism is G, Derived polymorphism is C
  VARIANT 249: note = Ancestral polymorphism is T, Derived polymorphism is I
  VARIANT 17: note = Ancestral polymorphism is P, Derived polymorphism is A
  VARIANT 2: note = Ancestral polymorphism is P, Derived polymorphism is L
MPHLVLLLFLGLGGLLPAASAADEQFVFDGFKGANLSLDGMATVTPDGLLMLTNGTSQLKGHAFYPAPLRFHGAPDGTAAAMESFSTAFVIGIIGAFEDLSSHGMAFVVAKSTNFTSALPGQFMGLVSSATNGNATNHLFAVEFDTILNSEFDDMSGNHVGIDVDGLNSLDADNAGYYDDATFRNMSLVSRKPMQVWVDFDGRTMQVNVTMAPLEAARRRPRRPLLSTTVNLSSVIDDGTAYVGFSSATGILFCRHYVLGWSFRMNGAAPPLNVSSLPTLPVTAPRPRSRALEIVLPIASAALVFAAAAAVFAFLRRRRMYAEVREDWEASFGPHRFSYKDLLHATDGFSDKRLLGIGGFGRVYRGVLASKTEVAVKKVAHGSRQGMREFVAEVVSIGRLRHRNLVQLLGYCRRKGELLLVYDYMPNGSLDRYLYDRSRTALSWGQRFRIIKGVASGLLYLHEDWEKVVVHRDIKASNVLLDKEMNARLGDFGLARLYDHGTDPHTTHVVGTMGYMAPELGHTGKASKASDVFSFGAFMLEVACGRKPVVQDERDNRLVLVDWVLDRWRAGCVTDTVDPRLQGDFLEREASLVLRLGLLCSHPLPGARPAMRQIVQYLDGDAPLPELSPTYQGFNMLSLMQDQGFDPYIMSFPMSSTGISTISDLSGGR

SEQ ID NO: 3592 - protein, 311 aa, Zea mays
  VARIANT 132: note = Ancestral polymorphism is W, Derived polymorphism is C
  VARIANT 72: note = Ancestral polymorphism is D, Derived polymorphism is N
MEGAISTSPGARIAVVTGGNKGIGLEVCRQLAGNGITVVLTARDETRGAAALEELRALGLSDVVFHLLDITDASSIARLAGFLKARFGRLDILINNAAFGGVEYARGPAAAAGSVTSEEELSGMDRDQRLEWLWRNTRETYDAAKKGLLTNYYGTKHVIEALLPLLRASSDGRIVNVSSDFGLLRFFRNEELKQELHNVEKLTEGRLDELLDAFLEDFEAGEADARGWPAAFAAYKVGKAAMNAYSRILAAEQPTLRVNCVHPGYIKTDITLRSGLLTPEEGAGNVVKVALLPGGGVTGAFFEDGQEASFV

SEQ ID NO: 3593 - protein, 311 aa, Zea mays
  VARIANT 67: note = Ancestral polymorphism is I, Derived polymorphism is T
  VARIANT 134: note = Ancestral polymorphism is F, Derived polymorphism is L
  VARIANT 205: note = Ancestral polymorphism is E, Derived polymorphism is V
MEAAAIPTSAPETRIAVVTGGNKGIGLEVCRQLAGAGATVVVLTARDETRGAAAAQELRESGLSDVIFHQLDITDAASVSRLAEFLKARFGKLDILVNNAAVGAVEYVQDPADSSTSEEELSGMDMVQRLQCMLKRVRETYDAATEGIKTNYYGIKHVIEALLPLLQASSDGRIVNVSSDFGLLRVTTNQKLRQELNDVEKLTEERLDEVLAAYLRDFDAGEVGARGWPVDFSAYKVAKVAMNAYTRILARSHPGLRVNCAHPGYVSTDMTVHTGPLTPEQGAANVVKVALLPEGGPTGAYFALGEEASFM

SEQ ID NO: 3594 - protein, 342 aa, Zea mays
  VARIANT 170: note = Ancestral polymorphism is V, Derived polymorphism is A
  VARIANT 187: note = Ancestral polymorphism is R, Derived polymorphism is L
MAAATPSPHSARVAVVTGGNKGIGLEVCRQLASNGITVVLTARDEKRGAAAVEELADAGLSGVVFHQLEVTDAQSIARLAGFLKAWFGKLDILVNNAAIGGVQSLPVENVGEKIKGMDAFQMAELMRKSCRETNDTAKAGVQTNYYGVKNVTEALLPLLLQASSSGGGRVVNVSSDFGLLRVSKLFRYLIIPFQIPFLSFDQRQQLLLLDLKQRMQYLRNEEVKHELDDIEGLTEERLDELLSTFLRDFEAGALKSRGWPTEFAAYKVAKAALNSYSRVLARRHPELRVNCAHPGYVKTDMTRQTGLLTPAQGAANVVKVALLPEGGPTGAFFALGKEAPFV

SEQ ID NO: 3595 - protein, 299 aa, Zea mays
  VARIANT 31: note = Ancestral polymorphism is A, Derived polymorphism is T
  VARIANT 264: note = Ancestral polymorphism is M, Derived polymorphism is T
MGRTPCCDSKGIKKGPWAPEEDKLLVDYVQANGPGNWRILPKLAGLNRCGKSCRLRWTNYLRPDIKRGPFTPEEHNSILQLHAVVGNKWSMIAAQMPGRTDNEIKNYWNTHMKKQIRQEAAAAAGEGAAARLVTVAAASCPAARHTAQWETARLEAEARLSLLSSSAATTVTSATASSSSSTVAAEHAAPPDIFLRLWNSEVGDSFRGAAAQQGHGPEASAAGAGVPALLPELGGGGDDSSAASTYEAEAAADDGYQAFLDLAMEEFALLHGRLGAFSAFPQADVFAEAHCCLFAPFEE

SEQ ID NO: 3596 - protein, 109 aa, Zea mays
  VARIANT 74..109: note = Derived polymorphism lacks residues 74 to 109
  VARIANT 67: note = Ancestral polymorphism is P, Derived polymorphism is L
  VARIANT 63: note = Ancestral polymorphism is V, Derived polymorphism is D
  VARIANT 48: note = Ancestral polymorphism is P, Derived polymorphism is L
  VARIANT 44: note = Ancestral polymorphism is Q, Derived polymorphism is P
  VARIANT 38: note = Ancestral polymorphism is W, Derived polymorphism is C
  VARIANT 28..109: note = Derived polymorphism lacks residues 28 to 109
  VARIANT 22: note = Ancestral polymorphism is G, Derived polymorphism is R
  VARIANT 3: note = Ancestral polymorphism is P, Derived polymorphism is S
MLPSEKAFSAVVSALGIYNKDGIVVYDGKGLFSDARVWCTKVHQSQVPAHLQNLQAATMRVGVQGSPDHSRDQREQGRKRRVGQGPSTEAVKARRKAWYASLNSSGNYF

SEQ ID NO: 3597 - protein, 200 aa, Zea mays
  VARIANT 96..200: note = Derived polymorphism lacks residues 96 to 200
  VARIANT 60: note = Ancestral polymorphism is E, Derived polymorphism is K
MTEEEAKKVEVEVEVTKAAPAKENAAEEKAVIPATEPPAAQEKPPAPADDSKALAIVENKSTPEKPIAEKQGGSSIRDLALARVETEKRNSLIKAWEDNEKAKADNKATKKVSVILSWENTKKANIEAEMKKIEEQLEKKKAEYAEKMKNKVAMIHREAEEKRAMVEAKRGEEVLKAEEMAAKYRATGHAPKKPIGCFGA

SEQ ID NO: 3598 - protein, 508 aa, Zea mays
  VARIANT 430..508: note = Derived polymorphism lacks residues 430 to 508
MEVATAAKAPSSRLARSLAAAAPCYKGVSVFFAAVVAGALVSACWMSVSARLQVTPITPAATPGIARNAATGPEAPAPGRPRSTGVGASTNQTPSAGAASSAPPPREVPDCPAYFRWIHEDLRPWRGTGVTRGAVEGARRFAPRLRVAVVAGRLYVARYGRRRCFQTRAAFTQWGILQLLRRYPGRVPDLDLMFDCEDLPVVGAGERHGAQPQPPPPPLFRYCGSEATLDIAFPDWSFWGWPELNIKPWEALQREINEANAVVNWTDRAPYAYWKGNPKVGAERLLLLRCNASGERDWNARVYAQDWGEEVRHGFRGSDLSKQCTHRYRIYIEGRGWSVSEKYILACESVALMVRPRFHDFFSRGLSPLRHYWPVRGDRGMCRSIKHAVDWGNAHADRAQEMAGNASRFIREELTMDRVYDYMFHLLTEYARLLRYRPAVPRGAAEVTVESMIRGRRGLERQFMVDTLAASASGDGPCRLKPAYSPEELQALRRARADAVRQVEAWEI

SEQ ID NO: 3599 - protein, 292 aa, Zea mays
  VARIANT 189..292: note = Derived polymorphism lacks residues 189 to 292
MAAGRETDEQLTEYEKQRLSRIRENEARLEALGLRSLAASPLLRNSSPGTAKGKQKKRSVDEDEEYVPSDSGGEEKDESSSESAQDEEVDGEGKSASMSRAKGKKRKLSKSGKSTKNTPTKGSASFAEVVDDDTSLQQAIALSLAEYSEKPVTSLGAETSSTVTRASESTPQKNSKASIQDSAKNKKIKKLGKSRIQLSEDDVVQFFFSFDEGYITCANSTKLFTFCFTEVGKGYITPWDLERMATINDFIWTDSEISKMIRCFDSDGDGKINLEDFRSIISQCNMLQEHEK

SEQ ID NO: 3600 - protein, 298 aa, Zea mays
  VARIANT 94: note = Ancestral polymorphism is I, Derived polymorphism is T
MWSHSKDLLEIEPLELRFPFETKKQISCSMQLTNRTDDYIGFKVKTTSPKKYCVRPNSGIVPPRSTSDVIGNSNRPTLTSFPPSSFDMGVPKITIIQMPDALCNFSVTMQAQKEAPPDMQCKDKFLVQSVVVAEGTLVKDITGDMFTKESANVVDEVKLKVVYIPPPKPPSPVHEESEEGSSPRPSLSDGINLNYQEMQTTRESDESLLFSAVKTHIDQKDYTSEVSSSKDSLNVPSTSALISKLTEERNSAIQQNNKLREELDLTRREANKQNGGFSFVVVVAIALLGMLLGYIMKR

SEQ ID NO: 3601 - protein, 281 aa, Zea mays
  VARIANT 12: note = Ancestral polymorphism is S, Derived polymorphism is I
MASLPCSQIKLSKILVRRKFHESGQTNLPSHLHWKPLRPGRFENFVLRCTKNLSWETSLPYASAQDDASIIKGTGVVEPIDTEEAPQIPILQSDEDVVEVKNEPSWHLKAFKLPMWLVGPSILLVTENSIFDLKRQIPISYRFWNLAATIVGFVVPFALFFASRRGTLQPQLPFVPFGVLLGPYLLLLSVQMLTEMLTWHWKSPVWLVAPVVYEGYRVLQLMRGLQLADEISAPDWMVQSLRGLVSWWVLVLGIQLMRVAWFTGLNFARNSSYGASGDMNQ

SEQ ID NO: 3602 - protein, 188 aa, Zea mays
  VARIANT 174: note = Ancestral polymorphism is E, Derived polymorphism is G
  VARIANT 58: note = Ancestral polymorphism is S, Derived polymorphism is I
MRKTFCFGGRRVARKMSERAPMVDGCVFCEIVRGAPASTTALLYSVPYHCLTYHLRSSAALAAENDDKVVAFRDINPSAFRHYLVIPIDHIPTVNSLRKTKDDHQLVSHMVKVGKDFLNQDAPNSEEHRFGFHQPPFNSIDHLHLHCLALPFIPSWRQVKYTPLGPLGGFIAAEKLLERIKPEAEAYS

SEQ ID NO: 3603 - protein, 426 aa, Zea mays
  VARIANT 41..426: note = Derived polymorphism lacks residues 41 to 426
MADLTDIGCCSCFSFLRKPSVPVRQHQDADGMLSEDLLKRQSAEDPDGSFYTGDDPDVSFYNGDDLDRSFYNGDDPDRSFYDRDDTDYIEGSDDGPPRKSSEDIVQLRTQNGFACREISVKETKKVFRSEDENGNKMVNQYVHLGKIGSGSYGKVVLYRNIKDGKLYAIKVLNKPYMMKVRVVRTETAMTDVLREVSIMKMLNHPNIVNLVEVIDDPNIDKFYMVLDYVEGKMVCDNGLEEGTARNYLRDIISGLMYLHSHNVIHGDIKPDNLLVTSAGNVKIGDFSVSQVFEDDDDMLWRSPGTPVFTAPECCQGSAYHGRASDTWAVGVTLYCMVSGHYPFLGDTLQETYDKIANDPVQIPGDMNPQLADLLLRLLCKDPGDRITLQAAAEHPWVAGDEGPVPEFICRCGFGRRKRNDVREEVQ

SEQ ID NO: 3604 - protein, 175 aa, Zea mays
  VARIANT 10: note = Ancestral polymorphism is V, Derived polymorphism is D
MLRRSRHGGVRLGRKLLGLWRRALCGGRRRRRRGGYRRLKQQQQQPCAGTPERAARKLAPALLRWGRSLARRLRLGWRAGGGRRMLAGAEAEVATTPKGQVAVYVGGGGGEAAQSLRYVVPVVYLNHPTFGELLREAEEEFGFQHPGVITIPCPAARFEQAAALAAAGKKGFARW

SEQ ID NO: 3605 - protein, 145 aa, Zea mays
  VARIANT 89: note = Ancestral polymorphism is E, Derived polymorphism is K
  VARIANT 117..145: note = Derived polymorphism lacks residues 117 to 145
  VARIANT 119: note = Ancestral polymorphism is M, Derived polymorphism is V
  VARIANT 125: note = Ancestral polymorphism is N, Derived polymorphism is I
MATTAFLSPPKLSLPGRRFASARTAGRVRVPPARAQEQQQQVVVVVEEEEAEVASVPPPPQSAEEQAQARKGDAAAAGGEQEHEPRGAELSEYTLRLIGSDLEHYIRKLLYDRVIKYNMRSRVLIFSMGKPRIKFNSSQVPDATK

SEQ ID NO: 3606 - protein, 379 aa, Zea mays
  VARIANT 346: note = Ancestral polymorphism is G, Derived polymorphism is R
  VARIANT 179: note = Ancestral polymorphism is E, Derived polymorphism is K
  VARIANT 164..379: note = Derived polymorphism lacks residues 164 to 379
  VARIANT 56..379: note = Derived polymorphism lacks residues 56 to 379
  VARIANT 41: note = Ancestral polymorphism is M, Derived polymorphism is T
MEALWKQASRLKDQVARQGVFKQFGYGNSDNAFTDESEVKMHQRLEKLYLSTRAAKHFQRDIVRGMEGYIVTGSKQVEIGNKLSDDSQKYGAENTCTSGDTLSKAATYFGKARSQMEKERGNMLNAFGTQVYVPNAGFASPCGRATAGNGNGCAPLEDARHLAQRYDRTRQEAEAQAVEVSRRQNRVRESAGNGDMISKLEAAEYKLEELKSNMVALGKEAISAMSAVETQQQWLTLQRLIALVEAERGYHQRVLEILDQLEKEMVSERQKIEAPLTPAADNYMPPPPPSYDEVNGAFASTSVNESVQSVNFFLGEALDSFKAESEFELTLSAGDIVIVRKISSNGWAEGECKGKAGWFPHAYIERREHVLASKVPHIF

SEQ ID NO: 3607 - protein, 209 aa, Zea mays
  VARIANT 99: note = Ancestral polymorphism is T, Derived polymorphism is P
  VARIANT 137: note = Ancestral polymorphism is G, Derived polymorphism is R
MKKLFVSQLEHKDTPDEPSLLVVQCLLEPIFSMFKFYFLHVQINKVQDTLSTNGSRHLKILESGKKEQNLGAETEHDRGNAGAELGAQEHNLNARARLTAGVCRHKVTADEGTEATEGVVSAAHVLEDGTTVTPGTGRSTDHQYSERASDSSTAVGSSKGLNASLRRLYRSMNVPVSCPLPSLVQLMAASKRSRVSNCAVVGSVFAAAK

SEQ ID NO: 3608 - protein, 781 aa, Zea mays
  VARIANT 485..781: note = Derived polymorphism lacks residues 485 to 781
  VARIANT 561..781: note = Derived polymorphism lacks residues 561 to 781
  VARIANT 606..781: note = Derived polymorphism lacks residues 606 to 781
  VARIANT 721: note = Ancestral polymorphism is R, Derived polymorphism is C
MDGSELENPTSRSSSQKSSRRSSSRRSQKSAGQHSLTGAQEKRSKSKSSRQKHLVIDDKEAKKGKKHDHKIDVADERSNFLGYEVYAGKLILQKKNRSASDNNQLPSNGKADAIDARLTSKALIWGSSVLLLEDVVSVSYNSGVKHFTLHAYSTKKSLFKKTCRVQKDFCFIASTLDEAILWVTCFAEQSIYVNLLPRLGASSINQDSENPLSESLFDQPPIKCKSPQRVLVILNPRSGHGRSSKVFHEKAEPIFKLAGFQMEVVKTTHAGHAKSLVSTFDFSACPDGIVCVGGDGIVNEVLNGLLIRSDRAEAVSIPVGIIPAGSDNSLVWTVLGVRDPISASLLIVKGGFTALDILAVEWVQSGQIHFGSTVSYYGFVSDGNLYVIYLVLSSVFSSESLIILMCVATVFTVLELSEKYQKKFGPLRYFVAGILKFLCLPSYFYELEYLPSPKEMAVNGKGTDQDKAHLSNVYTDVMHSRSKKEGIPRASSLSSIDSIMTPSRMSLGDVDTSGSTVASTEPSDYVRGLDPKAKRLSLGRSNIVSEPEEVLHPQPHHGSFWPRTRSKARADRNSVGITSTNDTRSSWAAPSMHDKEDISSTISDPGPIWDCEPKWDTGPKWDSELTWEPDHPIELPGPQEDMGIGAPMELVPNLDEKWVVRKGHFLGVLVCNHSCMTVQSLSSQVVAPKAIHDDNSLDLLLVGGKGRWKLLRFFILLQFGRHLSLPYVEYVKVKSVKLKPGANTHNGCGIDGELCRVKGQVLCSLLPEQCRLIGRRCRQSI

SEQ ID NO: 3609 - protein, 211 aa, Zea mays
  VARIANT 37: note = Ancestral polymorphism is R, Derived polymorphism is C
MSTPRHRLVTASPSLRFLGLLKQPDHASAQDLELDERDVVWSSSSSSSSSAASSPSPSSSPSPAASLRRPVSASSSRHFPAGSMGLSALLADDHHHQRAPTAPVPVVARPERQQQQRAPQPYHRSAPVAVPAWPKAMQPVTDRRRREAELLQAAPDDGYDDGEPVVPPHEMAARRAAAAASVMEGVGRTLKGRDLRRVRNAVWRTTGFLDL

SEQ ID NO: 3610 - protein, 278 aa, Zea mays
  VARIANT 101: note = Ancestral polymorphism is C, Derived polymorphism is Y
MLRPPPKILLLAVSLAATPASALSALAHAAYSPSSSPLHRGGYRRPTPPSSASAGAFSPTPSSSVASMFHHRAPPLLSFFADHSADAPPGRRRAAAGPTCCFMVTCVPPVSRIRLLPHPTPSPSKTPSPQTPITSPKTPSPQTPIPVELLAMRSPIPFLDVRAGRAARRREPNPLKRLFPMSCTPPGSPSPSPSFLRSQRYWTLPSSILMSGGTTPSYTSNTSVLQNGLATDVESHNQIKERKNRANKICGVNKVVDTTPGRVGGRFFIKYGIPAMLS

SEQ ID NO: 3611 - protein, 155 aa, Zea mays
  VARIANT 15: note = Ancestral polymorphism is A, Derived polymorphism is T
  VARIANT 29: note = Ancestral polymorphism is E, Derived polymorphism is G
  VARIANT 31: note = Ancestral polymorphism is A, Derived polymorphism is V
  VARIANT 35: note = Ancestral polymorphism is A, Derived polymorphism is V
  VARIANT 63: note = Ancestral polymorphism is K, Derived polymorphism is I
MAPFTIPGDAGNGATITEMGNPVPEPSYEEAVLSVEEARLWSVDTVNCLDFDVWTTIVEETDKNVENRYVHYLNLTKENRVMTDEFELDSIKKLSREYAEAKELALAGAYPLPLLDMCILLPLRKTPDTTPTPFLIQLLSVSPYHLDRGKPNCRS

SEQ ID NO: 3612 - protein, 703 aa, Zea mays
  VARIANT 465: note = Ancestral polymorphism is S, Derived polymorphism is P
MDEAPGNQDNLPFLGNFTGAMFYGEQSAGCSSLEAGWVPMSERIPAQHDIAMARGNWNGLGIMDNANLFDEQALVSAFGNMGLSLTGNAAADSSAHSGTVGSRDGLLFADSLFTSADYPTNLPHQPAFGQDEFVPSYYTVHNAGHMKTKFGAQNPPMYTGMHGTDNAFVTRTNLPQALSFQQHHIIDTQPQTYAPCYQQMDYKFKRHDIDAETNFFMQPQYPYQQYPQAADVHWINSNQYGVINSSDKYAAAPHRGVPTVRHLGHGSPDIYRNGAVIPNGSNRRGLTHVNNCPFISYPDCLCETCEYCQIHLSENLKRSFALRHTPKCSSDDCISDKAKSSPSSLDSVAMKSAQLPYSSVDEVVGELYHLAKDQNGCRFLQRIFIEGSREDARKVFDGVIEHIDELMVDPFGNYLIQKIFEKCNDNQKMHILYEITKIPGQLIEVACNMHGTRVVQKVIESISTSDEVSMVVSALSHGAITLMMDSNGCHVAERCLLKLSPEGKAFLWYHYYQICKADFGPLQFLVNAATKYCVELAKDRQGCCIIQKCIAHASKEQRNRLLYSITTRALELAEDEYGNYVIQFVLGLGVAWATNEVLDKLEGSYGYLSTQKCSSNVVEKCLREAPERERARIILELIHDPRLLNVLVDKYGNYVIQTALRESEGTAVEAALIRAIKPHAGALRNNMYGKRVLSKACLKSRKP

SEQ ID NO: 3613 - protein, 705 aa, Zea mays
  VARIANT 383..705: note = Derived polymorphism lacks residues 383 to 705
MNSHLRLHTAAAAAAAAVSELELLVPRGRGAGAMDQLRPEPAAGAHEIEKTAAPDVESEPAAAVPEPERVPPWREQVTARGMVAALLIGFVYTVIVMKLSLTTGLTPTMNVSAALLAFLALRGWTRALGRLGIACRPFTRQENTVVQTCVVACYTIGFGGGFGSFLLGLDKKTYELSGVSTPGNVPGSYREPAIGWMTGFLLAVSFVGLLTLLPLRKVLVIDYKLTYPSGTATAVLINGFHTPQGDKNAKIQVRGFLKYFGISFLWSFFQWFYTAGDHCGFAQFPTFGLQAFNQTFSFDFSLTYVGAGMICSHLVNLSLLFGAVVSWGVMWPLIGKQKGNWYPADASQNSMTGIYGYKAFLCIALLVGDGLYNFVKVIAITVKNIRERSRRKNLNRVADADTMALDDMQRDEVFNRDNIPTWLSYAGYAALSLIAVIAIPIMFREVRWYYVVVAYALAPALGFCNAYGTGLTDMNMGYNYGKVALFVLAAWAGKDSGVVAGLVGCGLVKQLVLVSADLMHDFKTGHLTLTSPRSMLVGQAVGTLMGCVLAPLTFMLFYRAFDVGEPDGYWKAPYALIYRNMAILGVEGFSALPRHCLQLCAGFFAFAVLANLARDLLPRRLARLVPLPMAMAVPFLVGASFAVDMCVGSLVVFAWHKLDGKKAALLVPAVASGLICGDGIWTFPSSLLALAKVKPPICMKFTPGS

SEQ ID NO: 3614 - protein, 70 aa, Zea mays
  VARIANT 63: note = Ancestral polymorphism is A, Derived polymorphism is S
  VARIANT 42: note = Ancestral polymorphism is S, Derived polymorphism is P
MSAGTGTTWPHGHRSRGVGEATLRRQLCGENGGLVITTKEAPSSLGSIIVAPSSLHISYKVQARIKIWLR

SEQ ID NO: 3615 - protein, 1820 aa, Zea mays
  VARIANT 465..1820: note = Derived polymorphism lacks residues 465 to 1820
  VARIANT 525..1820: note = Derived polymorphism lacks residues 525 to 1820
MYRNQFRSDRLNDHATTARRPGRGSGSSSHWVVSGGRGSTAPATRLRSPPYRSGRPGSVQQQYRPRSPASVPIQGNAIGCAPPCGSGASAEHTGPVNQETFGSLDNVKPSNFPAQSDGLSCVSAEETWPADSPTPTLQTKGYSSPSFTLQFGTFNSGVINKQETTSCTSSAPPDLNGSKHEKACHGLHYCKPNTASSPPIQELQKQEARDDLVIGGEADLIGKYEVHVPELHETHTMLNSVSPSSKVCTDSRKVLLRTMSSPTQQKCENQEETKNTISVNQTDTAYKYPTTKPKISVQIPASYTPNMAPPQFMLPVPGRSMPVAFQQKQPQVPIEFRGPGFQMHSIGSVSSSLPVKMAVPLGNAPHIQPMFVHGAQPHAFHQQSFIHHGQGFGCAPPSNCYLPQFGNMRNVQELSQQYPRSGDEHKRTIKITHPETHEELMLDRHGHSFINVPASGQMPLNNINQLPHSVQTFSPLQKVYYPRPGTYNSAHVYLPNSTDVPLASRQFSSKIQPSMHGFDSTNSNQPFTSIRPPMPISRLDATSGPLTNLHTASEISNFKGMFPSSLPAPVHVELKPPITLPAEMNSESTISNQQNYCKIGLEMSLEPVNLVYEGNNKDSVATCDISCNLIPQPVSTPQTQTRPTSVDHATPVVDPQTILTSSLPLESTTCCKSSVKAKPIEVEQSLVVPTTLSSHTKLESSHATTSVILTATSLVSKIDGTPPTNRNYRYYGNSILGKPPLIYAQEILPSKFVGSNTSPEGLGKAKVNPVLFQEKFPSELNGSVPLRKHDFMIEEHVPNEKGMCSESKTEQVDVTMPSTAFGLEDDTSVAKSGRFHAYHQPVDLHPSIYIGDIQTSDDSQQPSPDLEIITSQSENKQNNSRVDSARDVKNAAPISTSAISQGKTEQERIGLEISNPCSITAALVAQPKKVVLESTKAKSTNGRRKKRKETLPKGSGHKYYDLDSAHSSLNENVESFVTSEDVQCSLATDLKLNFTCEAAKDNSTGGNDCQNRSDLFSWENTTENSADKLKLFGGTHSKSGAEVNKDKSEFDHKRYSRDFLLTFAQSCIELPAGFMIGFDISEAVMSVHVGAPFIDNTQLNSNHARIKDRGSRGSRHMTGKFDDDKWRKQFFSTVSGRNLLSDNFYQPAFSNRDAVQHVGNGSVRSLSQSQPLSQYSGEVLSGAMKVVSRRSMSRGSVDERWQHRTNVQGISSPSQVSMPIMHKAEKKYEIGKGIDEEGSKQRQLKAILNKLTPQNFEKLFAQFKELNIDNVVTLTGVISQIFDKALMEPTFCEMYASFCFRLAGDLPNFVKDDEKITFKRLLLNKCQEEFERGEREQAEANKAEEEGGAKQSEGEREEKRIRARRRMLGNIRLIGELYKKKMLTERIMHECINKLLGEYQNPDEEDLEALCKLMSTIGEMIDHPRTKVHMDFYFGLIHKLSENVKLSSRIRFMLEDVIDLRKNKWRQRRKVEGPKKIEEVRRDAVKHKFGQSTRFGSSPNYNSSVTCISSGLRPGPPDARYQSSNRVLHVPLHQRRAHKSIRLGPQGDLGRGISICGKQHVSNDILPEVTLNSHHGQTSENSRDSSFTGVTSNPTGFKAGNTSWGMVDLSSPVPSTIGQTHTSSTVRKEMCAEAHTFPEEVLQEKSILTIKEFYSAKDEKEVALCMKELNAPGFYPSLVSLWITDSFERKDLERELLAKLLVYLCTAQEHLLSQRQLLQGFQHVLSTLEDAVTDAPKATKFLGQIFARVVLEDGISLTEVGGLLQEWDGREEPAGQHALEDSLASEVLGSMLESIRVERGDNAVDEIRAKSNLQRRGVCA

SEQ ID NO: 3616 - protein, 449 aa, Zea mays
  VARIANT 429..449: note = Derived polymorphism lacks residues 429 to 449
  VARIANT 400..449: note = Derived polymorphism lacks residues 400 to 449
  VARIANT 247..449: note = Derived polymorphism lacks residues 247 to 449
  VARIANT 238..449: note = Derived polymorphism lacks residues 238 to 449
  VARIANT 198..449: note = Ancestral polymorphism lacks residues 198 to 449
  VARIANT 182: note = Ancestral polymorphism is A, Derived polymorphism is T
  VARIANT 167: note = Ancestral polymorphism is T, Derived polymorphism is I
  VARIANT 161..449: note = Derived polymorphism lacks residues 161 to 449
  VARIANT 160: note = Ancestral polymorphism is H, Derived polymorphism is L
  VARIANT 97: note = Ancestral polymorphism is G, Derived polymorphism is R
  VARIANT 91: note = Ancestral polymorphism is S, Derived polymorphism is L
  VARIANT 63: note = Ancestral polymorphism is G, Derived polymorphism is V
  VARIANT 23: note = Ancestral polymorphism is S, Derived polymorphism is W
MASYVLNGSHLGATPNLRDSYTSRLFERYSSGFLLLPRSKIKVEDMDAYAPKDLLVVTTGSQGEPRAALNLASYGGSHTLKLSKEDVLLYSAKVIPGNETRVMKMMNRLTDLGPKIIMGKDSGLHTSGHAYREELEEVLRIVKPQHFLPVHGELLFLKEHESLGRSTGIRHTTYYLHCHNTAKLIFVSIGRVLRLLLQLQLMYSDGDKAFGTSTDLCIDERLRIASDGIIFVNMEIFRPQKEHGLAQTGLKGKFKITTRCLWLDNGRLLDALYKAAHAALLSCPMNCPLSHMERMVAEILRKMVRKYSEKRPDVIAVAMENTTASFSEHLDAKSSGNFEPSSATSHLSRSPAMSLEGSYKTHPDNPEVDAEGQWKFAHVTFSKPEYLQDLDIVMNRFHKQRPVYGGWEQHLGLEHTTTTPKRSYLGNNQDMKAALFQKQSFGDVHRAFA

SEQ ID NO: 3617 - protein, 206 aa, Zea mays
  VARIANT 12: note = Ancestral polymorphism is R, Derived polymorphism is Q
  VARIANT 26: note = Ancestral polymorphism is A, Derived polymorphism is T
  VARIANT 28: note = Ancestral polymorphism is A, Derived polymorphism is E
  VARIANT 32: note = Ancestral polymorphism is T, Derived polymorphism is I
  VARIANT 34: note = Ancestral polymorphism is R, Derived polymorphism is C
  VARIANT 71: note = Ancestral polymorphism is R, Derived polymorphism is H
  VARIANT 72..206: note = Derived polymorphism lacks residues 72 to 206
  VARIANT 105..206: note = Derived polymorphism lacks residues 105 to 206
MASPSPARASGRRVPPPCWTTDETLALARAYTARRLAVGREHLTSADWAAVAAAAPSKTARQCRHKVEKLRRRLRSNRRRPCPLLDAIDLLDVPSPPFFSKSQSRSTSRSSSPPPPAAAISSPSPPSPPASPPRKRRRDDAGDEDGVSDVVGALRAIGEGFLRAEERRMEAARETQRMRMEMALRHLDAQRRLMDALVGRIVDALD

SEQ ID NO: 3618 - protein, 566 aa, Zea mays
  VARIANT 155..566: note = Derived polymorphism lacks residues 155 to 566
MALRDVLLSIAQTPHRLRRRALVTWTPTQELNEVRDRSGARMKRRLEWYDLVGLGVGGMLGAGVFVTTGRVARDTAGPAVFASYVVAGVSALLSSLCYAEFSVRVPVAGGAFSYLRVTFASYILSGEFVGFFGGANILMEYVLSNAAVARSFTDYLASTFGVTERNAWRIVVDGIADGYNELDVPAVALILLITVCLCYSTKESSMLNMVLTVFHLLFFAFIVAAGLWNGSARNLVRPHGLAPYGVRGVLDGAAVVYFSYIGYDSACTMAEEIRDPSRALPVGIAGSVLVVSGLYCLMSVALCVMLPYTEISEAAPFSSAFREKVGWRWASSVVGAGASIGIVASLMVAMLGQARYLCVIARARLVPLWFAKVHPSTGTPMNATIFLGFCTASLALFTELQIVFEMISIGTLLVFYLVANALIYHRYVKVGTNRPLHVLLFLLLLTLSSLGFSLSRKIDGWCQWGMTLFGAVSIAITTIFHCTARQDIAGPSLEWSVPLMPWPAAASVFLNVFLITTLKVRSYQRFGIWSLVTIVFYVCYGVHSTYSAEENEIVNAMIHHANLDIS

SEQ ID NO: 3619 - protein, 119 aa, Zea mays
  VARIANT 81: note = Ancestral polymorphism is G, Derived polymorphism is S
  VARIANT 33: note = Ancestral polymorphism is G, Derived polymorphism is D
  VARIANT 15: note = Ancestral polymorphism is E, Derived polymorphism is K
  VARIANT 10..119: note = Derived polymorphism lacks residues 10 to 119
MGAAAEAERRQQQGKAARDGRSFCRFTRPILHGLFTLGFAAHAIIKSFCNDEPTMVKSIFGRFLLHVYPGETLPTEMWLDSQKVHYQTKLVVGDACATNQTCSYHGCFGHMLGHLEIKE

SEQ ID NO: 3620 - protein, 348 aa, Zea mays
  VARIANT 225: note = Ancestral polymorphism is P, Derived polymorphism is L
  VARIANT 205..348: note = Derived polymorphism lacks residues 205 to 348
  VARIANT 172: note = Ancestral polymorphism is C, Derived polymorphism is R
  VARIANT 112..348: note = Ancestral polymorphism lacks residues 112 to 348
  VARIANT 101: note = Ancestral polymorphism is Y, Derived polymorphism is N
MEQNAGSFLAVRRLSGGAIHHHRHHSSPAEVVGVSTAWLGKGLSCVCAQRRESDVRLSFDLSPIQEECLNRLQNRIEVQYDGSNLEHQSMCFHLLLLSSIYFGLFTVTYIHQKALEALWRSSFPGTELLGLVSDQWKEMGWQGKDPSTDFRSFIPSSFQHLQFSIHLIYFGRVIIFSLEHTGAVVLYLWRIYCISLGTIHSNLKGYKGLIVYVRLGFFTETFSIPLVKSFQELLRKQNGDRALWEYPFAVAGVNITFMLIQMLDLQAAKPTSLVGAVFLNLLLENDRAFDILYCITFKLMDQKWLEMHASYMDFNTVIKSTRRQLERELLLEDIQRIEDMPSYRFLAC

SEQ ID NO: 3621 - protein, 469 aa, Zea mays
  VARIANT 408: note = Ancestral polymorphism is W, Derived polymorphism is C
  VARIANT 76..469: note = Derived polymorphism lacks residues 76 to 469
MQPSCLGACSGGGLALSARRLRAPSYCRVAPHRASASCSAGGGGKASPRGKDNVWSVDNDRAAKEAVRGPKHRRRKRPSGRRLPPPRRKGMDAGSRVLVSGAMLVEVETVLQTQEPVIKPSWDTFASSLTGNWKGVGAIFSPITAEMEPVGVGNKEEYLYDCYTLSHIERSFDGGHGSEIRRKTNWVPINPFGEAEKQITSYDGGSQSTSSGKGIADLPSYESFDLNRSAVLDEETFSMEPGIVFFEDGSYSRGPVDIAIGEYDESKYFLSPTYKFEQCLVKGCHKRLRIVHTIEFNEGGANIQIVRVAVYEEKWASPANIHVEDDTLVDLKPFSQRSRTKPSELTGSWKVYEVSATPIFSDKVQELEGGSPLVYLCMETVKKRNLPESSVFFGEEEMLDVQDVTVLWLPGGVTAYVDISEDGILCIGVGWYSEEGINLVMERDYGTDGRLREVRSKTEVKRRWYQSVP

SEQ ID NO: 3622 - protein, 225 aa, Zea mays
  VARIANT 20: note = Ancestral polymorphism is W, Derived polymorphism is L
MVKRWLPLEANPDVMNQFMWGLGVPEDVGFCDVYGLDDELLAMVPQPVLAVLLLYPQDRSKESQASATSSVETKEPSKNVYFTKQTVGNACGTVGIIHALGNATSRIKLGEGSYFDRFYKRTADMDPIQRAAFLEEDEEMENAHSIAATAGDTEAKDGVIEHYICFSCVDGELYELDGGTSQPIPHGPSTPDTLLQDAAEVIKARIAMYSQSNNFNVMALSGKAI

SEQ ID NO: 3623 - protein, 253 aa, Zea mays
  VARIANT 15: note = Ancestral polymorphism is D, Derived polymorphism is N
  VARIANT 126: note = Ancestral polymorphism is P, Derived polymorphism is L
MALAVNYYPQCPEPDLTYDLPKYTDPNALTILLQDPNVAGLQVLKGSGGGEDQWIAVSPRPNALVINLGDQLQVTRAEQRRVQERLARAVVNDAQERMSVASFLCPCNSAVISPAAALVVRDGDAPVYRSYTYDEYYNKFWSRTEPGRPGALPGAFHKHPARPVNAALSNGAYKSVWHRAVVNDAQERMSVASFLCPCNSAVISPAVALVVRDGDAPVYRSYTYDEYYNKFWSRSLDDQEHCLDLFRSTQPGQ

SEQ ID NO: 3624 - protein, 404 aa, Zea mays
  VARIANT 133: note = Ancestral polymorphism is G, Derived polymorphism is D
MEFASSSSRFSKEEEEQEEEEDEEVSPREIPFMTAAATAGTGATSSSPSPSAAASASASSSAAALRSSGGGGGGDDDMEVVEKEHMFDKVVTPSDVGKLNRLVIPKQHAEKYFPLDAAANEKGLLLSFEDRAGKLWRFRYSYWNSSQSYVMTKGWSRFVKEKRLDAGDTVSFCRGAADAARDRLFIDWRKRSADSSRHPHRMLPRLPLHMPPLASPYGYGPWGGGAGGFFVPPATLYEHHRFRQALDFRNVSAAAAPARQLLFFGSAGMPPRASIPQQQQPPPPSLHSIMMVQPSPEATAGLPMLLDSVPLVNSPTAAAKRVRLFGVNLDNPQPGSSAESSHDTNALSLRMPGWQRPGPLRFFESTPQRGAAGAAAGAESSAASSPSSPSSSKREAHSSVDLDL

SEQ ID NO: 3625 - protein, 515 aa, Zea mays
  VARIANT 176: note = Ancestral polymorphism is C, Derived polymorphism is Y
  VARIANT 382..515: note = Derived polymorphism lacks residues 382 to 515
  VARIANT 409: note = Ancestral polymorphism is P, Derived polymorphism is S
MASPPHSVEVRTPGDSPRPTTALLSPSVAAPQPSTASRLLLLLTAVVAVATAFVLLRPPITVVTAASATAHPLSKPVVLLTPCHPRRFKVFCSPPVLLALYSLIEIRVLGIYTALQGRTGTCSTPCSTPPPSCFPTEVANSSCARSTLLSMEGRGPAVPRCGNLILGDSSDPQISCLLVKKVKRMREYTSFVDWLRARGPPSCGKTTLHIPLLMRLLIALDMGALIAGAKYRGEFEDRPKAVLKELQMPWLQKAKLLLQELKTVKTDLSFAKERYAQLEEENKMSCESYDKGDNPEANDQAILDHPIRRSENDPHDGKRKCEALWPIICISHQRSHFIYGLYYRRKEISQELYEFLDSGYADFSRVSKPRTPKRHQLKDLSWRSKDLVSTTLHFSYLKLVEEPQGLVVPRVIRIPVVFLHFQENPFILDTYFQTTSMDRRSWRHLEWHYVEEEEMVTGELYNPSVGVRVGGGGKNAVEEAPPRNDVERIHIGSENSSEDDEYRVHVGLNKSRVQT

SEQ ID NO: 3626 - protein, 124 aa, Zea mays
  VARIANT 25: note = Ancestral polymorphism is L, Derived polymorphism is F
  VARIANT 19: note = Ancestral polymorphism is D, Derived polymorphism is N
  VARIANT 18: note = Ancestral polymorphism is D, Derived polymorphism is N
  VARIANT 5: note = Ancestral polymorphism is L, Derived polymorphism is M
MLDALLSGNEGTRAKLSDDQIIDLLITLIYSGLSELLSSLRLEFLADVDDGNADSSACFTGLGGASAGCARRRRRRRDWILPSRQPDRTTVYKNRALRTPFVKLGHNSTLRIEIDDHVVQDNKW

SEQ ID NO: 3627 - protein, 204 aa, Zea mays
  VARIANT 173: note = Ancestral polymorphism is A, Derived polymorphism is T
  VARIANT 57: note = Ancestral polymorphism is E, Derived polymorphism is Q
  VARIANT 46..204: note = Derived polymorphism lacks residues 46 to 204
MESPHLRPTPSCAVSATSSLLPDLVYGSPPTRRAAVLKSVGSIYAQDHIIAERKRRQKINQRFIELSTVIPGLKKELQEKLKALEDGGSGSNDRSIESWVLVKKPCSVVPGDDAGSPSWDSSGASPATNQLPEIEARFLNKNVMVRIHCEDGKGVVVRVLAELEELPLSIVHANVMSFQACTLIITIMAKASFFSFSAIIPAVI

SEQ ID NO: 3628 - protein, 1763 aa, Zea mays
  VARIANT 53..1763: note = Derived polymorphism lacks residues 53 to 1763
  VARIANT 86..1763: note = Derived polymorphism lacks residues 86 to 1763
MSDGGDDVLYRRMQAVASYWNRKKSSFGLGHLERKVFSWSVPDIFNRDLLRHQVKRIPDIFESFASYLNSFAYPFIEEVHADLFSSLDGYVHASFIEVIQVARLDEERPIFGLDVAEPVKDGKTKTISTILWAMLIKGRKTLACAPTNTAVLEVAARIVNLVGKPSDSSVCFLNDIVLFGSKKRMKIDNGNPLSAIFLESRAKRLLPCFMPSTGWIHCLCSLIDLLENSSTKYQLYIEAKGIIQQKRPTNTKQGRSRPITLPVSSPSEDRIIDKVKQYIIPFLHWFCKTEMTPTNVSSSAPATKDIYEGTSWQVCNKDFSCGQNDKYSEYKDNDCGNEECYKSGEAEEAVIVPSFKDYLRDEYKKLSGNLYDCIKILYNDHPRNPETGRSFQCMMEVLELIKILYALINSDVDDGDICSEELLASKVEDEWDPETWPEKLATVKTNSCNKLKFSLARSMFVQELRYLCTNLVLPNCYCARSVEQYLLARAKCILCTVSSSFRLYNVPMRYSSSGLCGLPTKPENISLELLIVDEAAQVKECETLIPLQLPGIKQAILIGDEYQLPALVKSKISDSAKFGRSVFERLSSLGYSKHLLNVQYRMHPEISKFPVSKFYGGKISDGPNVTHKNYGKRFLAGKWFGPYSFINVDCGHETTEKNARSLKNTIEVVVVARMVQRLYNETVSTRTKLSVGVVSPYNAQVRAIQEELKKTYRSYDGFSVKVKSVDGFQGAEEDIIIISTVRSNGAGSVGFLSNLQRANVALTRAKHCLWIVGNGTTLLSSNSIWQKIINDVQNRGCFFDVRDDRDLSNKVMKATIELDAAENLVKMESLHISRPKFQVKQIPSTFPNLKSYLECYTSPLLEELRAEMSSSLESLSTVPSVRISRIEEKRDKHEIYLASDCQVAKPHNRPECYTPSVGDVILLSDVKPGHISDTTRNGRPYRVAFVTDADGGDEYDDSPPAKYGIVASGKIDAADDERQDGKSTSLFAACLLNIVTYIRIWRCLDYEALRTNRGLIEKMVNYQPISSTSENSTEDAGPTDSVEIWTKLSAMELNTSQNDAVLNCISKMHSKSSTFTLIWGPPGTGKTKTISVLLWLMREMKHGTLVCAPTNLAIKQVASRFLKLVQEHSGDTRCLGDVLLIGNKERMCVDGDLKQIYLYDRVRRLFGCFAPLTGWKHHLSSLSDFLENGYSQYLQHLQDSQEGDTPSFFSYARKRFAVIYMELRRCFNDLLLHVPKSSILEVNYNSILLLLEMLEEFNHMIQCRYFGDEIRKVFLYSNDEPDQTNSSVVTLGKMRIKCLEELSTLLSCLKLPLTSSKPTIRDFCIKSASIVFCTVSSSTKITANKKVEFLVVDEAAQLKECETLIPLRLWTLKHAVLIGDECQLPATVKSKVCTDALFGRSLFERLSSLGHEKHLLNMQYRMHPSISIFPNTSFYEGRISDATNVMEKEHRRMYLPGSMFGPYSFINIEDGREERDELGHSKRNFVEAAVIEEILYRLRRGTCSVFTTCFKTKRKVTVGVICPYNAQVVAIQGKIEKMRFDPLQVKTNSVDGFQGGEEDIIILSTVRSNSVGKVGFLSNAQRANVCLTRARHCLWILGNATTLASSGSIWSDLVRDAKDRRCFFNASSDYVISHVIAKQRRDLDRVNVEKSIHISSSKNCRVWVETRSPNDLNEQGTSSTSVSHYAGIPSSDIVVVSEFQRPSNKNEDVEDITVIPNKENDKDINAMPVIPDKGNVVDGNHILAIPCAMLSNLARWCIRSFRS

SEQ ID NO: 3629 - protein, 164 aa, Zea mays
  VARIANT 61: note = Ancestral polymorphism is P, Derived polymorphism is R
  VARIANT 3: note = Ancestral polymorphism is A, Derived polymorphism is T
MEAYVLFARAKEQEEDIGCPSESSAARSTSSSSDGVDLADDASSSGSTCHFEMASLMTHLPIKRGLSKFFAGKSQSFASLAAVGGIDDLPKPPAKRLKTSWSCGVGLEDARRGPPSVTTANKQASSRARLTPSALGSTPRRLVRARPLVTARPEAAAGKPLLFA

SEQ ID NO: 3630 - protein, 260 aa, Zea mays
  VARIANT 16: note = Ancestral polymorphism is T, Derived polymorphism is M
MAPPLLLFFLLLPLLTALADGHQHLSSYGSSALSDWRPAKASYYAADPEDAIGGACGFGDLGKHGYGMATVGLSTALFERGAACGGCYEVKCVEDLKYCLPGTSIVVTATNFCAPNYGLPADAGGHCNPPNHHFLLPIQSFEKIALWKAGIMPIQYRRVKCLREGGVRFSVNGRHFFFTVLISNVGGAGDVRSVKIKGTELGWLPMGRNWGQVWHINCDMRGQPLSFELSSSDSKTLTSFNVVPKDWEFGKTYTGKQFLL

SEQ ID NO: 3631 - protein, 150 aa, Zea mays
  VARIANT 69: note = Ancestral polymorphism is R, Derived polymorphism is S
  VARIANT 72: note = Ancestral polymorphism is V, Derived polymorphism is A
  VARIANT 85: note = Ancestral polymorphism is R, Derived polymorphism is Q
  VARIANT 87: note = Ancestral polymorphism is A, Derived polymorphism is V
  VARIANT 112: note = Ancestral polymorphism is A, Derived polymorphism is T
  VARIANT 114: note = Ancestral polymorphism is L, Derived polymorphism is R
MASAPAGFAPTVAASTSFGFSRFTIVACPFPSRTHLPAASSVGVRNQQRASTATACLPPPNTSHGAATRLYVSGLSFRTTERSLRDAFEKFGDLTEVCLVMDRVAKRPRGFAFLSYTGEEEARGAMEGMHGKFLDGRVIFVEVAKRRAEA

SEQ ID NO: 3632 - protein, 539 aa, Zea mays
  VARIANT 154: note = Ancestral polymorphism is P, Derived polymorphism is S
MEALLSAAVGEVFSRCLSFLINKYTTSPAAGLSEQESLQRLERALLRVAITVEEADGRFVTNTGMLQQLKELRKAMYRGYYVLDRFKYLDGDEAATAAKANAHPGKRRRFPPSAAATVTTSTQGNREELELTLDCVQNMAADMHECVAFVRSYPPMFRQPYSMHLVLERCMFGRHAEMERTIRFLLQREPPPAVGVLPIIGRGRVGKSTLVEHVCHDVRVRQHFSRIVLFGAEESVEESPGGGTKEKKGMDDGGVIRYENSGQKDGKLLVVIELDRDVEEGAWRRQLSAATRRCRLPGGSKIIVTSRSERAANFGTTEAIRLDFFPREACWYFFKVLLFGSACAEDQPKLASIAMEIFEEYYGQDALFGGFTGSHANSKNIAALLKANASAQHWRRVLACVRWNGEENLVPCSNGGRPNNSSSRSRPAGNNGHYNLCTISNMHQYVRVDRHRVARSSRHEEVPKVTVDEVMYGRITPKGKFEAVLWTSHLPPYYSYIANCEILDSRGPGCSESSEADWLVSASVCGFFLLFCVGSVETI

SEQ ID NO: 3633 - protein, 366 aa, Zea mays
  VARIANT 148..366: note = Derived polymorphism lacks residues 148 to 366
MAIAAVPASLPFVLLPPRLFRGRAVRWPRPIRASASTNAGDVAGGERKFGALVSRVGDLRALVASVPPAVASMQKNIGPNFVAGFCVSMAFVAAAARQISLRSREHVSKGSVADLVRRGQLKSGQRGMYVTISFKLHFVFSLMHCWAWEFNFQKLITCAKLRTYDDPFNNPLVKIDEGTSTAQMFGKEYRLAPVRLTKEQQEMHQNRRSRAYQWKRPTVFLREGDSLPPDVDPDTVRWIPANHPFSAASSEVDEETAKQNVYQKDGIPSRVKAEHEALQARLEASNDVTRLPSDPRSIQRNERPMRLSGKPSEHLQSSKFENQDRQLATESGKHSSESLMDVYNQTSRKGNKNCVLQLFEDICFVT

SEQ ID NO: 3634 - protein, 200 aa, Zea mays
  VARIANT 117: note = Ancestral polymorphism is I, Derived polymorphism is N
MHGATTTRKLMWGTSPAAAGSDRPDDHDVVIVLASLLCALIAVLGVGLVARCACGGRGPRAQQAAAAAAAAAANRGVKKSVLRRIPTVPYVAPAAAACGSSSRSEGDADAEAVECAICLAEFEEGEPTRVLPQCGHAFHAACVDEWLRGHSSCPSCRRLLSHQLPPGERCRRCGARPHDAGAAGPAWKPTYYSAMPPFLA

SEQ ID NO: 3635 - protein, 649 aa, Zea mays
  VARIANT 388..649: note = Derived polymorphism lacks residues 388 to 649
MATSPLPTATASASKKRRSRGGTLALDEVKKLGTELLSSRSHLNHAPALLALLSPTAPLDLALEALISLQSFFVPLIPSIPSASAAANAGDAGSDPELVFGAWLRQRFDELVAALVELSVSPHSDDAIRDVALDALMDFVKLGKDGKFHSAIYHKFLYAVVHAADPVDMLLELLVSKYFKYTDIRYFTYTSLDKIANSLGSKTTGSGKDALQNGSDESKNRSSIFIHNIYNLLAHVPLMDFQKESTFDMWSTVGVISVLTLDFWFCTSDEGLSSKGENDSSKDTSTYINKKLKLKFTKAWLSFLKLPLPLDVYKEVLASIHQNVIPSMSNPSILCDFLTRSYDIGGVISVMALSGLFILMTQHGLEYPKFYEKLYALLTPAVFMAKHRSVFLQLLDTCLKSSYLPAYLAAAFAKRLSRLALSVPPAGALIIIALIHNLLRRHPSVNFLVHWVCYLLHSSYSCIGCLGNLIDRKFLLLFHELSFVLWICFQEVDESDSNATREASQSKKIGSDPFNQNDADPAKSGAMRSSLWEIDTLRHHYSSAVSRFVVSLEEDLTVRAKTTEMKITDFSSGSYATVFRDEVRRRLKQVPLAFYRTTPTSLFLGSDFPGWTFGDQHNSTVETTVEGNGKVEAVGASDSTPSKRLRMET

SEQ ID NO: 3636 - protein, 265 aa, Zea mays
  VARIANT 7: note = Ancestral polymorphism is E, Derived polymorphism is K
  VARIANT 12..265: note = Derived polymorphism lacks residues 12 to 265
  VARIANT 19: note = Ancestral polymorphism is R, Derived polymorphism is Q
  VARIANT 24: note = Ancestral polymorphism is A, Derived polymorphism is V
  VARIANT 26: note = Ancestral polymorphism is P, Derived polymorphism is L
  VARIANT 29: note = Ancestral polymorphism is E, Derived polymorphism is K
  VARIANT 32..265: note = Derived polymorphism lacks residues 32 to 265
  VARIANT 61: note = Ancestral polymorphism is G, Derived polymorphism is D
  VARIANT 74: note = Ancestral polymorphism is G, Derived polymorphism is R
  VARIANT 86..265: note = Derived polymorphism lacks residues 86 to 265
  VARIANT 88: note = Ancestral polymorphism is S, Derived polymorphism is L
  VARIANT 95..265: note = Derived polymorphism lacks residues 95 to 265
  VARIANT 124: note = Ancestral polymorphism is A, Derived polymorphism is V
  VARIANT 132..265: note = Derived polymorphism lacks residues 132 to 265
  VARIANT 133: note = Ancestral polymorphism is I, Derived polymorphism is M
  VARIANT 155: note = Ancestral polymorphism is S, Derived polymorphism is N
  VARIANT 157..265: note = Derived polymorphism lacks residues 157 to 265
  VARIANT 167: note = Ancestral polymorphism is M, Derived polymorphism is T
  VARIANT 171..265: note = Derived polymorphism lacks residues 171 to 265
MALLDAEMVGFWAKLPLMRALLLAHPEVEFLWWMDSDTMFTDMAFELPWERYGPHNLIMHGWDEMVYDDKNWIGLNTGSFLLRNCQWSLDMLDTWAPMGPKGPVRIEAGKVLTKSLKDRPVFEADDQSAMVYILATQREKWGDKVYLENGYYLHSYWGILVDRYEETLENYKPGLGDHRWPLVTHFVGCKPCGKFGDYPVERCLKNMDRAFNFGDNQILQMYGFTHKSLASRRVKRIRNETSNPLETKDELGLLHPAFKAVKTST

SEQ ID NO: 3637 - protein, 275 aa, Zea mays
  VARIANT 159: note = Ancestral polymorphism is I, Derived polymorphism is N
MLAATTASLRPPIRSFPRVASHPGASHGGACGANPLLTRRRRRALVCRADLQQDAPFAAAIGACVLASLVLPPPRSRGEAGDEVEDEGEFGATDTRMAVMGIISFLPYFNWLSWIFAWLDSGRRRYLVYAAVYLAPYLRWFVTLNPYRPISVAFVMLWIKLTYHCHLMRAGYLSLASLSAFYIFRSVDELEASIRSGDIESFKFIQRAWNLVFPRAAKEKDAHHGNKRDSIGMGDRHNRRIPTAHESRERLRNSDIFKRKLDDPNDEKQKKSDWN

SEQ ID NO: 3638 - protein, 160 aa, Zea mays
  VARIANT 128: note = Ancestral polymorphism is T, Derived polymorphism is A
  VARIANT 52: note = Ancestral polymorphism is D, Derived polymorphism is Y
MDVGLGGAGSSGRGGGGGRSGSGGGRDSPFALGGGGASAAAWTRLVSSGVEDELVAASGGRGGGGGRAGARAGGLPQGHFLDACFLCRKPLPSNRDIFMYRGDIPFCTEECRTEQIEMDEEMERKESTQKKKLAPRAPSPKDVESAPRPPKARAGSILAG

SEQ ID NO: 3639 - protein, 96 aa, Zea mays
  VARIANT 72: note = Ancestral polymorphism is A, Derived polymorphism is T
MASAFFFDAEPDCEPSLLPTLDACALCAKPLGRDCDIFMYRGDTPFCSEECRDEQMQLDAIRARQQAARSAARRQQQHSSRTESRHQESMKVSVAT

SEQ ID NO: 3640 - protein, 104 aa, Zea mays
  VARIANT 34: note = Ancestral polymorphism is A, Derived polymorphism is T
MATSVACAFFFFDAAEPLGEGGRRRQRQALDACALCSKPLARNSDIFMYRGDTPFCSEDCRYEQMHHDAAATAYARHQASSRRRQQRSRGGSVSANEADVYVAS

SEQ ID NO: 3641 - protein, 490 aa, Zea mays
  VARIANT 111: note = Ancestral polymorphism is T, Derived polymorphism is I
MDIMQTSDSSHHGIVENSPYRIPYDRHAEGGQLGASWYFSRKEIEENSLSRRDGIDLKKESYLRKSYCTFLQDLGMRLKVPQVTIATAIVFCHRFFLRQSHAKNDRRTIATVCMFLAGKVEETPRPLKDVILLSYEIIHKKDPAAVQRIKQKEVYEQQKELILLGERVVLVTLGFDLNVNHPYKPLVEAIKIFKVAQNALAQVAWNFVNDGVYRLRTSLCLQFKPHHIAAGAIFLAAKFLKVKLPSDGEKVWWQEFDVTPWQLEEVSNQMLELYEQNRVQPPPSQGNDTEGSSASVANQRVPGKVPGVADEPPAHDHNQAPRPSSQQNMLDHRGYDHPHPDKQNYRIPPNDARDGTANSNEGPNVSSSMMDAMKKVNKDKVKAALEKRRKSKGDFSRKVDVMDDDDLIERELEHGVELAAEDEKVKQERKQSWPHLAHHQSTNRENTEEGELSMDSQEYRSPEHDNRKRKDVREYRNYDRDERDLKRLRS

SEQ ID NO: 3642 - protein, 92 aa, Zea mays
  VARIANT 13: note = Ancestral polymorphism is D, Derived polymorphism is G
MAARSSSMVAEDDYETDQKKQAAADVLFHYSQFVMVCIGEDVRPTDLRLHLMKEVSGMSTSLKEPQQAAASPASSGEPSSSGTMKGDKNEIS

SEQ ID NO: 3643 - protein, 397 aa, Zea mays
  VARIANT 219: note = Ancestral polymorphism is D, Derived polymorphism is Y
MPSPFVRHNGKPTTREQVQAPLPIHSSFMIPACLRGLCTCFDVDDDKANNHEQEPTMAADDDQTASTIIAHRTVELSTGVRLHVAEAGAAAAAGAPAVLLLHGFPELWYTWRHQMRALAAAGYRAVAPDLRGYGGSDAPPARGDDDDDDPAAQYTALHVVGDLVALLDALGESQVFVAAHDWGALVAWSLCLFRPDRVRALVALSVAYTPRSAARKPVDGLRALFGDDYYICRIQEPGEIEAEFARLGTELVLKKFFSYRSPGALFFPKSGWGSPDDEVPLPSWVTEEDLKYYTSMFEKTGFTGGLNYYRALNKTWELTSPWTLAKINVPVKFIIGDLDLTYHNPGIQDFIHKGGFKKFVPLLDDDIIVMKDVGHFINEEKPNEVSEHIINFIKKFG

SEQ ID NO: 3644 - protein, 194 aa, Zea mays
  VARIANT 82: note = Ancestral polymorphism is E, Derived polymorphism is K
MAPTTSSTEHAHVKHITLHQFLKQQQLQQHRMKPAVMWGWPATAAAIGRHVPDDVADDDDDGDGLGGAWPPRSYTCAFCRREFKSAQALGGHMNVHRRDRAKMRGGHQHGSAAAQLGGAASSPATDETPHAAKYAVLYPILNSSAAGAVLIPSGDVLLSAGPLALAPAHDRCHVIDDEVEGDKDVDLELRLWWP

SEQ ID NO: 3645 - protein, 310 aa, Zea mays
  VARIANT 163: note = Ancestral polymorphism is V, Derived polymorphism is G
MAGLDLGTAATRYVHQLHHLHPDLQLQHNYAKQPEPSEDDPNGSGGGNSNNGGPYGDHDGGSSSSGPAGDGHGGSGGNGEMVARRPRGRPAGSKNKPKPPVIITRESANTLRAHILEVASGCDVFESVSTYARRRQRGVCVLSGSGEVTNVTLRQPSAPTGAVVTLHGRFEILSLSGSFLPPPAPPGATSLTIFLAGGQGQVVGGNVVGALYAAGPVIVIAASFANVAYERLPLEEEEAAQQAAPPGLQMQPPSGGVDGAGGMGGGPFPPDPSAAGLPFFNLPLNNMTGGGSQIPPGADGHGWAGARPPF

SEQ ID NO: 3646 - protein, 491 aa, Zea mays
  VARIANT 4..491: note = Derived polymorphism lacks residues 4 to 491
  VARIANT 40..491: note = Derived polymorphism lacks residues 40 to 491
  VARIANT 253..491: note = Derived polymorphism lacks residues 253 to 491
MPAQKLLISSPTPDDSDGRVAVRHAAATRQRVSELGSRDGASREMDGKSVRQERSSHREPRDGVSQIATTSRWVAAADETEPTPTSSRSYHPMRAGTMDEFMLVKLAEIRKEVQCPICLGIIRKTRTVMECLHRFCRDCIDKSMRLGNNECPACRTHCASRRSLRDDPNYDALIAALYPDIDKYEEEEFAFSEQERIRNKKVTSSALEIPELYLYIQNSFLYILVPYLTMNMNTPLFYSLKIQETIEETFRRQSDAIGKKRSMAKATATAFARKYRRTRGRVRTIPPDIAPTGSSEEESGEGNSKETIREQSSADDHSPDLRQKRCRKRSGPQGSPAGTIGSIDYSFEENDELVGGKEILATSPLQGEMLAWGKNGARSQNRHGSVGSNGRTGRSGRIAKLVDYLHTADEMDKEFVALQLSCEVEELEMYIRMDRHRVSVGSRPSSTGEAKSRPFDDLERLNEEKLVSELHPSFVSSNGDMELRYALRTRE

SEQ ID NO: 3647 - protein, 409 aa, Zea mays
  VARIANT 323: note = Ancestral polymorphism is A, Derived polymorphism is V
  VARIANT 240: note = Ancestral polymorphism is L, Derived polymorphism is V
  VARIANT 216: note = Ancestral polymorphism is A, Derived polymorphism is D
MAMEEPPQLFLCPISMELMEDPVTVSTGVTYDRRSIERWFFKYGKTTCPATMQRLNSFGLTPNHTLKRVISTWLDRASSSSSSTPLRNNLAREKLPSLLASIEATPFKVTALKNLRCCMDGDVAAQEDFVAYGGIQMLGRVMTQALAESCAGGDFSAFRTCEEAGAVLATLPLSDDASVELVLKPECMKPVVAVVQRGSAESRLHAMAILAKISSASGADRDWTPGVDVEDLVKSLLELLSDGASAKLSSRALDVLLDVMARSRGARRAKAVEVGAVCVLVELLPDASRRVAERALLLLKRMCKCPEGRLAFADHALAVSAVARTMLRVSGLASRLAVSVLWLVACAVTPAERVLDDMLMSGGVAKLLALLQVENSASTKEKAAKLLRMHGAFWRQYPCFPTGATPRGC

SEQ ID NO: 3648 - protein, 1336 aa, Zea mays
  VARIANT 880..1336: note = Derived polymorphism lacks residues 880 to 1336
  VARIANT 747..1336: note = Derived polymorphism lacks residues 747 to 1336
  VARIANT 685..1336: note = Derived polymorphism lacks residues 685 to 1336
  VARIANT 99..1336: note = Derived polymorphism lacks residues 99 to 1336
MEEWQEIYSPCFWMGTFALIELIFIMSILAQFLFRKFRCWIQRLKGAAPESNKQHQEHKIIAIKLGISYKACIACCLLILGSHVLRAVFLQLHERISDCKYPPFILCEGLQVLSWIILSLLVFSFQKTNSAKLPMVIRSWWIFNFLQSATTVVIDLRSILATHGDIGFKEWIDMFMLVVCIYLFAISAGGKTGITFTDSSVTEPLLNPSVGQQAEAKRTCPYGKANILELVTFSWMNPVFSIGYKKPLEKNAVPDVDGKDAAEFLSDSFKNVIDDVEHSYGLSTSSIYRAMFIFIRRKAIINAGFAVLSASASYVGPSLINDLVKFLGGQRQYGLKRGYILAVAFLSAKVVETISQRQWIFGARQLGMRLRAALISHIYQKGLHLSCSSRQKHTSGEIINYMSVDIQRITDVIWYINYIWMLPIQLSLAVYILHTNLGVGAWAGLAATLAIMACNIPLTKMQKRLQAKIMVAKDNRMKATTEVLRSMKILKLQAWDMKYLHKLKTLRGEEYNWLWRSVRLSALTTFIFWGSPAFISSITFGSWILLGVPLTAGTVLSALATFRMLQDLIFTLPDLLSVFAQGKVSADRVAKYLEEEELKCDAVTQVPRNDTDFDVKIDHGIFSWELETTSPTLTDVELKVKRGMKVAICGMVGSGKSSLLSCILGEMPKLDGTVRVSGRKAYVPQTAWILSGNIRENILFGNTHDEEKYKKIIQSCALTKDLELFANGDLTEIGERGINMSGGQKQRIQIARSVYEDADIYLFDDPFSAVDAHTGSQLFKDCVMGILKDKTVLYVTHQVEFLPAADLILVMQDGKIVQKGKFNELLQQNIGFEAIAGAHSQALESVINVECSSRIPPDNKKSADSEDEFDTENEIDDQLQGITKQESTHDVSQDISDKGRLTQEEEREKGGIGKKVYWTYLRAVHGGALVPVTIAAQSFFQIFQVASNYWMAWASPPTTATTPTVGLGLLFSVYIALSMGSALCVLSRSLLVSLIGLLTSEKFFKDMLHCILHAPMSFFDSTPTGRILNRASNDQSVLDLEIANKLGWCVFSIIQILGTIGVMSQVAWPVFAIFVPVTVVCFLCQAKHSIQLCLCLFFDSASIAGLAVTYALNLNSQLASIIWNICNTENKMISVERIMQYSRIPTEAPIIVNHYRPPNSWPDAGTIHISSLEVRYVEHLPSILRNISCTIPGRKKVGIVGRTGSGKSTFIQALFRIVEPRGGTIEIDNVDILKIGLHDLRGRLSIIPQDPTMFEGTVRGNLDPLNEYPDHRVWEILDKCQLGDIVRRNPKKLDSIGRVIEYDTPTKLLENETSEFSKLIKEYSGQSHGFSGTTNN

SEQ ID NO: 3649 - protein, 39 aa, Zea mays
  VARIANT 30: note = Ancestral polymorphism is A, Derived polymorphism is V
  VARIANT 26: note = Ancestral polymorphism is V, Derived polymorphism is M
  VARIANT 6: note = Ancestral polymorphism is P, Derived polymorphism is S
MMITLPVPCANLGTDASPSGTTLAGVAAAAAAAWLSSRL

SEQ ID NO: 3650 - protein, 336 aa, Zea mays
  VARIANT 154: note = Ancestral polymorphism is R, Derived polymorphism is L
  VARIANT 256: note = Ancestral polymorphism is L, Derived polymorphism is V
  VARIANT 277: note = Ancestral polymorphism is A, Derived polymorphism is D
  VARIANT 280: note = Ancestral polymorphism is D, Derived polymorphism is Y
  VARIANT 323: note = Ancestral polymorphism is L, Derived polymorphism is P
MTLEALCPTSSDVLVYDTFNAAAACAAASAGTFLFGNAPPVEVPAAAAAQANGENSVQQGRRKRRRRQRSTKNAEDAESQRMTHIAVERNRRRQMNEYLAALRSLMPDSYVHRSDQASVVSGAIDFVKELEQQLQSLEAQKLALKRQLQQQQQRSVTAAIRDDAAQPARGRDDIGAGAGGDAAARSEVSAPEPDPPPFARFFRYPQYARRHAAAREDAGAEETSRASAVADVEVGVVVDAHASLRVMAPRRPGQLLRMVAGMQALGLAVLHLNVATAAVDATALYTLSLKVEEGCALATAEEIAAAVHHVLCIIDAEATPQRLLAAGAPGTGQPDV

SEQ ID NO: 3651 - protein, 253 aa, Zea mays
  VARIANT 180: note = Ancestral polymorphism is K, Derived polymorphism is N
  VARIANT 34: note = Ancestral polymorphism is P, Derived polymorphism is L
MAIDDESPIRVNSRGGGAMGGGECDGAENQRWPPWLKPLLGTSFFGQCKLHADAHKSECNMYCLACMNGALCSQCLAYHRDHHAIQIRRSSYHDVIRVSEIQKVLDISGVQTYIINSARVVFLNERPQQRPGKGVTNTCEVCQRSLLDTFRFCSLGCKIVGTSGDLRIRKKQAVVKKHQKKKKQQAQQHRGAALDSEDDSSSTSTSRGSDRSSVVQSFTPSTPPATANSFRTGKRRKGVPHRSPFGSLMVEEF

SEQ ID NO: 3652 - protein, 606 aa, Zea mays
  VARIANT 541: note = Ancestral polymorphism is N, Derived polymorphism is I
  VARIANT 532: note = Ancestral polymorphism is R, Derived polymorphism is L
  VARIANT 531: note = Ancestral polymorphism is D, Derived polymorphism is V
  VARIANT 401: note = Ancestral polymorphism is R, Derived polymorphism is L
  VARIANT 328..606: note = Derived polymorphism lacks residues 328 to 606
MAASSRSRPLSKLSPSHLVPLDLSTSWCCTPHGLGGHAPHSSSSSSSSHPSSPARAAAHHMDPPPTSSTVASSYATPPQPSYAPSYPTSYTKFNSALNAGLLNPMSPPPLPLDKTRSSPTLFDMMANEQDYHPRTAAGIHSIPAPPQPHQLPPARSMDRQMLLQDRIADLIGSCSPGNQFNDADSSDVRLTLSSKDGLSVTLCVHRHILVAHSRFFAAKLSDRWSKQQRTLPHIVEISDCDDVEVYAETLRLMYCKDLRRRLMREDVNKVLGILKVSAAIVFDAGVLSCLEYLEAAPWAEDDDEKVATLLTQLHLENSGAGEVLKRVSLELAPSALVEEADEGGSCNGGNSSGGEEVLLRLLQVVLEGKDEKARREMKGLVSKMLRENSTSRGGAIGGDLRKESLYSACNGCLSLLCEQFVRASEGDHSEVARIARQADNLHWMLDILVERQIAEDFLRTWATQTELAAMHRKVPAIHRYEVSRVTARLFVGVGKGQILVSKEARCQLLSTWLEPFYEDFGWMRRACKGLDRHLIEDGLANTILTLPLATQQEILLAWFNRFLNSGEDCPNIQRGFEVWWRRAFWKRNSEPEPPSRLRITAICENS

SEQ ID NO: 3653 - protein, 187 aa, Zea mays
  VARIANT 19: note = Ancestral polymorphism is L, Derived polymorphism is M
MGFPAGYSELVLPKQLLHLLLLLGYVRRFLLWAFDAVGLGDLLDLGDDHQAPQPQPQHRRAEFRAAMPAMVIEEALPVARFDELEARVVVGGDCAVCLGGIGGGDEVRRLGNCRHAFHRACLDRWMEHDQRTCPLCRAPLIPGAALWPADASDLDFSYPGAPLTPVVPSPTLLRPHELLLLAGLGGY

SEQ ID NO: 3654 - protein, 513 aa, Zea mays
  VARIANT 315: note = Ancestral polymorphism is F, Derived polymorphism is C
MMKGGGGKETLTASFLRFLLLLLLPLTAFYFLYTLQLLLTSASSAASNCVPDAVSVSRVSANLTAAEKQLPPPAAAVSTATTLQHVVFGIAASSRFWDKRKEYIKVWWRPRGAMRGYVWLDRKVRESNMSTARTGLPDIRISSDTSAFPYTHRRGHRSAIRISRIVSETFRLDLPGVRWFVMGDDDTVFFPDNLLTVLNKFDHRQHYYIGSLSESHLQNIYFSYGMAYGGGGFAISRPLAEALARMQDGCLRRYPALYGSDDRIQACMAELGVPLTKHPGFHQYDVYGDLLGLLASHPVAPIVTLHHLDVVKPLFPEVRSRAAAVRRLFDGPVKLDTAGLMQQSICYDGANRWTVSVAWGFTVLVARGIMSPREMEMPARTFLNWYRRADYTAYAFNTRPLARSPCQKPAVYYLSSARRAALRGGVTTETRYDRWRHPNETRPACRWDITDPDAHLDHIVVLKKPDPGLWDRSPRRNCCRVVSSPKDGKNGEKTMTIDVGVCREGEFSQVAGA

SEQ ID NO: 3655 - protein, 299 aa, Zea mays
  VARIANT 279..299: note = Derived polymorphism lacks residues 279 to 299
  VARIANT 219: note = Ancestral polymorphism is Q, Derived polymorphism is K
  VARIANT 213..299: note = Derived polymorphism lacks residues 213 to 299
  VARIANT 113..299: note = Derived polymorphism lacks residues 113 to 299
  VARIANT 48: note = Ancestral polymorphism is S, Derived polymorphism is I
  VARIANT 11: note = Ancestral polymorphism is C, Derived polymorphism is Y
MEAAADQQQQCQDFLIRSKGQRLGPAAFPYSPTGSLPGSPSAASKCLSFLLQQQQQQHDRAAAAASLMLGGSDEAHKFMARPRLDRADFASLMIYYYYNPTAGDALLDDLQLQEQLAFLNEGGGYPAHQLQGFDGVECRSPDPGDADGMFAFGLGKQQQGDFSGCTTPTGGLDARDPFDLHQLDARMLQHSNSANELLLRRKLEEEQQAAELQHAIELQSRRLMGLQLLDLKARAAATAAAASALPTPVANAFASSHPLSTMAVESPLESGEQLKQRCWTARAWSIHNTIRASVGVYDM

SEQ ID NO: 3656 - protein, 510 aa, Zea mays
  VARIANT 324: note = Ancestral polymorphism is A, Derived polymorphism is G
  VARIANT 343: note = Ancestral polymorphism is M, Derived polymorphism is I
MAGSSAEQLLSRIAAGDGHGENSSYFDGWKAYDMNPFDLRHNRDGVIQMGLAENQLSLDLIEQWSVDHPEASICTAQGAPQFRRIANFQDYHGLPEFRERSRLHESTHARLRLNDRSARRLLQAMAKFMGQVRGGKVTFDPDRVVMCGGATGAQDTLAFCLADPGDAYLVPTPYYPAFDRDCCWRSGVKLLPIECHSSNNFTLTREALVSAYDGARRQGVRVRGILITNPSNPLGTTMDRGTLAMLAAFATERRVHLICDEIYAGSVFAKPGFVSIAEVIERGDAPGCNRDLVHIAYSLSKDFGLPGFRVGIVYSYNDDVVACARKMSSFGLVSSQTQHFLAMMLADAEFMARFLAESARRLAARHDRFVAGLREVGIACLPGNAGLFSWMDLRGMLREKTHDAELELWRVIVHRVKLNVSPGTSFHCNEPGWFRVCYANMDDDTMEVALDRIRRFVRQHQHSKAKAERWAATRPLRLSLPRRGATTASHLAISSPLALLSPQSPMVHAS

SEQ ID NO: 3657 - protein, 383 aa, Zea mays
  VARIANT 320..383: note = Derived polymorphism lacks residues 320 to 383
MSAAAAGAKKRLSVGAIAGGGFALGCGCRDAKAVAVAVASSAAASTSPYSAAGTETTTTTATTATWRRARTPPHRPSSSASGSTGTLTVPSASSSSSFPWERADAEGDGDAGEEVDCKGEATTTTSFSGLLRQLNELEQSVVSWGRKSASKDHLSPPPRPLPALPVKQRLAHSCDGDRKEGHGNFSPPPPPPHFQFQITQQRQKAKSMDKGDRQVEVAHSKSMQPPPPPPPPPPPLPLQPERQFKAQSTDDDKGGKKEDASMFPTPPQAPYHLKSKSSVLDGSVGVAVVKQSDDPLGDFRRSMVNMIVENRIVTGEELRELLRHFLALNAPRHHEAILAAFTEIWDEAFSARTTTTMATPPRPRPSAPTPPRRRHAPPTRSWR

SEQ ID NO: 3658 - protein, 560 aa, Zea mays
  VARIANT 83: note = Ancestral polymorphism is G, Derived polymorphism is R
  VARIANT 396: note = Ancestral polymorphism is W, Derived polymorphism is G
MPESPASPAKPPSQPGSPLNAATPSPASALLRGSVLLIAFLVLQLVLLWNILGLPSSRFLPVPGQRDTTWPNGAVNGGACDEGLIYVYDLPSELNHDLVDDCESLWPWYSFCPYLTNGGFGEAAATLPVFFNVTRNVSLPSWYNTDQFQLEVIIHRRLLSHRCRTTDSSLATAFYVPFYVGLDVGSHLWGDNSTAADRDRAGLRLLRWLKNQTSFQRSGGWDHFITLGRITWDFRRYGDDGWGTNFVVLPGIANVTRLGIEADRLDPMEVGVPYPTGFHPRTAADVRAWQRHVLSLKRSKLFGFAGAPRSGFRDDFREVLLEECEDAGSEHCRSVDCRGTRCTDNGAAVLELFLDSSFCLQPRGDSFTRRSLFDCMVAGAVPVLFWRRTAYDQYRWYLPPGPRGEEGEWSVFIDRQALRVGNVSVRDVLEGLSERRVRRMRERVVEMIPRLVYASSSDGLGDGMEDALDVALRGVLERFRRRRASTAPVGVSAKHSPGRFVARSVDGKSTPPPPSDGKNGSVATVSKDDSGTNPSPPASSHIKTVVSIASASTGTSLQKS

SEQ ID NO: 3659 - protein, 554 aa, Zea mays
  VARIANT 339: note = Ancestral polymorphism is L, Derived polymorphism is Q
  VARIANT 307: note = Ancestral polymorphism is G, Derived polymorphism is V
  VARIANT 51: note = Ancestral polymorphism is G, Derived polymorphism is R
  VARIANT 19: note = Ancestral polymorphism is L, Derived polymorphism is P
MDSPLLSTPALLALSLLLLALYIARRRRGGGKNRNYPPVAGTVFHQLLHFRRLMEYQTELAHRYRTFRMLTPTCNYVYTVEPANVEYILKTNFGNYGKGAMIHDVMEDLLGDGIFNVDGARWRHQRKVASHEFSTRVLRDYSSGVFRDTAAELAGIVAVAARGAGPGERPLDVADLLMRSTLDSMFKVGFGVDLGSLSGCGDDEGAAAFARAFDDASEQVLYRFFDPSWKVKRLLGVSSEGAMKGSIRTIDQFVYGVIDRKIKQMGRDQEFVSELSAAASPVWMHMHSRALDWRSGHFFFLLTHTDGGVCLWQAKKEDILSRFLMERESDPGCFDNKYLRDIILNFVIAGRDTTAGTLSWFLYVLCRNQHVQDRVAREVRAAATGDRDDVGVQEFVTCLTEDAISRMRYLHAVLTETLRLYPAVPIDVKYCFSDDTLPDGYAVKKGDMVNYQPYQMGRMKFLWGADAEEFRPERWINDDGVFVNESPFKFTAFQAGPRVCLGKEFAYRQMKIFAAVLVYAFRFEMWEANATMGYRPMLTLKMDGPLYVRASLRQ

SEQ ID NO: 3660 - protein, 105 aa, Zea mays
  VARIANT 96: note = Ancestral polymorphism is C, Derived polymorphism is W
  VARIANT 65: note = Ancestral polymorphism is P, Derived polymorphism is R
  VARIANT 51: note = Ancestral polymorphism is H, Derived polymorphism is Y
MVDMKCEGCVTAVKNKLQTLEGIKNIEVDLSNQVVRVLGSRPVKIMLDVLYQTGREARLIGQGNPNAKDKSDPGIAAAVIARSAGVGENYKELCTCDGVTIWESS

SEQ ID NO: 3661 - protein, 634 aa, Zea mays
  VARIANT 431..634: note = Derived polymorphism lacks residues 431 to 634
  VARIANT 182: note = Ancestral polymorphism is I, Derived polymorphism is K
MRRRRRDHEIHRETLDESHVLAWPGLCLDQRPFSSEGSLGYQILYLQFQTVICDVKMVNFGKKLMADQVEEWKGYYINYKLMKKMLKQYVQQTQHGGKDREQVLKEFSRILDDQIERIVLFLLQQQGHLASRIEELGEKRSALEEYDISQVYQLHDAYREVGLDLIKLLRFVDVNATGIRKILKKFDKRFGYKFTDYYVTTRANHPYSQLQQVFKQVGIVAVVGALSRNLEYLQHHEGSFVSIYDRPAVTLKDPIIDQVNHAVQKLTHATNFMQFLGQHSLIVQEDAQSGSEDLVDDQSYHFMSLMLNLVNTFLYMVNTYIIVPTADDYAVSLGAAATVCGIIIGSMAVAQVFSSVYFSAWSNKSYFKPLVFSSIVLSLGNLLYALAFDLNSLSVLLIGRLLCGYAIFSIHPMSLNLCFTFLPLPSFNLCWIYLLMYSYLYDLVVCQAQLLIYFMLKYAMEILLSESSVVTTYYFSWSTSSVAIFLAILGLTVLPVNAIVGSYITNLFEDRQILLASEVMVLIGIIMSFRFTPHYSIPQYVISALITFVFSEVLEGVNLSLLSRVMSSRLSRGTYNGGLLSTEAGTLARVVADATITAAGYLGTDLLLNVTLLPPLVICIVSIAATLYTYNNLY

SEQ ID NO: 3662 - protein, 227 aa, Zea mays
  VARIANT 219..227: note = Derived polymorphism lacks residues 219 to 227
  VARIANT 201..227: note = Derived polymorphism lacks residues 201 to 227
  VARIANT 194..227: note = Derived polymorphism lacks residues 194 to 227
  VARIANT 184: note = Ancestral polymorphism is P, Derived polymorphism is S
  VARIANT 176: note = Ancestral polymorphism is H, Derived polymorphism is L
  VARIANT 169: note = Ancestral polymorphism is T, Derived polymorphism is A
  VARIANT 158: note = Ancestral polymorphism is I, Derived polymorphism is T
  VARIANT 117: note = Ancestral polymorphism is C, Derived polymorphism is Y
  VARIANT 111: note = Ancestral polymorphism is Y, Derived polymorphism is F
  VARIANT 108: note = Ancestral polymorphism is G, Derived polymorphism is S
  VARIANT 107: note = Ancestral polymorphism is S, Derived polymorphism is L
  VARIANT 99: note = Ancestral polymorphism is A, Derived polymorphism is E
  VARIANT 90: note = Ancestral polymorphism is E, Derived polymorphism is G
  VARIANT 82: note = Ancestral polymorphism is A, Derived polymorphism is V
  VARIANT 65: note = Ancestral polymorphism is S, Derived polymorphism is T
  VARIANT 63..227: note = Derived polymorphism lacks residues 63 to 227
  VARIANT 58: note = Ancestral polymorphism is R, Derived polymorphism is W
  VARIANT 47: note = Ancestral polymorphism is T, Derived polymorphism is A
MAWKDESVISTDGGNEETDTDSLHVARGLSHPGLLSSLSNKASVVPTPLLPSGQSDLRFNRLRPSIDESDCKYKRLFGYYVAREAVIDEEYWIVAWLRAEDQYENESGNRYFIIFSCSYVESFKRKFASKEFHALKKRCNKQHREKYICLVVVKNDDIRRTVLNSVVGTLDVCVRHPLYGEKFPEELGKPSLHCRIYQPDQPKFGYVTNVCVAKYARRQGIASNMLL

SEQ ID NO: 3663 - protein, 47 aa, Zea mays
  VARIANT 20..47: note = Derived polymorphism lacks residues 20 to 47
  VARIANT 15: note = Ancestral polymorphism is L, Derived polymorphism is P
MNAAEITDKLGLHSLRQRHWYIQSTCATTGEGLYEGLDWLSSNIASK

SEQ ID NO: 3664 - protein, 246 aa, Zea mays
  VARIANT 9: note = Ancestral polymorphism is R, Derived polymorphism is C
  VARIANT 45: note = Ancestral polymorphism is S, Derived polymorphism is L
  VARIANT 65: note = Ancestral polymorphism is G, Derived polymorphism is V
  VARIANT 72: note = Ancestral polymorphism is L, Derived polymorphism is Q
  VARIANT 86: note = Ancestral polymorphism is P, Derived polymorphism is S
  VARIANT 101..246: note = Derived polymorphism lacks residues 101 to 246
  VARIANT 200: note = Ancestral polymorphism is G, Derived polymorphism is D
MLPGSPVKRLLRLAAKGRREKAELAGLAAAAAALLLLCAPSLRCSAAARGRLWAGGVSVTAAGSGGEEECNLFDGDWVWAGGGGYPLYDSRDCPFLDVGFRCAENGRPEVSYTKWRWQPSRCHLPSTIAASEMDYRPQWLAATSVTAVVATRRRQAPSVSREVLPRSLAPLAGDASAFGATTGRPAWFAAPLGRFPVGAGGAGFLVLPCRLFHSTTPAQYSAAGTSSSSQVDATMYTAARVSVLMR

SEQ ID NO: 3665 - protein, 289 aa, Zea mays
  VARIANT 18: note = Ancestral polymorphism is W, Derived polymorphism is G
  VARIANT 16: note = Ancestral polymorphism is R, Derived polymorphism is G
MGVGASSVGAAEGCGRGWGPRHTSLGDMPESCVAAVLLYLDPAEICQVACLNRAFRGAASADCIWAAKLPANHRYLAALAAAADDDDCSCGCDGVAAEGSCSTVAIKKELYARLCRPTPFDGGRNDRRYWSDLSTEESRFHSVAYLRQIWWLEVDGEIDFCFPAGSYSLFFRLHLGRPRTRRARRRGGSDNDIHGWDIRPARFRLSTSDHQQHTTASEAHARLASPGRWVLYHVGDFAVSSPDEVTELRFSMMQIDCTHTKGGLCVDSVCIYPKRHGGYEEDCVFCQKI

SEQ ID NO: 3666 - protein, 502 aa, Zea mays
  VARIANT 397..502: note = Derived polymorphism lacks residues 397 to 502
MAAEKQAAMDGRKDGVAREVIRMEREAVIPILKPKLVMRLAYLIEHEADRNEFLKLCKKVEYTIRAWYLLQFEDLMASLRFQLYSLFDPVSGKERLQQQNLTPEEIETLEFNFMTYLFQVMEKSNFKLLSDEEFDIAQSGKYLLNLPIKVDESKLDKKLLTKYFKEHPHDNLPEFSNKYIIFRRGIGIDRTTDYFFIEKVDVMISRAWRSLLRVTRIDRLFSKKQHLKPKNGTKKTDEINEDEEDPELFVERIRLEKIELSLKNLMSKMTIQEPTFDRMIVVYRRAGTKTEPDRGIFVKHFKNIPMADMEIVLPEKKNPSLTPMDWVKFLISAVIGLVTLVGSLEMPKADVWVVIAILSGVIGYCAKIYFTFQQNMTMYQNLITKSMYDKQLDSGKGTLLHLCDDVIQQEVKEVIICYYILMEQGKATIQDLDLRCEELIKEEFGADCNFDVHDAIKKLEKLSIVHRDSIGRILCVPLKRANEIIGTTTEELVMRAQQNLAS

SEQ ID NO: 3667 - protein, 165 aa, Zea mays
  VARIANT 34: note = Ancestral polymorphism is A, Derived polymorphism is T
  VARIANT 98: note = Ancestral polymorphism is R, Derived polymorphism is C
  VARIANT 103: note = Ancestral polymorphism is R, Derived polymorphism is H
  VARIANT 109: note = Ancestral polymorphism is C, Derived polymorphism is R
  VARIANT 113: note = Ancestral polymorphism is R, Derived polymorphism is C
  VARIANT 114: note = Ancestral polymorphism is C, Derived polymorphism is Y
  VARIANT 115: note = Ancestral polymorphism is G, Derived polymorphism is S
MDSDSALAVARDDVSSSLDSEMSLDSVASDSESTLDSFELAMDSAAEEVAPDSFELTLDSFELVPDSAAEEVAPKAKSGELELGPFLCGSCGVVHDNRASWNRVHSTFRPCSRCGVINKDNLIDALLHGAQEWDCKPECDGKASHIVEAELISIIRLLEVFIELI

SEQ ID NO: 3668 - protein, 237 aa, Zea mays
  VARIANT 134..237: note = Ancestral polymorphism lacks residues 134 to 237
  VARIANT 124: note = Ancestral polymorphism is V, Derived polymorphism is E
  VARIANT 123..237: note = Derived polymorphism lacks residues 123 to 237
  VARIANT 111: note = Ancestral polymorphism is N, Derived polymorphism is D
  VARIANT 101: note = Ancestral polymorphism is P, Derived polymorphism is S
  VARIANT 92: note = Ancestral polymorphism is L, Derived polymorphism is F
  VARIANT 16: note = Ancestral polymorphism is T, Derived polymorphism is N
MRTTRDSVNQLTCMTTLTRLLEKHELLEMRRIAAYIYKKAGRWKQSIALSKKDNMYKDCMETCSQSGDRELSEDLLVYFIEQGKKECFASCLFICYDLIRPDVALELAWMDNMVDFAFPYLLQVRSNFCPCSRRRLFTYSYHSNIPTVLCDCVRSSFVNTLARWMKEERANEKEEKDLVAQQNMYAQLLPLALPAPPMPGMGGPPPPMGGMGMPPMAGMGMLPMGPGPMPAFGMGGY

SEQ ID NO: 3669 - protein, 286 aa, Zea mays
  VARIANT 248..286: note = Derived polymorphism lacks residues 248 to 286
  VARIANT 100..286: note = Derived polymorphism lacks residues 100 to 286
  VARIANT 76: note = Ancestral polymorphism is R, Derived polymorphism is C
MAAEQGRSLAETPTWSVATVTTLMVAVCFLVERSLSPFAKWLRKTKRKAMLAALEKIREELMLLGVISLLLSQTTRFISEICVPSSLFTSRFYICFESDYQDLLRNTDANQTALDRNMFGGQRLHVCGEGLEQLHRFLFILGITHVLYSFVIVVLSMIKIYSWRKWETLAGPIAAEELKARRTKVMRRQSTFVFNNASHPWSKNKILIWMLCFLRQFKGSIIRSDYLALRLGFVTYHKLPHSYDFHKYMVRSMEDDYNGTIGISWPLWAYAIVCILINVHGISTTY

SEQ ID NO: 3670 - protein, 834 aa, Zea mays
  VARIANT 701: note = Ancestral polymorphism is S, Derived polymorphism is F
MANAACVGGSFLGVEKGKPATVSNLGAPAVLLLVLACLPLVLPSSDPKQGMSFGDLDGGGSAAGLQYPYGAFASSPVLSLTVVDARRRRGGGGNAKDASEAENEGQSMMSGHLDVVLSGGGDGEDGEAANQRKPKRKKPYNRHTPRQIEQLEAMFKEFHHPDEKQRAQLSRQLGLDPRQVKFWFQNRRTHLKNQLERQENARLKHENDKLRVENLSIREAIRDLVCSCCGGPAVLGELSPEEHQLRLENARLRDELARVCTVTSKFIGKPMSHMELLLAKEPHPMTGSSLELAVAVGVGSSVPSSKMPVSTISELAGSTSSSTGTVTTPMVTASLPMVSIDKSKFAQLAVSAMNELVKMARMNEPLWIPTIPSPGSPIMETLNFKEYLKAFSPCVGVKPTGFVSEASRESGIVTIDSSAALMEVFMDERRWSDIFYCIVAKASIVEEILPGVAGSRNGALLLMQAELQMLSPLVPIREVTFLRFCKQLAEGAWAVVDVSIDGLQTDQCLATNTKCRRLPSGCVLQDTPNGCKVTWVEHAEYPEASVHQLYQPLMRSGLALGAGRWLATLQRQCECLAILMSSLAAPEHDSAAVSLEGKWSLLKLARRMMENFCAGMGASSSREWSMLDGFTGSTGKDVRVMVQNSVDEPGVPPGVVLSVATAVWLPVTPERLFNFLRDEELRAEWDILSNGGPMQQVLRISKGQLDGNSVALLRADHTDSHLNSILILQETCTDRSGAMVVYTPVDFPAMQLVLGGGDSKNVALLPSGFVILPAGSTASGLGHKARGSLLTVAFQILVNSQPTAKLTVESVDTVYSLISCTIEKIKAALHCDVC

SEQ ID NO: 3671 - protein, 331 aa, Zea mays
  VARIANT 20: note = Ancestral polymorphism is R, Derived polymorphism is C
MAPAAPDADAYDIPWVEKYRPSRVADVVGNSDAVARLEVIARDGNMPNLILSGPPGTGKTTSILALAHELLGPSYRDAVLELNASDDRGLDVVRNKIKMFAQKKVTLQPGRHKIVILDEADSMTSGAQQALRRTMEIYSNTTRFALACNTSSKIIEPIQSRCAIVRFSRLSDQEILGRLMIVVAAEKVPYAPEGLEAIIFTADGDMRQALNNLQATFSGFRFINQENVFKVCDQPHPLHVKNMVKNVLDGKFDEACSALKQLYDLGYSPTDIITTLFRVVKNYDMAEYLKLEMLKETGFAHMRICDGVGSFLQLSGLLAKFALVRETAKAP

SEQ ID NO: 3672 - protein, 193 aa, Zea mays
  VARIANT 23: note = Ancestral polymorphism is A, Derived polymorphism is V
MVGSFSSLCVMSQWNHKIVVYGAMIVQHSGLVYINLIHNLGYTSESAGTYGVGYSGDLAGHESNNASPTRDSGESLNPSGPIRDGGDSSTRSGARRKRGRMMMEDEDPLICTVTEAFKTLSDAIKQSAAQPRPIIPPNLWTMMKQIPVFEREHIAHYYGYLCENPALAYAFLEMGLDDQMVWVSRYIKTHLSD

SEQ ID NO: 3673 - protein, 215 aa, Zea mays
  VARIANT 198: note = Ancestral polymorphism is R, Derived polymorphism is C
  VARIANT 194: note = Ancestral polymorphism is L, Derived polymorphism is R
  VARIANT 130: note = Ancestral polymorphism is P, Derived polymorphism is L
  VARIANT 89: note = Ancestral polymorphism is P, Derived polymorphism is L
  VARIANT 70: note = Ancestral polymorphism is C, Derived polymorphism is Y
  VARIANT 41: note = Ancestral polymorphism is V, Derived polymorphism is D
  VARIANT 39: note = Ancestral polymorphism is V, Derived polymorphism is D
MTGSDTAAASAQQADAAAICGQIASVFSAPSPRPPARSVLVSELEAAASRGGRVFVHGVGREGLMMRALCMRLAHLGLPAHCVGDVTAPPAGGGDLLVASAGPGAFSTVDAICGVARGAGARVLLLTARLEGDFPRRQADVVAHLPAQTMADDEEGAGETETETEAEGSPARAKLPMGSLYEGAMFVLFEMVVLELARVLGQSPAQMRARHTNLE

SEQ ID NO: 3674 - protein, 257 aa, Zea mays
  VARIANT 174..257: note = Derived polymorphism lacks residues 174 to 257
  VARIANT 60..257: note = Derived polymorphism lacks residues 60 to 257
  VARIANT 53: note = Ancestral polymorphism is R, Derived polymorphism is W
MPLALVFFALCTSVHGLVRGENMELGRDSDTGGEVKYVVELARAMSMMPGVYRVDLFTRQVSSPDVDWSYDIMRRAKENRGLLLRQAAAAVRPSGVSSVVQYVNQSSIGMNCDLILCLDRCRKEVVRRVKAAVAGLAIENPYIKEIIDDDADRPKDWKETVGDESKEFGRYMRQREEQEKQEVELFTRAPVTKHDKQIEKLIRRQLHGLGGLTDGFGLGMNMLLGGDKEDDGGSSKSHGKSGNRKKRPKNSKKRMRH

SEQ ID NO: 3675 - protein, 148 aa, Zea mays
  VARIANT 121: note = Ancestral polymorphism is P, Derived polymorphism is L
  VARIANT 119: note = Ancestral polymorphism is G, Derived polymorphism is D
  VARIANT 112: note = Ancestral polymorphism is D, Derived polymorphism is E
  VARIANT 106..148: note = Derived polymorphism lacks residues 106 to 148
  VARIANT 102: note = Ancestral polymorphism is P, Derived polymorphism is S
  VARIANT 67: note = Ancestral polymorphism is S, Derived polymorphism is N
  VARIANT 60: note = Ancestral polymorphism is P, Derived polymorphism is T
  VARIANT 45: note = Ancestral polymorphism is A, Derived polymorphism is V
  VARIANT 39: note = Ancestral polymorphism is R, Derived polymorphism is C
  VARIANT 34: note = Ancestral polymorphism is R, Derived polymorphism is H
  VARIANT 33: note = Ancestral polymorphism is R, Derived polymorphism is C
MWPPPLASLHRPAPPLVDRPSPTDEELVSYYLRRRVLGRRLRVDAIAEIDLYRLEPWELPSLSRIRSRDAQWYFFTRLDRKVAGAGAGGRGGPGNMTNRATPRGYWKTTGKDREVHHRGKPVRQLGNRLLPWTRSSKTRDLEPEPRWR

SEQ ID NO: 3676 - protein, 1088 aa, Zea mays
  VARIANT 647..1088: note = Derived polymorphism lacks residues 647 to 1088
  VARIANT 1003..1088: note = Derived polymorphism lacks residues 1003 to 1088
MEAAASSLSTLLSTLRVDGPWTPPGTWESAIPESGAARVTDLGGRLQPIYELASVTDDALIHLALHALYGVKSSLDEIEELSVLFSSNPADRTSNRVTNVWLRSSSTISVGSILKSLRSTGLVVFFLCKFVHFYLVQSREMNCASREVHEHEHPGDKDTEQHRPYSLVNQAFAAAVSKVLEGYFCSLNTLPASIRLRRSVGQSGIPSKTSDGMSCNSTAEVTLLEVYLHTEELRRHVKSLGNICFPKFAGATLCHDGLDTEASVEFENFPRGTDLLSYLYVYIRDADPVHYGLLKYLFIRSCEPYFNFIKSWIYRASVDDPYEEFLITQTENKGVQGVSSDITDEFTLFPLKQGRNHVSAPCFLKEICHPVLRTGQQLRVLMNLLKSCKLSATGGDGYPSCNIINMEGVLPWFNTPIESSMNSFTFSKSSVEAVTCKRDAMYKLMMEKLQRFFSNVEVIPFDTASNILHKRTNLLDTSVSDAELFNGDSDAALPCNMSADEKDNDISFSSEDSSDKEDPLESSECSSYTSMDDTEVKSSTACEKISSSMFSLYCTSTGEAKCPLVTMKLLSSQSSSVYHGINWAVPIDECEKDDSLSCKHVPVHSQNAEHTAVLDGLELDYQYSQFSPFDRFMKRTSCSSEDMNSVEFLYTDHKRSVEKVSHGNAVNALHSESGPTKLSNGKNYEKFGNINQPWYTSIPYNLSLNPILKNAACYCTESDVQQKSKNQSLASFDFESVMDPCEVYCARSTSCLVEFVNGATIIQPSTHPCERLDCSPKLLQAQTRSQASLTSSGEMSTRDSLQKNVYGGAFWERSLLYNDKSKEKPAVDFSSQFDMPLDIVINKCIMEEVLLQYKYVSSFTMKLLEEGFDLCAHLLALRRYHFMEIADWADSFIALIYNKKWSFVKSEQKRSEIQGLMDFALQRSSCDSDPYKERLFIYIREPPVDSFDASACDLDLLDDILLGYKAEWPVNIVITEDTLKIYAEIFCYLLQVRFAVFSLTEVWRFLKELTQFISRSSHRGSDVLKKLNVVMKVRHKLHHFLSTLQQYLHCHLSDISWRRFQHSLKNQVRDILDLEYVHMCYITDALDM

SEQ ID NO: 3677 - protein, 125 aa, Zea mays
  VARIANT 67: note = Ancestral polymorphism is F, Derived polymorphism is L
  VARIANT 89: note = Ancestral polymorphism is S, Derived polymorphism is L
MTYLCSFITDDDMFFRCFLSDESKQVATIIKSMLQLALELRSCFQSIGDTCDLPVNQLSNLQYLINFSQVDVIRTKFEGNIKDLYVLHSKSSKYGELGLSRFWGYQNYNEYHSMKVSKDMGSFCF

SEQ ID NO: 3678 - protein, 343 aa, Zea mays
  VARIANT 179..343: note = Derived polymorphism lacks residues 179 to 343
  VARIANT 44: note = Ancestral polymorphism is T, Derived polymorphism is I
MGGGGRNGTVVRRYIRSKEPRIKWSADLHRSFVQAIDCLGGQHTWLANCRSSWRCKIAEATPKLILQFMATRGLTISHVKSHLQMYRAARLGAGRRGMQAQLLQRRHSCTGDEQEEFLRPPPPLKRARMGYESMQGLGSHGVSDARTAAAAGGLYCIDDYMQAMAAMGWRIKEEGLTRWQWQRRDAAAPSDLQAMGCLVQEPDPFKQMRRPEARRLGSALRNQQDDSSEEDGNGCPLLSSSSFSNAANDDEPSDEQCSLSLSLGLDTKGARAMATSSPSGESSCILTAASPARRSSSDCCCSGHSGCFVGPGVSLELSLSISGSYLDHSDSVHRPGPAGCSRW

SEQ ID NO: 3679 - protein, 199 aa, Zea mays
  VARIANT 168: note = Ancestral polymorphism is A, Derived polymorphism is T
  VARIANT 165: note = Ancestral polymorphism is G, Derived polymorphism is R
  VARIANT 132: note = Ancestral polymorphism is R, Derived polymorphism is Q
  VARIANT 76: note = Ancestral polymorphism is Q, Derived polymorphism is R
  VARIANT 73..199: note = Derived polymorphism lacks residues 73 to 199
  VARIANT 49: note = Ancestral polymorphism is M, Derived polymorphism is T
  VARIANT 30: note = Ancestral polymorphism is P, Derived polymorphism is L
  VARIANT 13: note = Ancestral polymorphism is K, Derived polymorphism is N
  VARIANT 8: note = Ancestral polymorphism is E, Derived polymorphism is D
MSMATTPEEFFIKDLMEQPPLSPPVFLELPHKPNASNEDRHQVPNNDMTLPYISRMLMEDDDDELGDHPALLQVQQSFAKILSSPPLVGTNTNNSEGPNDFLHEDVRKMRSDVFIQSVVNQSYGSSFLSRFREILFYYMAMFDMLDTTLPRESESRLVFEKLVLGCYAFNGISCEGSDLVLRPKKYRQWQARNERAGLF

SEQ ID NO: 3680 - protein, 1095 aa, Zea mays
  VARIANT 409..1095: note = Derived polymorphism lacks residues 409 to 1095
  VARIANT 489..1095: note = Derived polymorphism lacks residues 489 to 1095
MPIMVRKKRTGPGGSGETSGESSGASGQGSSQQPERTQQPGGGRGWVPQQGGHGGGQHQGRDRHYQGRGGPGPHHLGSGAPEYHPREYQGRGGEYQGHGGEYQGRGGDYQGRGGGRSRGGMPQPYYGGHRGGNVGRNVPPGPSRTVPELHQAPYVQYPAPVVSPSPSGPGSSSQPMAEVSSGQVQQQFQQLADRGQSSTSQEIQVAPASSKSVRFPLRPGKGTYGDRCIVKANHFFAELPDKDLHQYDVSITPEVTSRGVNRAVMGELVTIYRQSHLGGRLPAYDGRKSLYTAGPLPFTSMAFEITLQDEEDSLGGRQGGHRRERVFRVVIKFAARADLHHLAMFLAGRQADAPQEALQVLDIVLRELPTARYSPVGRSFYSPNLGRRQKLGEGLESWRGFYQSIRPTQMGLSLNIDMSSTAFIEPLPVIDFVAQLLNRDISVRPLSDSDRVKIKKALRGVKVEVTHRGNMRRKYRISGLTSQATRELSYVSFIAGMRFPVDDRGTVKTVVQYFMETYGFSIQHTTLPCLQVGNQQRPNYLPMEVCKIVEGQRYSKRLNEKQITALLKVTCQRPQERELDILQTVHHNAYYEDPYALEFGIRIDERLAAVEARVLPPPRLKYHDSGREKDVLPRVGQWNMMNKKMVNGGRVSNWACINFSRNVQDSAARGFSHELAVMCQISGMDFALEPVLPPVTARPEHVERALKARYQDAMNILRPQGRELDLLIVILPDNNGSLYGDLKRICETELGLVSQCCLTKHVFKMSKQYLANVALKINVKVGGRNTVLLDALSRRIPLVSDRPTIIFGADVTHPHPGEDSSPSIAAVVASQDWPEVTKYAGLVSAQAHRQELIQDLFKVWQDPQRRTGTSHFFQEGNWTEAPEDHILQFLSFRDGVSEGQFYQVLLYELDAIRKACASLEPNYQPPVTFVVVQKRHHTRLFANNHSDQRTVDRSGNILPGTVVDSKICHPTEFDFYLCSHAGIQGTSRPAHYHVLWDENKFTADELQTLTNNLCYTYARCTRSVSIVPPAYYAHLAAFRARFYMEPDTSDSGSLASGARGPPPGAARSSTRGAGSVEVRPLPALKENVKRVMFYC

SEQ ID NO: 3681 - protein, 826 aa, Zea mays
  VARIANT 280: note = Ancestral polymorphism is G, Derived polymorphism is R
MVAAAAAAGGGADAGCGGGGGGGGKDALFVELWKACAGPLSSVPLLGEKVYYFPQGHIEQVEASTNHLAEHQGTPLYNLPWKIPCKLMNMELKAEPDTDEVYAQLTLLPDKKQDENTSARVENEEAEEEVVPHVPPATSEGLRIHSFCKTLTASDTSTHGGFSVLRRHADECLPPLDMSQHPPNQELVAKDLHGVEWRFRHIFRGQPRRHLLQSGWSVFVSAKRLVAGDAFIFLRGENGELRVGVRRALRHQTTIPSSVISSHSMHLGVLATAWHAVNTGSMFTVYYKPRTSPAEFVVSRARYCESLKRNYSIGMRFRMRFEGEEAAEQRFTGTIVGICVSDPSGWADSKWRSLKVRWDEASSVPRPERVSPWQIEPAVSPSPVNPLPVRFKRSRSSVNASPSDVSTVNREVASKVMVESQQNNLPRALHNQGRTQLTGRYRDSTDVKTAQDLTMWSSGTEQQRNNIAAQTKRCLEGWTQSRTPEGYNQLFSAFQPLKDAHNPLRPFPNKISGTRSSTWVTADARYPAQQANHNMLHGTLSFMPHSSGFRMIQQNNLVTPEAANFTGKSAFTSLQGHVTDQCSTGWFGSIESNSHTDHASSSLIRSQPLVIGNDVQKTKGTSFKLFGIPLGSPEKSEPLVSPPSVAYDGKLQTSPTDNNEPCSEATQNIQNKVQSSSTRSCKKVHKQGSALGRSIDLTKFACYDELIAELDQMFDFDGELKSPCRNWLVVYTDNEGDMMLVGDDPWNEFCDMVHKIFIYTREEVERMNPGALNARLEDCLSDSLGRGLASKEPRSGPSTSAVDSENRANLSTLLKVVKQTKGHVSE

SEQ ID NO: 3682 - protein, 234 aa, Zea mays
  VARIANT 128: note = Ancestral polymorphism is S, Derived polymorphism is I
MPPGPGVADQAAPPRSPLRGNGAMPPQSPLRIKQDGKFYERLLTRESSAANLSFRYYWAEPGAVPFVWESQPGTPKDVARTATGALPAITPPPSYLLRHGNVAVGRQVAAASVARRDPKSGGRAAARSGKKRRCRLKRIRISFVAGIFRRLSLGKRWRQRPAPPAKVWSSSSSSRWLFSSVATETGEHSLHQVQDEIAVPAHPKQHRTVPVPCRCSFPAMWLLRFRNSFGHGWA

SEQ ID NO: 3683 - protein, 704 aa, Zea mays
  VARIANT 166..704: note = Derived polymorphism lacks residues 166 to 704
  VARIANT 122..704: note = Derived polymorphism lacks residues 122 to 704
MRSTEEASGPDYGDLGFLGTRAPAHRHRARGHCSLPFSSVAATAEASTTRDQLAAAPAGADGLHALAEQVVQLVLADGSGASSPRVAFADGVFVDSSLKLKPAFEEVAVGKYRADTQSVDFQKKVDLIPFPPSSRTLVSCYRSSYSYDSGHINQNLSRKCEALVVSGLAEYGDEIDGIAPADIMKIQPILQEDLKLDFSKSRTNKTGNAEITKRRRMVVIDEVDSFLFRPHVGLRAKFQVKKKQFFRNFITITLFGAVGTLISFTVISLGALGLISRLNIGALELGDYLALGATFSAIDSNFDPGNISGAKLLNFISSFLYLFGSSTILGVASGLLSAYTIKKLYFGRHSTYREVSIMMLMAYLSYMLAELLDLSGILTVFFCGVVMSHYTWHNVTESSRVTTKHAFATLSFISETFLFLYVGMDALDIENPVKSIALSSTILALVLVSRAAFVFPLSFLSNLTKKTPNGKISFRQQVIVWWAGLMRGVVSIALAYNKVNLVFGLYGLSFGLELCYCFCFLYPFQNIGHFLLSVRHFGRDIIMPNLKSSVTTTASAVEYMDEVLKVLPLGEAKNEDSRTLQFNYGSFKHKALDKFLTKKVPKNRLTSNTKLTQCCSIVGIFEALTAFPFSPSPFLLKKTLAILHEFQVLQVVAVCECGLDYDRLQFCPTDMQKKYFEKQFELAEAVKLPIFFTCVLLVKTSMKS

SEQ ID NO: 3684 - protein, 456 aa, Zea mays
  VARIANT 259..456: note = Derived polymorphism lacks residues 259 to 456
MGNCLGSDEAAELEVVKNSGQPQAAATAAPAMAPHKSEGSMSSGSGPSSSSRSAGSSMSSIATTTGRSGGSTSTSSGSRPLRAAAAASYREEEEEEEEEKEGRILEAPNLRIFTFAELRAATRNFRPDTVLGEGGFGRVYKGWVDERTMNPTRSGIGMVVAVKKLNQESVQGLQEWQSEVNFLGRLSHPNLVRLLGYCVEDRELLLVYEYMPKGSLENHLFRKGGSFEPISWNLRLRIAIGAARGLAFLHSSEKQVIYRDFKASNILLDTNYNAKLSDFGLAKNGPTGGDSHVTTRVMGTYGYAAPEYVATGHLYVKSDVYGFGVVLLEMLTGLRALDTARPAQQHNLVEWAKPYLADRRKLPRLVDPRLEGQYPSKAALQAAQLTLRCLEGDPRSRPSMAEVVLAIEAMEQLRVRPRDEAAPSGHAHGHGRSSRPRTGPGRAGSSSHHRQSPSAR

SEQ ID NO: 3685 - protein, 426 aa, Zea mays
  VARIANT 87..426: note = Derived polymorphism lacks residues 87 to 426
  VARIANT 264: note = Ancestral polymorphism is I, Derived polymorphism is V
  VARIANT 265: note = Ancestral polymorphism is S, Derived polymorphism is F
  VARIANT 267: note = Ancestral polymorphism is R, Derived polymorphism is C
MAARAADENRRPGVGRPAPCVRDMGSRRALTDIKNLVGVAPNPCAVAKKPVLQKSRRDEKKTALPSSRPMTRKFVASLASKGQPECQPTGADPEPGVDQRKEPIGDGIIDIDVELDEPVDDSDCDVDMGDETENKDIMNQDESLMDIDSADSGNPLAATEYVEELYKFYRENEAKSCVNPDYMSSQQDINAKMRAILIDWLIEVHYKFELMDETLFLTVNVIDRFLEKEVVPRKKLQLVGITALLLACKYEEVSVPVVEDLVLISDRAYTKGQILEMEKLILNTLQFNMSVPTPYVFMKRFLKAADADKQLELVSFFMLELCLVEYQMLNYRPSHLAAAAVYTAQCAINRCQQWTKVCESHSRYTGDQLLECSRMMVDFHQKAGTGKLTGVHRKYSTYKFGCAAKILPAQFMLELGGTAPPPSGAI

SEQ ID NO: 3686 - protein, 789 aa, Zea mays
  VARIANT 583: note = Ancestral polymorphism is S, Derived polymorphism is C
  VARIANT 511..789: note = Derived polymorphism lacks residues 511 to 789
  VARIANT 490..789: note = Derived polymorphism lacks residues 490 to 789
MGCKGSKLDDQEAVALCRARAELLAAAVRHRYALADAHAALADSIDSVAAPLHRLLRLQAQPRGLVLPSARKGGGAPANRLLPRSFDPSSALPAHGHSSQPQFGASPGSEPAPTADSPPRRRRRVPEQLPHPHYAAYGYDYATQPAYAYPAPASSLQFYYARSRPPPASVAVTQRAPGTSERVHFGSFDAAGGYPQHYAYSAQRAQAPPPVAPQRSAPPSPPKASSWDFLNVFENYDSYEHDSYYYDSATAPAAPAAPFMPSRSSREVREEEGIPDLEDDGEEDSVGVVVKEVAGQYSAPGNGGARSRRNSLGGASSTAELDQPENAIAHKDVIGEFRRRPTAHGNVSVHAPPPPARRVVDNASVAGEIKAQLVRTAEAARQLAPMLEVGRPSYQGRSSVYQCSSKMMSAISVAHLGCKDMDVLDVGVVGKMVDTRSLSSALDKLYFWERKLYAEVKAEEKTRLLIAKNSKRLKLLDQKGTEPEKIDETRNLLRKLSTKIRIAVRVIAKISRKINKLRDEELWPQVNALIQGFVLMWQDKLDAYHSQCQVISEAKNFTSVLSGGNGQDLVLELEVELIKWIISFSSWVNSQRNFVKALNGWLALCLNYEPEDNTTGAPSYSPGSIGAPLVFVTCNKWSQAMDRISEKDVVNAMQALVSSVWHLWEQQYLEQSEQIISMREREKWIKILERRTQDINKEADELNKKLALIPSRQRMHVPRRVQLYEAHCVEASNLHINLRLVLEALENFAANSLQAFQDVAKSAEGTRLPRDNVRREHRSSERSSNYKTS

SEQ ID NO: 3687 - protein, 391 aa, Zea mays
  VARIANT 277: note = Ancestral polymorphism is P, Derived polymorphism is L
MASRGGAFVLLVLCSLPVLLAPQAAGATMKPLVPAMFVFGDSLVDVGNNNHLRKCNDSCKANHRPYGVDYPSHSPTGRFSNGYNMADQLAQLLGFAESPPPLLSLTNAARLGRLKSTCGINFASGGSGLLPTTGGASVCGGEVVSMAEQVGNFTRLVRTWERQKRRRQAAEAARLVSRSLVFISVGSNDLFEYSDFFADPRNRNASRNDAAFLQGLVAFYAAYVKDLYAAGATKFSVVSPSLVGCCPSQRKVARDSHDLDELGCLRAANNLSGQLYLMIGSMLRNLSQELPGMKYSLGDAIGMARWIFAHARRPPNKFSSIGRPCCGSGDFGETGCSSNVELCQNRSSFFFWDRFHPTEAVSALTSIQLFCDNGTFVHPINVQQLVASSRP

SEQ ID NO: 3688 - protein, 148 aa, Zea mays
  VARIANT 111: note = Ancestral polymorphism is G, Derived polymorphism is A
  VARIANT 75: note = Ancestral polymorphism is A, Derived polymorphism is T
  VARIANT 72: note = Ancestral polymorphism is M, Derived polymorphism is I
  VARIANT 70: note = Ancestral polymorphism is S, Derived polymorphism is L
  VARIANT 69: note = Ancestral polymorphism is G, Derived polymorphism is R
  VARIANT 59: note = Ancestral polymorphism is E, Derived polymorphism is D
MAAVPVYSITRAEIDEFWSRKEVEAEERRLAAEKEAARITAKTLKQMEDYVLYEQMVREILMEGNGGDGSAIAAAATGGTTEAQIVGIKHWWTRSAYAYLNTPALSMDGNGRSNKHANAIPYVPQERCTAIFCSSTPRQPNVDALAIF

SEQ ID NO: 3689 - protein, 123 aa, Zea mays
  VARIANT 32: note = Ancestral polymorphism is A, Derived polymorphism is T
  VARIANT 57: note = Ancestral polymorphism is R, Derived polymorphism is C
MWAPGSPGRLPAMEECGEDEETDVDAYHGAMASSCWGRLGAAALWHRLRQHLSLVRRRRRQRGRSLLGAGGLNYDPLSYAQNFDDGCLCLEEREPDFSARFAPARHAAGSPRPTAAARDVATA

SEQ ID NO: 3690 - protein, 193 aa, Zea mays
  VARIANT 100: note = Ancestral polymorphism is L, Derived polymorphism is Q
  VARIANT 58: note = Ancestral polymorphism is G, Derived polymorphism is D
MDHEEVTEFLGQVPLLQCLPGSSIRRIAEAVQVKNYEPGDYVAREGEPVNGLYIIVDGQAEVSAPANAEEANRPDYVLNKYDYFGYGTNSSVHQVNVVALSKLTCFILPNQYGHLLQPKTIWNAEETPEHSLLEQILHLEPLEVDIFRGFTLPEAPTFRQVFGGQFIGQAIFNHPRLLSRSDNYIYFTTSFYY

SEQ ID NO: 3691 - protein, 146 aa, Zea mays
  VARIANT 69: note = Ancestral polymorphism is G, Derived polymorphism is D
MQCHCRCSPPPAHSRCSRASVGAVVASMDWPQVTTYKALVSAQAHREEIIQNLGGMIRELMISFYKRTGKKPKRIIFYRDGISEGQFNHVLLLEMDAIRKACASLEDGYLPPVTFVVIQKRHHTRLFPGVHGRRDVTDRSGNILPG

SEQ ID NO: 3692 - protein, 616 aa, Zea mays
  VARIANT 83..616: note = Derived polymorphism lacks residues 83 to 616
  VARIANT 530: note = Ancestral polymorphism is T, Derived polymorphism is I
  VARIANT 552..616: note = Derived polymorphism lacks residues 552 to 616
MALSASRVQQAEELLQRPAERQLMRSQLAAAARSINWSYALFWSISDTQPGVLTWTDGFYNGEVKTRKISNSVELTSDHLVMQRSDQLRELYEALLSGEGDRRAAPARPAGSLSPEDLGDTEWYYVVSMTYAFRPGQGLPGRSFASDEHVWLCNAHLAGSKAFPRALLAKQSASIQSILCIPVMGGVLELGTTDTVPEAPDLVSRATAAFWEPQCPTYSEEPSSSPSGRANETGEAAADDGTFAFEELDHNNGMDIEAMTAAGGHGQEEELRLREAEALSDDASLEHITKEIEEFYSLCDEMDLQALPLPLEDGWTVDASNFEVPCSSPQPAPPPVDRATANVAADASRAPVYGSRATSFMAWTRSSQQSSCSDDAAPAAVVPAIEEPQRLLKKVVAGGGAWESCGGATGAAQEMSGTGTKNHVMSERKRREKLNEMFLVLKSLLPSIHRVNKASILAETIAYLKELQRRVQELESSREPASRPSETTTRLITRPSRGNNESVRKEVCAGSKRKSPELGRDDVERPPVLIMDAGTSNVTVTVSDKDVLLEVQCRWEELLMTRVFDAIKSLHLDVLSVQASAPDGFMGLKIRAQFAGSGAVVPWMISEALRKAIGKR

SEQ ID NO: 3693 - protein, 443 aa, Zea mays
  VARIANT 268: note = Ancestral polymorphism is P, Derived polymorphism is S
MPACRPRNWRSGETAPRPIPLALVAAAQPLFLTAGSQLLLSPLGIVTKLPQPAAATNAERPPASLHLSEWGLSPPSNRSSGTSSTPSFRRRSLQLLLSFPSFNRCNLHFPWSSLINNVKCLTNCPYFALTMHSTTKPLGSSMPVKRAHLKPHAADIKRNPHVHELYKLVYRLPENLSWLLAPPEIPKRPASKKKKQKDEIVAGNSFGVILEWEGVVVDDDDPDLEPRVWYVLSLEEGKSFPPDALLKKIEGMRTDQAIAEVLCWSEDPAEIQRLATHKEVIYQKLQGGYYQLRPHVLDFLNTLVGFDIPIAIAAPRSRKSLEEGIKTVGLQGYFDAIVALEDFCLGKPDGEMFEVAAEQLGLEPDACVVFGNSNLTTESAHNAGMRCVAVAGRHPAYELQSANHVVRWLDQLSIVDLQRLANGEVIGRRGRESDMDMEIVIEE

SEQ ID NO: 3694 - protein, 243 aa, Zea mays
  VARIANT 91: note = Ancestral polymorphism is R, Derived polymorphism is H
  VARIANT 80..243: note = Derived polymorphism lacks residues 80 to 243
MCPGFEASPVPSPPPPPSAMPGSATTAVQPRPPSVTAPWWRKRWRHPQGATDGWDGFVLTTDGWDVHRGTFPAWMVSSQGNDSSLVLLNTRPGPAADGAGMAEHLQLHLGQVSLRSWSSFAGYWVARWTFPSDCRSSAFFCVRFGICTSVGTCACVDEFEPSKPCEWQRGYFVDGCTTRSHPLSCTADDSGRRPTTEQDDSFLLLDNLRGLPYSSIPQRRATAGRASSRRPRRGEASAGSGDG

SEQ ID NO: 3695 - protein, 240 aa, Zea mays
  VARIANT 224..240: note = Derived polymorphism lacks residues 224 to 240
  VARIANT 218..240: note = Derived polymorphism lacks residues 218 to 240
  VARIANT 45: note = Ancestral polymorphism is G, Derived polymorphism is V
MAVIVTPANDYELPASVLAALEPKDTKPYALQKAEDIVGTMLAKGFILGRDALDKAKALDEKHQLTSTATARVSSFDKRIGLSEKISVGTSVVNDKVKEMDQKYQVSEKTKSALAAAEQSVLTVGSAIMKNMYVLTGAAWVTGAFSKVTSAANDVGAKAKEKIAVEQEDKNAEGGPGQANISEIPAAHRELDCEFANIHVSETSEDVPMSSVTVPLLQMRSPAWPLHQLKFLKNQKLHRD

SEQ ID NO: 3696 - protein, 176 aa, Zea mays
  VARIANT 56: note = Ancestral polymorphism is Y, Derived polymorphism is H
  VARIANT 45: note = Ancestral polymorphism is T, Derived polymorphism is I
MAAASSATSVHDFTVKDSSGKDVDLSVYRGKVLLIVNVASQCGLTNSNYTQQAQLYEKYKNQGLFLIHCSCFEILAFPCNQFGGQEPGTNEEIAQFACTRFKADYPIFDKVDVNGNNAAPIYKFLKSSKGGLFGDSIKWNFSKFLVDKEGRVVDRYAPTTSPLSIEKDIKKLLGSS

SEQ ID NO: 3697 - protein, 89 aa, Zea mays
  VARIANT 7: note = Ancestral polymorphism is E, Derived polymorphism is D
  VARIANT 12: note = Ancestral polymorphism is T, Derived polymorphism is M
  VARIANT 13: note = Ancestral polymorphism is A, Derived polymorphism is G
  VARIANT 20: note = Ancestral polymorphism is A, Derived polymorphism is D
  VARIANT 21: note = Ancestral polymorphism is A, Derived polymorphism is T
  VARIANT 23: note = Ancestral polymorphism is P, Derived polymorphism is S
  VARIANT 25: note = Ancestral polymorphism is R, Derived polymorphism is H
  VARIANT 27: note = Ancestral polymorphism is A, Derived polymorphism is V
  VARIANT 29: note = Ancestral polymorphism is A, Derived polymorphism is V
  VARIANT 33: note = Ancestral polymorphism is R, Derived polymorphism is K
  VARIANT 40: note = Ancestral polymorphism is A, Derived polymorphism is T
  VARIANT 43: note = Ancestral polymorphism is A, Derived polymorphism is T
  VARIANT 51: note = Ancestral polymorphism is R, Derived polymorphism is Q
  VARIANT 53: note = Ancestral polymorphism is A, Derived polymorphism is T
  VARIANT 54: note = Ancestral polymorphism is A, Derived polymorphism is V
  VARIANT 55: note = Ancestral polymorphism is D, Derived polymorphism is N
  VARIANT 56: note = Ancestral polymorphism is A, Derived polymorphism is T
  VARIANT 57: note = Ancestral polymorphism is G, Derived polymorphism is E
  VARIANT 60: note = Ancestral polymorphism is P, Derived polymorphism is L
  VARIANT 74: note = Ancestral polymorphism is V, Derived polymorphism is F
  VARIANT 75: note = Ancestral polymorphism is R, Derived polymorphism is C
MAMATMEATTLTALLKEAAAAFPTRRVVAVPGRLELMHAALDALIDAAAAQLAADAGFLLGHVVALSFPNTIEFRLLSNSIGHVPACAT

SEQ ID NO: 3698 - protein, 718 aa, Zea mays
  VARIANT 444..718: note = Derived polymorphism lacks residues 444 to 718
MRAAPFSADGKGAGTIEALLWPNGKGGGGGDLLLEPTSVLDCRRSPSPRYSSSTLSSSLGGAAGDSSSGVAAVSENSAAAAAEATKWAAPGEHRGGGEGGGGGGSRKEWSGGELPPIPGTLDIGFGAEEGWDAMLGDAAAVVGQDQTFLNWIMTAPGDMEPPALALLGNAAGFEFPASDPIGFSLQHHPTGGGTSVGALASDLSSPSARSLTSSSGSSSKATSTFGLLRTEAVFQPPPPATTMPFHDGADIKPAHLGVPSASLLLNQHQALSAASFMPLPSFPDHQHQPHLPPPPKRHHSMPENLFLLQNQLQPPPPPPQGLRFPPLHTTAPFQLQPSLQPPRGSMKTTPAAQQHQQLLDELAAAAKAAEVGNSIGGREILARLNQQLPPIGKPFLRSASYLKEALLLALTDGHQGSTHLSSPLDVALKLGAYKSFSDLSPVLQFANFTATQALLDEIASTTSSCIHIIDFDLGVGGQWASFLQEFAHRRGTGNAPLPMLKLTAFVSSASHHPLELHLTRENLTQFAVDLGIPFEFTDINLDAFDPAEFIAPSPNEVVAVCIPVGCSARTPPLPMLLQLVKQLAPKIAVAIDHGSDRGDLPFSQHFMNCFQSCMFLLDSLDAAGTNADAASKIERFLIQPRVEDAVLGRRKAENAMAWRAVFTSAGFAPVPLSNLAEAQADCLLKRVQVRGFHVEKCGMGLALYWQSGELVSVSAWRC

SEQ ID NO: 3699 - protein, 69 aa, Zea mays
  VARIANT 9: note = Ancestral polymorphism is P, Derived polymorphism is T
MKARHTAQPEHQAGATAKEGMKMAAASAGAVRAAPTPSAVTVSHRLSRPEDTGFHLDYAGPRTHTPSHN

SEQ ID NO: 3700 - protein, 141 aa, Zea mays
  VARIANT 67: note = Ancestral polymorphism is D, Derived polymorphism is Y
  VARIANT 110: note = Ancestral polymorphism is G, Derived polymorphism is C
MMLDREPAVGRAAEARLRAAEAELERARRRGADLEERLRQLAGEGQAWLGVARSHEAVAAGLRATLDKVLQQPAVAAAGGGECGVAEDAQSCCFVASPSGLVAGDAVSTGSSPSCKACGVVLLIIIACGSDGREAYIAEHK

SEQ ID NO: 3701 - protein, 134 aa, Zea mays
  VARIANT 76: note = Ancestral polymorphism is P, Derived polymorphism is Q
MALAGKASVALFLAVNLAVFIAMASACGGNCPTPTPSTPSTPTPTPASFGKCPRDALKLGVCANVLGLIKAKVGVPPTEPCCRLLEGLVDLEAAVCLCTAIKGEVLGIKLNLPVDLSLILNHCGKTVPTGFKCL

SEQ ID NO: 3702 - protein, 236 aa, Zea mays
  VARIANT 185: note = Ancestral polymorphism is P, Derived polymorphism is L
  VARIANT 77: note = Ancestral polymorphism is P, Derived polymorphism is L
  VARIANT 4: note = Ancestral polymorphism is K, Derived polymorphism is N
MAGNASMTLFLAVSLVMFAMASACGGNCPTPTPSTPTPTPASFGKCPRDALKLGVCANVLGLIKAKVGVPPTEPCCPLLKGLVDLEAAVCLCTAIKGECFLYSAAMAGKASVALFLAVNLVVFAMASACGGNCPTPTPSTPSTPTPTPASFGKCPRDALKLGVCANVLGLIKAKVGVPPTEPCCPLLKGLVDLEAAVCLCTAIKGEVLGIKLNLPVDLSLILNHCGKTVPTGFKCL

SEQ ID NO: 3703 - protein, 346 aa, Zea mays
  VARIANT 17: note = Ancestral polymorphism is D, Derived polymorphism is H
MEMPAATQGRRTSTVVDRKLDELCACLVDALSSGQQTPHTDEQLRAKIKSKTEFLRLLLYAEAECHGGPRPEHLAEAEARFAVLAATFDGWARRAVVAAPEPVEEEEADSLVSSRSACFCTDSCQEEATEGDAIRDAMEARNEEGTLDAVAKKGDIDHEAAVETGSRVVQRRWWRHNAAACRCSAAGLVVVVAVGLALELAAVAHHNVNICVDFVQEIASKTNSAVRDLRQLVGSLGLGAREPEREGWEHVISKSSDDVSYKAWCDKPTVVANCVHALQQIWALEAANLVAERLRHCIANHWIDFNMQMESLFWQQLKFFSIPMTVVHQQQEKKEDKSDKTEDEKN

SEQ ID NO: 3704 - protein, 478 aa, Zea mays
  VARIANT 66: note = Ancestral polymorphism is R, Derived polymorphism is P
  VARIANT 160: note = Ancestral polymorphism is K, Derived polymorphism is M
MGWSAGLWWLVAALWVVAAAAAAAEGEVVVGSAPRRHAYASMMYMGTPRDYEFYVATRVMMQSLRRLSADADRVVIASLDVPPLWVQALKDDGVKVVSVENLKNPYERQENFNMRFKLTLNKLVVSSVLSSSIPVSSIQVSLCFRSSLQFFYLKSISLKMFGVIFIFTFQLDVLSYTFFFGFQPSMNVFKNMLHELSVGRENPDGADQGFLASYFPDLLDQPMFHPPANGTKLQGTYRLPLGYQMDASYYYLKLRWSIPCGPNSVITFPSAPWFKPWYWWSWPVLPLGLSWHEQRRENLGYSSEIPVVLIQAVLYIGVIAVTRLARPTLNKMCYNRRMEKNTMFLLSVLRVVAAWSILAAYTIPFFIIPRTVHPLLGWPLYLLGSFALSSIVINIFLFHPITVLTTWFGFIGALLVMAFPWYLNGFVRALAVFAYAFCCAPLIWASLVKTMSSLQVLIERDAFRLGEPSQNAEFTKLY

SEQ ID NO: 3705 - protein, 292 aa, Zea mays
  VARIANT 225..292: note = Derived polymorphism lacks residues 225 to 292
  VARIANT 34: note = Ancestral polymorphism is P, Derived polymorphism is L
MASRPSTFRFAVVAVLSTLPLVASSASGHENPEPVVRDSPQNGTNRRYLWASSSARGYGGWSSGGATWYGSPNGAGSDGGACGYHGDVSQRPFKSMIAAGGPSLFKNGKGCGACYQIRCTGNRACSGRPVTVTVTDSCPGGACLAESAHFDMSGTAFGAMANNRGMADRLRSAGILKIQYRRVACNYNGRTVSFKVDAGSNPYYLAVLIEYVAGDGDISAADIMQAGCDSWAPMQQSWGAVWRVNSNNGQPLRAPFSVRVTSGSGKVLVVRNAIPAGWTAGRTYRSTVNYGY

SEQ ID NO: 3706 - protein, 262 aa, Zea mays
  VARIANT 185: note = Ancestral polymorphism is V, Derived polymorphism is M
MACKPQLLFFTAIAALASIIHPCASVEFHRKLSSWSDGGATWYGAATGAGSDGGACGYRGAVDQAPFSSMIAAGSPSIYNSGKGCGSCFQVKCTGNDACSGDPVTVVITDECPGGACLSEPSHFDMSGTAFGAMAKPGQADKLRGAGVLQIQYTRVQCNWPGVQLTFVVDAGSNPEYFAVLVKYVNGDGDLSAVDLMQTGAGASWASMQPSWGAVWKFSAGSPLLAPLSIRLTSSSGKQLVASNVIPAGWTPGATYQSSVNY

SEQ ID NO: 3707 - protein, 195 aa, Zea mays
  VARIANT 84: note = Ancestral polymorphism is Y, Derived polymorphism is H
MIAAGGPSLFKNGNGCGACYQIKCTGNKACSGWPVTVTITDSCPGGVCLAQAAHFDMSGTAFGAMANRGMADRLRAAGTLKIQYKRVPCNYNGMGIAFKVDRGSNPFYLAVLIQYQNGDGDLAAVHIMQQGQGGAWTPMQHSWGAMWRANTGKPLRAPFSARLVSGSGKVLVVGNAIPAGWRAGMTYWSKLNYAT

SEQ ID NO: 3708 - protein, 438 aa, Zea mays
  VARIANT 4..438: note = Derived polymorphism lacks residues 4 to 438
  VARIANT 185: note = Ancestral polymorphism is Y, Derived polymorphism is C
  VARIANT 235: note = Ancestral polymorphism is W, Derived polymorphism is G
  VARIANT 255..438: note = Derived polymorphism lacks residues 255 to 438
MAGWCEEAVALLQRPAAAEMAVDVLLCAVPIWAAVMIGLVVGWSWRPRWTGLLFLGLRTRLRIIWLPPGLGARRLWFACTALSACSVAPRLLSSAFRRCRGKQQDKASPEDTAAVARDGGGCADGRTNFEGEHDTVTEKDLELLLQLLDNKESGDTAWQNLMERTTSNMTYKAWRREPEEGPIMYCSRTIFEDATPELVRDFFWDGDFRLKWDPMLAYSKSLDEFPQNGATIVHWIKKFPFFCSDREYIFGGRIWESGKTYYCVTKGVPYPSLPKKEKPRRVELYFSSWRIRAVQSPKHVGQQSACEVTLVHYEDMGIPKDVARVAVRHGMWGAVKKLQSGFRAYQQMRDTENTLSHSAIMARMTTRVSITASNGGLDHDLSIADKISGENDSSHAVQHGFDWKWVVFGGAVAAVCVLNTGLVGKVLLLGAARRQAKK

SEQ ID NO: 3709 - protein, 267 aa, Zea mays
  VARIANT 35: note = Ancestral polymorphism is T, Derived polymorphism is N
MASNNLLVDLKRCFSAPSLRSYLAEFISTFLFVFTAVGSAISARMLATPDVTSSAWPLVATAVAQAFGLFAAVLIAADVSGGHVNPAVTFAYAIGGRIGVPRAIFYWASQLLGATFACLSLNLLSAGEACACLRNRSRFLPANYTVVSHTDPSMNGVLTFLLVYTVHVVGEREPRSRGGDGKREFAATALGALAVGLTQGAFVLAAGALTGASMNPARSFGPAVVSGHFKNQAVYWAGPMVGAAVAALVYQIMACPSVTGNVEAVVV

SEQ ID NO: 3710 - protein, 203 aa, Zea mays
  VARIANT 3..203: note = Derived polymorphism lacks residues 3 to 203
  VARIANT 44: note = Ancestral polymorphism is A, Derived polymorphism is V
  VARIANT 68: note = Ancestral polymorphism is K, Derived polymorphism is E
  VARIANT 75: note = Ancestral polymorphism is D, Derived polymorphism is V
  VARIANT 84: note = Ancestral polymorphism is A, Derived polymorphism is T
  VARIANT 87: note = Ancestral polymorphism is Q, Derived polymorphism is L
  VARIANT 132: note = Ancestral polymorphism is P, Derived polymorphism is R
MKQLFGKASVLDSEPTELQALALPVSGHPSSGIFMDHLALDSDASMAILDEWTEPAKLVLNSSALLTEEHQSVLDAFHLLREDAYVQKMVMALSTDKAVWNAVMNNDVVQEFKRSFKDAKETYLKGSSTPPPPGFMMWVMKNVHAKIREFFKTMFGLTNILFQAGDHSYQAGEQNYDFYDCIVRMSFMLTVFVFVMVTVARIR

SEQ ID NO: 3711 - protein, 204 aa, Zea mays
  VARIANT 59: note = Ancestral polymorphism is V, Derived polymorphism is A
MDTDDAQEPATPTSPSPSPSSSSSSSSSSSSSPKKRARRDGGRHPTYRGVRMRSWGKWVSEIREPRKKSRIWLGTFATAEMAARAHDVAALAIKGARDAHLNFPGLARLLPRPATAAPRDVQAAAALAAAADFPLPNAESGGSASDGAPQDDAEPSPDDALFDLPDLLLADLRCCGPPPSWAVDDDVVGGGAFRLIEEPLLWEY

SEQ ID NO: 3712 - protein, 503 aa, Zea mays
  VARIANT 14: note = Ancestral polymorphism is M, Derived polymorphism is I
  VARIANT 21: note = Ancestral polymorphism is H, Derived polymorphism is Y
  VARIANT 64: note = Ancestral polymorphism is R, Derived polymorphism is T
  VARIANT 70..503: note = Derived polymorphism lacks residues 70 to 503
  VARIANT 169..503: note = Derived polymorphism lacks residues 169 to 503
  VARIANT 292..503: note = Derived polymorphism lacks residues 292 to 503
  VARIANT 317..503: note = Derived polymorphism lacks residues 317 to 503
  VARIANT 344..503: note = Derived polymorphism lacks residues 344 to 503
  VARIANT 349: note = Ancestral polymorphism is P, Derived polymorphism is H
  VARIANT 355: note = Ancestral polymorphism is G, Derived polymorphism is C
  VARIANT 367: note = Ancestral polymorphism is T, Derived polymorphism is I
  VARIANT 368..503: note = Derived polymorphism lacks residues 368 to 503
  VARIANT 385: note = Ancestral polymorphism is L, Derived polymorphism is Q
  VARIANT 441: note = Ancestral polymorphism is E, Derived polymorphism is V
MILLFNEELIKVQMLLTSFLHRFWIQNLMLVPQVTHIILLVLIRPCQDMQQAITIIIKTMPEFRWPCRYYEILGVSKDESQDDLKKAYRKAAIKDHPDKGGDPDKCCYDGVLLFPDSVYISFFLIYKSMAMFGYKVFKEQAQAYEVLSDPEKREIYDQYGEDALKEGMGGGGGMHDPFDLFQSFFGGESPFGGGSSRGRRQQRGGDVVHPLKVSMEDLYNGTSKNLSLSSNVLSSKCNGKGSKSGASSRCADCQCSGFKVQIRQLGPGMIQQMQHPCNECKGSGETVSDKDRCPQCKGDKVVPEKKVFEVVVEKGMQNEHKITFPGEADEAPDTATGDIIFVLQQKEHPKFKRKGDDLFYEHTLTLTESLCGFQFVLTHLDNRQLLIKLNPGEVVKPDSFKTINDEGMPMYQRPFMKGKLYIHFSVEFSDSLSSEQCKALEVVLPPKPVSQYTDMELDECEDTMHYDVNIEEEMRRRQQQHQEAYDEDDNVPGGGQRVQCAQQ

SEQ ID NO: 3713 - protein, 346 aa, Zea mays
  VARIANT 66..346: note = Derived polymorphism lacks residues 66 to 346
  VARIANT 65: note = Ancestral polymorphism is G, Derived polymorphism is V
MARAPGGARRRGGGSGRRGQADGGQAVRKGHWTAEEDAVLLRHVLVHGPRDWSSIRSKGFLPRTGKSCRLRWVNKLRPDLKTGCKFSAEEERVVLELQAQFGNKWARISTYLPGRTDNDVKNFWSTRQKRIARLLGTPPRGRSSRSRSRSAKGKAPVVASSLESRPATVVPCLDEVPLEGSSSGVVHPCSAATPFMETRSVSAALAPYDWAGSGLFSFDDGALPLACNSHACSSSNAAALLPFDQPPYPLLDVQVQGVPAGWNWNMAPGFANAGATDHLAYQELLPLTQAAPMVLPFFDAEYPLGGVKAELPDAAPDNFDDLPPDVFDSFDQPPPPVSPPATSSGF

SEQ ID NO: 3714 - protein, 98 aa, Zea mays
  VARIANT 53: note = Ancestral polymorphism is F, Derived polymorphism is I
  VARIANT 39: note = Ancestral polymorphism is A, Derived polymorphism is V
  VARIANT 30: note = Ancestral polymorphism is W, Derived polymorphism is L
MDDRGGGGDAKRWPWWAAASAAQAAAGLAWFRRGRSGTAVAMPFKAFGIASLIVGSGATAVAAGVLAAGVGSVEEMKGVGASIRRWMGAPPRRAGGSD

SEQ ID NO: 3715 - protein, 226 aa, Zea mays
  VARIANT 148..226: note = Derived polymorphism lacks residues 148 to 226
  VARIANT 129..226: note = Derived polymorphism lacks residues 129 to 226
  VARIANT 29..226: note = Derived polymorphism lacks residues 29 to 226
  VARIANT 19: note = Ancestral polymorphism is P, Derived polymorphism is T
  VARIANT 14..226: note = Derived polymorphism lacks residues 14 to 226
  VARIANT 11..226: note = Derived polymorphism lacks residues 11 to 226
MAAPREEGATELNQESRWPVWSSLLLYRQILDEIEANDYDNFTRKAYVPKMKKLMALPKAYLRSLVNELISDSIASKKPKIRKRENNNSVSSSAPSIPNTQDVITTFCEVVEDFCGKTKIPDDGDGGDWLSIPLGDVKVLVNEITSVRSKRILHEVPMDTVTRLLDVIDRQIRYSQGLSIDVKENSDVVDAEPLVFSALESSHAALAIMTHHDMPKQLYREEVCPR

SEQ ID NO: 3716 - protein, 375 aa, Zea mays
  VARIANT 123: note = Ancestral polymorphism is A, Derived polymorphism is T
  VARIANT 140: note = Ancestral polymorphism is A, Derived polymorphism is T
  VARIANT 285: note = Ancestral polymorphism is L, Derived polymorphism is V
MRKVLINAVLFPALAAAVALAIFCFVRCRRRRGRGRGRDRSVLPSHGGGARADRFQAGGASGGYAAGGGEEALMRFPGGEALTVAAILEAPGEVVAKSSHSTLYRAGLSAGEAVALLRFVRPACAAGADEARAAARALGAARHPNLVPIRALYIGPRGEKLLVHPFYAAGSLRRLLQEGINDSQRWEIICKLSIGIAKGLDHLHTASHKANVHGNLKTNNVMLDADFQPRISDFGLYLLLNSAAAQEMLETSAAQGYKAPELMKMRDATRESDVYSLGVIMVEMLAQKEVADGRNKPPPNARDIHLPASFRDLVLERKISEAFGSELLLKRSKDSGMEGRLDAYFELATACCNPSPSLRPDTKKILKRLEDIARQ

SEQ ID NO: 3717 - protein, 208 aa, Zea mays
  VARIANT 44: note = Ancestral polymorphism is M, Derived polymorphism is V
MEAQNGSGVGAPVVLNVYDLTPMNNYLYWFGLGIFHSGIEVHGMEYGYGAHEFPTSGVFEVEPKSCPGFTYRRSVWMGTTDLSRAEFRSFIENLAGKYNGNTYHLISKNCNHFTDDVCKNLTRKSISGWVNRLARVGSFFNCLLPESIQVSTVRHVPTHPAFSDDDMDSVSSSVIGDSDLEELDQHLLPSTADVHSIDVPPKLAKDLL

SEQ ID NO: 3718 - protein, 270 aa, Zea mays
  VARIANT 18: note = Ancestral polymorphism is H, Derived polymorphism is Y
MLLNPASEASVLDTIRQHLLEEPADESFGSLVADQWSGSLPFRTDDADDMVVFGALQDAFAYGWLPDGSFVHVKPEPVRSPDSSSYPCSYDGSPCFGLLDPEPPLTPGTTTPSSRGQEEAAAAMARGKHYRGVRQRPWGKFAAEIRDPARNGARVWLGTYDTAEDAALAYDRAAYRMRGSRALLNFPLRIGSGDKRPSPAPPEPATSSDSSSSSASGSHKRRKRGEAAAANMAMALVPPPSQLNRPAQPWFPAAPVEQAAMAPRVEQIVV

SEQ ID NO: 3719 - protein, 453 aa, Zea mays
  VARIANT 302: note = Ancestral polymorphism is S, Derived polymorphism is Y
  VARIANT 292: note = Ancestral polymorphism is D, Derived polymorphism is A
  VARIANT 286: note = Ancestral polymorphism is N, Derived polymorphism is I
  VARIANT 209..453: note = Derived polymorphism lacks residues 209 to 453
  VARIANT 72..453: note = Derived polymorphism lacks residues 72 to 453
  VARIANT 37..453: note = Derived polymorphism lacks residues 37 to 453
MGSSPPPLRRAGSERRSPQPAAKRRQAGEGERWKRSGAPANRICSGFFVAQPSPQRHRRRRTSDSFSVLTIEAVRDYHLSEVNVVNGHTFLFRASQRLIPNHYKISAKFLDYFLLHREDQEVSYGLNWAIAGKGVIVKDKVLHNLETSELQKGGATYPDFLSGIPLHVRGDVIGGVPDRAISHDTSPLTIYATSSISNNVKTVLGSGTQYANGFAVADIERSSLILCGKAFADSAIVKDALTAMTAPILSARGGLPVPGWILNFGGSTVLLFAPVEIMMSCVEIHNALLSIDCGAVISSKGSTVLFPTKASREQKLLTKPTAVIIVSSDSSGAIPSVCKLSPGQAAYHFLAGYHDGKFVPAYNRAPSPADPLALASSLFSHLKEDDTPSYLINAKHSGKYIDGNGFMKLLKLALSHDLPDIKTEGSRVGELKGKYRSFLSSKFGQCLPEEFSF

SEQ ID NO: 3720 - protein, 258 aa, Zea mays
  VARIANT 67..258: note = Derived polymorphism lacks residues 67 to 258
MGRDERFPVWEAALGAGVAAAFAAGLVGVYLSMPDSDYSFLKLPRNLQELQILTGHLENYTSDYTLQVLVGYCAVYIFMQTFMIPGTIFMSLLAGALFGQLRGVALVVFAATAGASSCYFLSKMIGKPLVFTLWPDKLSFFQRQGDPNIAKYLHQLGFTDSRCPLPHILTGNSHWPYPSFLCDCQGWNRSWRINFAKRPLRHPVDSAAIPDRCCFSHTSIVGQGRGTRKTIRNGCRRVVITKAPSTCTYQHAAMQWLH

SEQ ID NO: 3721 - protein, 923 aa, Zea mays
  VARIANT 111..923: note = Derived polymorphism lacks residues 111 to 923
  VARIANT 105..923: note = Derived polymorphism lacks residues 105 to 923
MASTHVYKKNYRCDRSLQQFYTGGPFAVGLAPGGDGEGGAEAEAFLACACGGEVRVVSAADASAIGEPVDGDSEAITALALSPDSRLIFAAGHSRLIRVWDLASRTCIRSWKGHDGPIMAMACHASGGLLATAGADKKVCVWDVDGGFCTHFLRGHMGVVTTIMFHKDPKRLLLFSGSEDGTVRVWNLETKKCVAVLKEHFSAVTSLALSDDGQTLLSAGRDKIVTAWDIRKYSSKKTIPTYEMIEAVSFIGSGSELLACLGIELANIKEKSAGYFLTVGERGVVRVWCLESCVCVFEQQTSDVTVNSENEETRRGFTSAVMLPNDQGLLCVTADQQFLFYCPKRTDDGDFELSLYRRLIGYNDEILDLKFIGEEEQYLAVATNLEQVRVYDVASMSCSYVLAGHTEIVVCIDTCVSASGKTLVVTGSKDHTVRLWDAERKGCIGIGKGHLGAVGSVAFSKKTNNFFVSGSSDRTIKVWTWDDALGDAEDEVPLKAKAVVAAHDKDINSLAISPNDGLVCSGSEDRTACIWKLPNLVLSVVLKGHKRGIWSVEFSSVEQCVMTSSGDRTIKIWSVADGSCLKTFEGHTSSVLRASFLSRGTQVISCGSDGLVKLWTIKTNECIATYDKHDGKVWALAVGMKTEMVATGGTDAVLNLWHDSTMEDKQEDFRKKASETCYCYTLSIYNCKQDACFWKKNYEISDIRSCINIEEEVLRGQELENAVSDSDYAKAIQLAFELRRPHRLLDLFSKLARRADAEDPIEKALLGLPTDGLRVLLEYVREWNTKPKFCHVAQFVLFRLLRSFSPTDILEIKGISELLEGLIPYSQRHFSRVDRLVRSTFLLDYTLMRMSVVDPDVDAGTIKDEMNGSSVENGELAEPRPASPVPQKSSKKRKSGKSGKKGKEKKVKVASSGLLSKDVSVEP

SEQ ID NO: 3722 - protein, 339 aa, Zea mays
  VARIANT 234: note = Ancestral polymorphism is L, Derived polymorphism is P
  VARIANT 101: note = Ancestral polymorphism is G, Derived polymorphism is V
  VARIANT 63: note = Ancestral polymorphism is Y, Derived polymorphism is S
  VARIANT 59: note = Ancestral polymorphism is R, Derived polymorphism is S
  VARIANT 56: note = Ancestral polymorphism is C, Derived polymorphism is S
MGRSPCCCHDAGVKKGPWTEEEDRALVDHIQRHGGHVSSWRNLPKAAGLNRCGKSCRLRWTNYLRPDIKRGNFTDDEERLIIGLHAQLGNRWSTIATHLDGRTDNEIKNYWNTHIRKKLLRMGVDPVTHQRLPPDDLLLAVSASPTTTILSAAASQLRGLNTALMQVQALQFLLQAVSGVGNDVNAAAAAANGGGGLVPSLSAAADNNAVLNASRSVVPGFQDLQLTTMTRPLLVSHANHGSADHHPSYIATDDVVQRRLNASAPPVVGGGACAEPLAVALASTAYRHQVAAAADEPVNGFAELILSEPIEMPSMCSLEDEDHFWKDMLVESSSFSLPL

SEQ ID NO: 3723 - protein, 270 aa, Zea mays
  VARIANT 180: note = Ancestral polymorphism is A, Derived polymorphism is V
  VARIANT 102: note = Ancestral polymorphism is G, Derived polymorphism is S
  VARIANT 99: note = Ancestral polymorphism is R, Derived polymorphism is G
MAAAAVRRLLRGASSTSVSNTSRLLSSTTSPPPHRSPNTNSPVAFDWSDDDADGSSHLPPSTEKKDELPPPYYDPFNKKPAIAEPSDPTNLQEVFHKMRKEGLTDYAIKMFDGLSKDGLTHEALALFAVIKDRGSMPDVVAHTAVLEAYASAGPAHWRDAVRTYDRMLASGVMPNAYTLAVLVRGLAASDRCAEAGKYLVEMLDRGMRPNVATYLAAFEAYLRMEKVEEGKALLETMKGKGFRPDEEAVRGGTVKRGQVFDGLMKLLFGK

SEQ ID NO: 3724 - protein, 162 aa, Zea mays
  VARIANT 11: note = Ancestral polymorphism is T, Derived polymorphism is M
  VARIANT 41: note = Ancestral polymorphism is K, Derived polymorphism is M
  VARIANT 62: note = Ancestral polymorphism is G, Derived polymorphism is R
  VARIANT 80: note = Ancestral polymorphism is N, Derived polymorphism is T
  VARIANT 88: note = Ancestral polymorphism is T, Derived polymorphism is I
  VARIANT 104: note = Ancestral polymorphism is I, Derived polymorphism is T
  VARIANT 105: note = Ancestral polymorphism is E, Derived polymorphism is G
  VARIANT 115: note = Ancestral polymorphism is T, Derived polymorphism is P
  VARIANT 125: note = Ancestral polymorphism is D, Derived polymorphism is A
  VARIANT 145..162: note = Derived polymorphism lacks residues 145 to 162
MKGSLSHELETGLPAADVWEVYGGLLVGDLIPQLLPQVFSKVELVEGDGGVGTVLLVTLPPGTPGSEAFKEKFVKVDDENRVKECLVTEGSFFDRGFKKYLVRIEIIGEDREASTIRSTIEYEVDQEHAGNPPVASSSGLATIAKAIAEYIIKQKKKGPPES

SEQ ID NO: 3725 - protein, 98 aa, Zea mays
  VARIANT 94: note = Ancestral polymorphism is V, Derived polymorphism is A
  VARIANT 49: note = Ancestral polymorphism is D, Derived polymorphism is G
  VARIANT 44: note = Ancestral polymorphism is T, Derived polymorphism is M
  VARIANT 8: note = Ancestral polymorphism is R, Derived polymorphism is S
MRTTASGRMLLSVLVALAVTAAHHAAAVGPPKPRGQETHLFEATVRVPDNGAAGDLEEYNYRLLANVLGRSHCVARGSLQTTTAPVQRQKTLHVFFLY

SEQ ID NO: 3726 - protein, 87 aa, Zea mays
  VARIANT 58: note = Ancestral polymorphism is L, Derived polymorphism is V
MQRQLSVSSMPKLLPEEAALGGDDDDVEAKPEKAPAPRPSGKERSVHLVPLIVLLCFLLLFLCSHAPSPSDMSSFGKKDGSMKARLL

SEQ ID NO: 3727 - protein, 314 aa, Zea mays
  VARIANT 174: note = Ancestral polymorphism is K, Derived polymorphism is I
  VARIANT 66: note = Ancestral polymorphism is G, Derived polymorphism is E
  VARIANT 37: note = Ancestral polymorphism is E, Derived polymorphism is Q
MATSTLSTVKVSNVSLKAAQREIKEFFSFSGDIVHVEMQSGDELSQVAYITFKDNQGAETAMLLTGATIVDMAVIVTPANDYELPASVLAALEPKDTKPSALQKAEDIVGTMLAKGFILGRDALDKAKALDEKHQLTSTATARVSSFDKRIGLSEKISVGTSVVNDKVKEMDQKYQVSEKTKSALAAAEQSVSTAGSAIMKNRYVLTGAAWVTGAFSKVTSAANDVGAKAEEKIAVEQEDKNAEGGPGQANISDIPAAHRELDSEFANIHVSETPEDVPISTVTVPAVTDEEPSTATPAAEVSKKPEAAQGLIL

SEQ ID NO: 3728 - protein, 204 aa, Zea mays
  VARIANT 36: note = Ancestral polymorphism is C, Derived polymorphism is F
  VARIANT 17..204: note = Derived polymorphism lacks residues 17 to 204
MDRFPRSRSGSQLATKQCMRGGPTLPEFFFLVKSYCIHFTVMAMGLINANPIIHEKKERRARQAPETTDENAAEPIDQLEIFDILLNDFFKYIKDPEHPYSLEQLNVVTEDSIELNDESNYVRVTFTPTVEHCSMATIIGLCIRVKLVRSLPPRYKVDIRVAPGSHATEAAVNKQLNDKERVAAALENPNLLDMVEECLSPTFD

SEQ ID NO: 3729 - protein, 830 aa, Zea mays
  VARIANT 15..830: note = Derived polymorphism lacks residues 15 to 830
MCRPCYEYNRKDDTQACPQCKANKRHQGLEVKPRPTVKCVLGHDFILHFPVDNYLCDANRSCELPNNLYLLVAQFFLVEVWALDTMMTTTSHLAGTLTSRWHSALLVHSIMQTGPTTVASGFAYAKFGKTKVIVSVKMPRKVVSGPDYDDDYDDYDEYDDDDDDDDEYDETRYGNNTPVMTGKETLKNSSSTVSVHWTCSMCTFSNHESMVYCEMCGVFRETFVKSAKDGLLKDTAVAVSSEPRTSAASKNDSAKAPVKTRAVNSDGDSMRKHASMSYDKANSTQLPSAGSSLGAEKKKKTPVLSEEVPVERIALLASDGFQSKGNQNSGASSSSQNDNVIQKLSSDVGQLNVNKNNVNVTKSCLPDEYKPEKWMLADLESRALSQLNLAIVGHHPTYFVNTVGHVDSGKSTLSGRLLHLLGRISKKYMHKNEKESKEKGKGSFAFAWAMDESSEERERGVTMTVAVAYLETKKFRVVLLDSPGHKDFVPNMISGATQADAAILVVDASTGSFEAGMDGEGGKSVGQTKEHAQLVRSFGVEQLVVAVNKMDAVDYAKERFDFIKLQLGSFLRSCNFKDSAITWIPLSAVENQNLIKAPSDARLTSWYQGFCLLDAIDFLQLPSRDVSKPLIIPICDVIKSQSTGQLAAYGKLETGAIQIGSKVLVLPSGQEATVKAIERDSNSCTVARAGDNVAICLQGIDGKQLIPGGVLCHPGFPVPVANHLELKVLVLDITTPILVGSQVEFHIHHVKEAARVTKIVALLDKTGKPSKSAPRFLKSKQNSVIQVTLDGAVCVQEFSKSRALGRAYLRSAGRTIAVGVVNRIIGQDQN

SEQ ID NO: 3730 - protein, 288 aa, Zea mays
  VARIANT 237..288: note = Derived polymorphism lacks residues 237 to 288
  VARIANT 223..288: note = Derived polymorphism lacks residues 223 to 288
  VARIANT 177: note = Ancestral polymorphism is R, Derived polymorphism is M
  VARIANT 100..288: note = Derived polymorphism lacks residues 100 to 288
  VARIANT 77..288: note = Derived polymorphism lacks residues 77 to 288
MHHDPNPFDEGSAEDNPFSNGGAGGGKQQYGFRPTEPVGFGGASRGDAVVDVPLETMGDSRSKVKELSSWESDLKRREADIKRREEALKNAGVPMEEKNWPPFFPIIHHDIANEIPANVQKLQYLAFASWLGIVLCLSWNFVAVIVCWIKEGDSKLFFLATIYALLGIPLSYLIWYRPLYRAMRYAVTIFELFTVDNFASYTTNSAFSFGWFFLCYLIHIGFCIIAAIAPPIVFHGKSLTGILAAIDTFSEHVIIGIFYFVGFALFCLETLLSIGVLQKVYMYFRGNK

SEQ ID NO: 3731 - protein, 246 aa, Zea mays
  VARIANT 158: note = Ancestral polymorphism is W, Derived polymorphism is C
  VARIANT 160: note = Ancestral polymorphism is G, Derived polymorphism is V
  VARIANT 162: note = Ancestral polymorphism is F, Derived polymorphism is S
  VARIANT 168: note = Ancestral polymorphism is S, Derived polymorphism is L
MQLSATSGSDDATAVRCGSWLEQKKPRSVVLVVCASFVAAAVVGLASTPSVYRLVPPAGSPLKGACQVLVAFSRKANVRVPDAAAELYAEEHVKAPLLQPPRESLEHTDQFRWLDKAAVVTSADLEDGNPWRLCTVNQVEEAQTTFVQQGTVTDSRVWRVAFSVPAASLTCIETVFVVASIALYNRAAAPAARRFFGRAQSFSPLQLMGLGHGAVVAALRREAGVLLRQAPETMRGASTAFYFLSC

SEQ ID NO: 3732 - protein, 1271 aa, Zea mays
  VARIANT 127..1271: note = Derived polymorphism lacks residues 127 to 1271
MDFLTLPRRDLQALCKRNGIRANMTSAAMADALRALPKVEGIEEYVKVLQPVSVLQTAVKPVNEEQKQESPLPRGRRVTAQSSEPIEAEEDKENDAKRQSNKEGVQVPGVGRRGASRRARPVPAVPQTLGKAVAEEDGQGEQNLKQEAKRDSAPAPVVGRLARPSTVVIARADESEVAGVEEEQSKEVVDDALALGVGRRGASRRARPAPSIAALAGNVVEDEEQIVPIPRGRRVKAHGNSSEPIRLDTSYDDEKEEAKPVEEQDDAQIVGVGRRRGASRRAQAASAIAAPEAKTEEEQKAPITRGRRVKAKSTELIRLDDSSMEKKEDPKPEEETGDAPAVGAERRAPSPSKAPATRRSGAASKAEAGDVAVEVVSSLATRQRKTMKAAAAAAEAEEKAPRRATRRGAVTSTLMQQELQEKPQEAIGATDEAARALPIRPTRQRKPTMKAAAAATAQEKAPIATRRGALMTLLQQDVQEEPKEAVGAPVSHQRCDALEETKEAFVPQKEEINELDAPKQDEDEDMVIIDGEKLMEETPAEDPPVTDQERTGKSEFQEQQVDDEEKCLATLEEPPIIGLVSMVTEQPSEDDGGVNFQDGGGSSAALLDKNAGEEIELVAGVRALQVPLTGNGSDASHESEMRKFNEVLTVREKNSEVDTQEVSKEMEHTDIAELQADIVDEAAFLDCSSIVNLVAGEETEVVNTEDGLGCEEDGDVDKVLHDSVDDTILIDCSSENVEMEKAGNVTREMPENQAALDEDVGKPNEVVIGDKPQDTVTDKVVQEGREVLITDEMQQGTAGMHDEIEDDQFESVFVQADQVVTADNLLEQVTDREITVEENTALIVGERQQSTVTMDEDVVEDHSDTDGDHSNEHIEAVTTVKVPELKLIEDIFVQSDHAVAADNLPEQVRDCGITMETTSLIVDEKQQIMVTVDGDLVMDGSETDNVHPDEQMEVVTAEEVLEDTGITVEDVEEKQKSTVTVDKDVVDDHFFKTDDVHADEQMEASTTDEVPELTEADYEVVEEKQQSTYTMNGGIEDDHFKTHVAHADEKKEVVATDVPEVTGTVGEIEEKTSVTMDGDVVFDHADGQKEVIVTEVPDEVTVTGDEGVERKAAVITEAIPDHGTAPSIAHTMNGCVKETHFGDGNEQKKVITADIISIPQDDCVRKENASSIDVAESLSSNKSSGCKNSSEKNTTEPMAVLKDKGLKATKKPVDLLALSLGKLKAKLKDRLNAEKKKEAKRLALARVDENVCRSIPRKGAGQQRNLNLQQH

SEQ ID NO: 3733 - protein, 147 aa, Zea mays
  VARIANT 45: note = Ancestral polymorphism is T, Derived polymorphism is M
MPPKLDPSQVVEIGPLGLSPKKIGEDIAKETARDWKGLRVTVKLTVQNRQAKVSVVPSAAALVIKALKEPERDRKKVKNIRHSGNVALDDVVEIARTMRPRSMAKEMAGTVKEILGTCVSVGCTVDGKDPKDLQQEIDDGEVEIPSA

SEQ ID NO: 3734 - protein, 126 aa, Zea mays
  VARIANT 67: note = Ancestral polymorphism is R, Derived polymorphism is C
  VARIANT 51: note = Ancestral polymorphism is E, Derived polymorphism is K
  VARIANT 49: note = Ancestral polymorphism is A, Derived polymorphism is D
  VARIANT 42: note = Ancestral polymorphism is A, Derived polymorphism is P
  VARIANT 40: note = Ancestral polymorphism is F, Derived polymorphism is L
  VARIANT 37: note = Ancestral polymorphism is A, Derived polymorphism is T
  VARIANT 34: note = Ancestral polymorphism is G, Derived polymorphism is D
  VARIANT 32: note = Ancestral polymorphism is R, Derived polymorphism is C
  VARIANT 26: note = Ancestral polymorphism is K, Derived polymorphism is E
  VARIANT 15: note = Ancestral polymorphism is R, Derived polymorphism is W
MEDGSAVVEKFAFGRKLGGGPKKNAEGQYGQRVGRGAPVFLASVLEYLAAEVMELAGAAARDSKRGRIVPRYLLLAIRKDEELGNLLVEVTITHDGVLSNINPALLPNKVVAAAGSSKSPTKAAAK

SEQ ID NO: 3735 - protein, 126 aa, Zea mays
  VARIANT 16: note = Ancestral polymorphism is A, Derived polymorphism is D
  VARIANT 45: note = Ancestral polymorphism is L, Derived polymorphism is F
MANQSKAKLAPLLARANLVIARDIEWANIMFAFEQESRYIIMDPLFPQSPVGFIREKSNIIFRQLLRTRRPFVAEITDAMGNEIFKVRRPFWWINSSIYVEVNDKEIGVVHRRWHLWRRIYDLYLG

SEQ ID NO: 3736 - protein, 105 aa, Zea mays
  VARIANT 22: note = Ancestral polymorphism is S, Derived polymorphism is N
  VARIANT 25: note = Ancestral polymorphism is F, Derived polymorphism is C
  VARIANT 64: note = Ancestral polymorphism is L, Derived polymorphism is P
MITKLFTDAGQYAIRFGDEGQSHKFAPAEDVIAITCRLLRLNVIAITCLFQLAYVSIMLQVEELHVVRQLTLPERAVALALAISLDSDYFSRRGGWGLPFLIATE

SEQ ID NO: 3737 - protein, 440 aa, Zea mays
  VARIANT 396: note = Ancestral polymorphism is C, Derived polymorphism is W
MLACIACSSKEGGEDGSRAAATTPHGKEAVKSLTSQLKDMVLKFSGSSKQCRGTPGAQSFRSSGGGRYLRPYPSFIDVTGFAPANKVLGNALAGAGAAGGAARTASSDTLDLTRSNRKTPQSSGWIPSTEAAAAGDDVREWTAQVEPGVQITFGTIPSGGNDLKRIRFRCVVVTRPLLLPLLNDSLRRPLILATELTPKCMVVSRICYVRRRSREMFNKWEAQRWWGENYDRIVELYNVVTFSGRQQGCSTPASSVDDSALRDSSYSRVGSASRGSPITVPPPPVASKERLARSASFRATAAGSSSAPYAAAHSARAAYFPSAAVPDPSDHVWAHHFNMLNSAAAGTSAMGGGGPSPYDPSSVATASSRDEASVSLSNASDLEATEWVEEDEPGVCLTIRELGDGTRELRRIRFSRERFGEERAKVWWEQNRERIQAEYL

SEQ ID NO: 3738 - protein, 479 aa, Zea mays
  VARIANT 317: note = Ancestral polymorphism is C, Derived polymorphism is R
  VARIANT 297..479: note = Derived polymorphism lacks residues 297 to 479
MGWGTVVYEGAVVGSSLVGLGWAGLWFLNRRLYKEYEERRVLVQILFGLVFAFSCNLFELVLFEILPVLSKHARFLNWHLDLFCLILLLVFVLPYYHCYLLLRNSGMRRDRAWLVAALFLLVFLYGFWRMGIHFPMPSPEKGFFTMPQLVSRIGVIGVSVMAVLSGFGAVNLPYSYLSLFIREIDETDIKTLERQLMQSIETCTAKKKKIILSQMEMERIQGSEEKLKARSFLKRIVGTVVRSVQEDQTEQDIKNLEAEVQALEELSKQLFLEIYELRQAKLLLCSPAIAMQIAAAYSRTWRGHLQNLLGYALSVYCVYKMLKSLQSVVFKESGSVDPVTMSITIFLRHFDIGIDVALLSQYISLMFIGMLVVISVRGFLANVMKFFFAVSRVGSGSTTNVVLFLSEIMGMYFISSILLIRKSLANEYRVIITDVLGGDIQFDFYHRWFDAIFVASAFLSLLLISAQYTTRQTDKHPID

SEQ ID NO: 3739 - protein, 217 aa, Zea mays
  VARIANT 14: note = Ancestral polymorphism is A, Derived polymorphism is T
  VARIANT 82..217: note = Derived polymorphism lacks residues 82 to 217
MATVARTLVAACPARSLLRFRSRRLPSSSSIRPARQRAGVGSVRCMARRPDSSYSPLRSGQGGDRAPTEMAPLFPGCDYEHWLIVMDKPGGEGATKQQMIDCYIQTLAQVLGSEEEAKKKIYNVSCERYFGFGCEIDEETSNKLEGLPGVLFVLPDSYVDAENKDYGAELFVNGEIVQRSPERQRRVEPVPQRAQDRPRYSDRTRYVKRRENQSYQR

SEQ ID NO: 3740 - protein, 918 aa, Zea mays
  VARIANT 141..918: note = Derived polymorphism lacks residues 141 to 918
  VARIANT 48..918: note = Derived polymorphism lacks residues 48 to 918
  VARIANT 33: note = Ancestral polymorphism is A, Derived polymorphism is S
  VARIANT 27: note = Ancestral polymorphism is E, Derived polymorphism is K
MLVASGTDDGELVLLPVRLLSGPSIPELLDMAAQRYENGQLGVLRVPCDMGHFRQFVARLTAGIIQTYLECDPEFKYSEVLNPKRFLTNPSTPAHNDGLDNANWDLILYVNLELVNKMSNRRFIVKEMLGQGTFGQVVKCWDTETNDYVAVKVIKNQPAFYHQAIMEVSLLRTLNQKFDPDDQHNIVRMLDYLSFQNHLCIAFEMLGQNLYELLKRNHLRGLKLKYVQAFSKQILDAMVVMREAGIIHCDLKPENILVATAAAVKVIDFGSACLEGKTVYSYIQVLILPLYFDRAAITGLQRFSLAIRILYTTAIDMWSFGCIVAELFLGLPLFPGATEYDVLQRMVKILGQVYLPLNYAFLHAIIFIGQPPDELLREAKNTVRFFKHVGSIYAGNAAPIGLSSAYRILSEEEVEARDSKRQKMGKWYFPHLKLDRLICTYPWNNSELAETEKTDRLGLVDFLKGLLEFDPNKRWSPLQALHHPFITGESFTGPYEPIPETARIPVARAAAIDHNPGGGHWLHSGLSPQVGSVNRYLPLNNVYPPKVPFSYGSSYGSFGSHGSYTGNAGFGNSYGSIGDANAINMYYSPLGSSGLTQIGPSPDVRLRMRLSHDRGIRLSPGSLGPMSVGASPSQFTPPNYHMQIPANSTGTHGSGSPASGVIHGSPLGKAAAVGPYNMRRNLPMPPHDYVSQHGQGRFRDGVSFSHSDACAQGHTGHSHNAAVPSSYHSGWRPKIGSRSGISLEASSSHVPSKAPSQSFDFSASSTLDPANWDPNYSDESLLQEDNSLSADLSSNLHFGDATGQDHIFATSNPVPTNQRGDQLFHVSSQGVSAHSSVLINYGGYNPQNYPQQNARPRHGQPILHQRYNQATSSPMRPMGSHHNGQPAWPSSFGMGDGVPWGGTRGHSFTTRKDYGSIF

SEQ ID NO: 3741 - protein, 380 aa, Zea mays
  VARIANT 145..380: note = Derived polymorphism lacks residues 145 to 380
MEEHMGRRTVGGLLLTKGGSILLFREDGSRPRAKNCCSRHGCSGHHSVGKAKGKEVHRAAVANESTPATPRRPKICRNPDRMPPHGTSAPGSISKDAGGSCSETGNRSRDTPGPGRDLLARLKERVNTSRKRSLNRENSPQSPSGFTASSPSNSRSVSLSRPSHRAASRVRRADEGANAGADSVHRNGAGGARRSSQRGDAGLLLVEQQVARNHVPSEGFLSGFMARYRSGLQEGLSSLDDSVEDSNGYLRFDTGGIEELQNYLIFSDRHRGMRMDIDGMSYEELLALGERIGTVKTGLSDDALSTCLNRSLYMPTAPGSHEDCETKCSICQASSFEEYLSGEDVGKMACKHYYHLSCIEHWLRQKNRCPICKSVALKTK

SEQ ID NO: 3742 - protein, 1012 aa, Zea mays
  VARIANT 9..1012: note = Derived polymorphism lacks residues 9 to 1012
MKRMHSSLEFYLFLSPESVFHGWPSTSPCFPHPSPDRSLSQQFSNSIGKYISLSSDKDFSSTSRMSVSMKDLDPAFHGAGQKDYSGLVVWRIENFKPVPVPTSSHGKFYMGDSYIILKTTALKNGSFRHDIHYWLGKDTSQDEAGTAAILTVELDAALGGRAVQYRELQGNETERFLSYFRPCIMPQPGGIASGFNHVEVNDQEHVTRLYVCRGKHVVHVKEVPFTRSSLNHEDIFILDTKSKIFQFNGSSSCIQERAKALEVVQYIKDTFHEGKCEVAGVEDGKLMADVETGEFWALFGGFAPLPRKAPSEDNGEDKKIVIKLICINQGKLEQINFESLARELLEPNKCYLLDCGGEMYVWMGRNTSLQERKGASKAAEKLLIDDSRTKSHVIKLIEGFESVMFKSKFIEWPPTPDLKLSSEDGRGKVAALLKSQGLDVKGLMKVAPVKEELQPYIDCTGHLQVWRVNGNVKTFLSAADQSKFYTGDCYIFQYTYAGDDKEECLIGTWFGNRSVEVERVSALSLASKMVQASKFQAVQARLYEGKEPIQFFVIFQSLQVFKGGLSSGYKNFIAENNILDDTYSEGGIALFRIQGSGSENMQAIQVDTLASSLNSSYCYILHDGNTVFTWTGNVTTSLDHDLVERQLDVIKPDLPSRSQKEGRETDQFWKLLGGKSKYPNQKIERENESDPHLFSCIISKGNLRVKEIHHFTQDDLMTEDVFVIDCHSDIFVWVGQEVDAKVKSQAMDIGEKFIVHDFLMEKLSRETPIFIVSEGSEPQFFTRFFNWDSAKSHMHGSSYQRKLAILKGGLPPSLEKPKRRTPAFTGRGFGQDKSQRSRSMSTSPDRPRVRGRSPAFNMLTSAFENTSNIRNLSTPPPAVKKLFPKSGGPEHSRVSPKKSAISALTSSFEAPLKSTIPKSVKASPEPEKAIQEQGVVGGASENKLEDDEGRTIYPYERLTTTAEDPSPDIDLTKRESYLSSVEFKDKFNMTRAVFYKLPKWKQNKLKSDVQLF

SEQ ID NO: 3743 - protein, 273 aa, Zea mays
  VARIANT 161: note = Ancestral polymorphism is L, Derived polymorphism is V
  VARIANT 68: note = Ancestral polymorphism is D, Derived polymorphism is Y
  VARIANT 2: note = Ancestral polymorphism is A, Derived polymorphism is S
MSSAFSSRARVLLALLLGLYAACAAAAARVDDGLELTWGDGRGSVSPDGQVLTLSLDHTSGSGFRSKDTFLFARADVQIKLVPNNSAGTVTTFYFVSEGPWDVHDEVDLEFLGNVSGQPYTLHTNVYAGGSGSREQQFHLWFDPTADFHTYSIEWTQQHILVLVDGTPVREFKNHADWGVPYPSSQGMRLYGSLWNAEDWATQGGRVKTDWSQAPFVAQYRNFTAAAGGGYGLQMDAAAQQAMKWARDNYMVYDYCADAKRFPLGVPPECSMP

SEQ ID NO: 3744 - protein, 290 aa, Zea mays
  VARIANT 21: note = Ancestral polymorphism is L, Derived polymorphism is P
MAALLSMLLVGVALVQLGMHPSAATMDEDIELIWGASHTYFFMDGETESLALSLDDQQGSCFRSKAMFLYGTISMEIKLVEGNSAGVVATAYTISEGPWSYHDEIDLEFLGNETGQPITLHTNIFVNGVGGREQQFYLPFDPTADYHTYTIEWNPKYILIRVDGKAVRAFKNYEEYGVAFPTWQQQRLYGSLWDADEWATQGGRVKTDWSEAPFVAYYRNYTFAWCQPSPGVSWCGAEPRNSSRFDLDQRTLDELRSASDQHKVYDYCTDHKRYDGSEFPKECSLQRQGL

SEQ ID NO: 3745 - protein, 246 aa, Zea mays
  VARIANT 65: note = Ancestral polymorphism is E, Derived polymorphism is D
  VARIANT 159: note = Ancestral polymorphism is K, Derived polymorphism is N
  VARIANT 206: note = Ancestral polymorphism is L, Derived polymorphism is Q
  VARIANT 207..246: note = Derived polymorphism lacks residues 207 to 246
  VARIANT 214: note = Ancestral polymorphism is P, Derived polymorphism is L
MQMSSVASKVAVPESVLRKRKREEQWATEKKEKALVEKKKSIESRKLIFTRAKQYAEEYDAQEKELVQLKREARLKGGFYVSPEAKLLFVVRIRGINAMHPKTRKILQLLRLRQIFNGVFLKVNKATINMLRRVEPYVAYGYPNLKSVRELIYKRGYGKLNKQRIPLSNNQVIEEGLGKHNIICIEDLVHEIMTVGPHFKEANNFLWPFKLKAPLGGLKKKRNHYVEGGDAGNRENYINELIKRMN

SEQ ID NO: 3746 - protein, 75 aa, Zea mays
  VARIANT 72: note = Ancestral polymorphism is T, Derived polymorphism is I
  VARIANT 68: note = Ancestral polymorphism is R, Derived polymorphism is C
  VARIANT 65: note = Ancestral polymorphism is R, Derived polymorphism is H
  VARIANT 57: note = Ancestral polymorphism is S, Derived polymorphism is G
  VARIANT 56: note = Ancestral polymorphism is K, Derived polymorphism is Q
  VARIANT 45: note = Ancestral polymorphism is E, Derived polymorphism is D
MMAAMGGAVRVLCGAEKERVVGTRKAPGACPRCGGAVVAVDVESERRFLGLPLCLQSKRKYSCTRCLRRLVTLYS

SEQ ID NO: 3747 - protein, 564 aa, Zea mays
  VARIANT 128..564: note = Derived polymorphism lacks residues 128 to 564
MARRSSSSSSGAWRYLNPAYYLKRPKRLALLFFIFVAATFAFWDRQSLVSEYESEISRLEDDINRLHDQLRRAGVHLDENPVISNKNSRKNPVEIDHVNNERREKVKEAMLHAWNSYVKYAWGMDELQPQSKDGINSFGGLGATLVDSLDTLYIMGLKDEFQKARDWVAESLDFDKDYDASVFETTIRVVGGLLSAYDLSGDKVFLDKAKDITDRLLPAWDTTSGIPYNRINLAHGRAHNPGWTNGDSILADSGTEQLEFIALSQRTGDPKYQQKAENVITQLQKIYPSDGLLPIYINPHSGTASYSTITFGAMGDSFYEYLLKVWIQGNKTEHVKHYRQMWETSMEGLLSLTKKTTPSNYYYICEKNGGSLSDKMDELACFAPGMLALGASGYGPEKSEQIMNMAKELARTCYNFYQTTPTKLAGENYFFHAGQDMSVGTSWNILRPETVESLMYLWRLTGNTTYQDWGWDIFQAFEKNSRVESGYVGLRDVNTGEKDNMMQSFFLAETLKYLYLLFSPPSVISFDEWVFNTEAHPLRIAPVNYNKSIGTPVRPFGRKQGKPE

SEQ ID NO: 3748 - protein, 383 aa, Zea mays
  VARIANT 160: note = Ancestral polymorphism is V, Derived polymorphism is F
  VARIANT 153: note = Ancestral polymorphism is T, Derived polymorphism is N
  VARIANT 85: note = Ancestral polymorphism is L, Derived polymorphism is P
MKLHQVWQLGVKDMKAVPLPRPRSAPKRRAWIPAVAAFISIALVWAYLYPPPHYTSSVRDWLPAEPARELTDEERASRVVFRQILTTPPVLSKNSKIAFMFLTPGTLPFERLWEKFFEGHEGRYTIYIHASREKPEHVSPIFVGREIHSEKVTWGKISMVDAERRLMANALQDIDNQHFVLLSDSCVPLHSFDYVYDYLMGANLSFIDCFYDPGPHGNFRYSQNMLPEVTETDFRKGSQWFSVKRQHALMIIADSLYYTKFKLHCRPGMEDGRNCYADEHYLPTVFRMMDPDGIANWSVTHVDWSEGKWHPKAYRAKHVNLELLKNIASIDVSHHVTSDGKKVVTENPCLWNGAKRPCYLFARKFYPESINNLLTLFANYTLI

SEQ ID NO: 3749 - protein, 169 aa, Zea mays
  VARIANT 87: note = Ancestral polymorphism is M, Derived polymorphism is L
  VARIANT 103: note = Ancestral polymorphism is A, Derived polymorphism is S
MEHSGAKKSNKITEVVRMQQMLKKWRKLSVTPKEPSSPTSGGGGGNAGESKTRKFLKRTLSFTDGPPSGSPPPPPKGHLAVCVGPAMQRFVIPMEYLKHRAFAALLREAEEEFGFQQEGVLRIPCEVPVFESILKAVEKNKKDAAFCYCGVEYAADEVGRGTPNNPLCR

SEQ ID NO: 3750 - protein, 910 aa, Zea mays
  VARIANT 339: note = Ancestral polymorphism is R, Derived polymorphism is I
MGTRRVAMSFTHGPMTVGFVVLLTCVPIRVISIKTATSSPNNLPTTAPLHSSSSPSPPPPPPMTRITAPPPPSSPPGSPPPIRHSPAPATPPSRRRGRHSPSPSLALTPSSASTSSRPKPRPAPKRAYSPAQWVPLNSHPVFSRRDGDGGGGDAAWDAAASRLYAWDPSACSVHRIGVRTRDPDAENGEVDVTVESAVPSELLTPESDLGYMVTHISLNTDGSSLLLVGSHNLNIMYVHERISEDGDTIICRTAPIASQILPSDSDGIKVLQASWHPFSNNHFAVLTSDAVFRLFDLSSDLEQPEQGFYLQPIVPGKCQNASAICPVGFSYGSDHLWDRFSVFILFSDGSIFVLCPVVPFGSDYSKKHIQEIYEDVNAFGLKSSNPNVVTNSHLAIAWLEATFPDLLHQSTDTSFLMSKAHAYAPLDDSLTLQGPLCTVCEESNESESKSSSCEGKAVGFMYSSAGKDSVLVTAWGSGLLQVDALADEIQPRWNIGVPSRLNVDSHGQINNVAMICDSNSQDPLALRSHRPSSTGSNVKSNIEAVWMGHSPPLLRLAIVDLALPKTPNDNSLSLFADPLVPERFYCAHGGGLDMVTLHFLPFSYPEMSSTPPSVHPVLTTGNSETSSPFLSGFVTIADAYGHVQLAGITCLGECFVVEMKGWKEPAPLQLDLESKIVKDVEPPATGMISKELIAGPDPPILPSSSSLKSLTPDSIEGKSTLHHYIKVFHEYYVEYGHKVFIELKEHADYLKTEMEDKQKRLEAVKKSLISVEAKDGDINKRIDRAFKVYELLEKRIDSFKMLPAANKKPLTQAEQEFKSQLDRFADVELDALRSSIAALSARMKRFAQQSTGSAASTGMVPWQAQRAGRSHISESQMSLLKSSLEKLSLLNEENSLKLRLIDHELKNQER

SEQ ID NO: 3751 - protein, 460 aa, Zea mays
  VARIANT 245: note = Ancestral polymorphism is Q, Derived polymorphism is L
  VARIANT 226: note = Ancestral polymorphism is Q, Derived polymorphism is H
  VARIANT 181: note = Ancestral polymorphism is R, Derived polymorphism is C
  VARIANT 178: note = Ancestral polymorphism is L, Derived polymorphism is P
  VARIANT 140: note = Ancestral polymorphism is I, Derived polymorphism is V
  VARIANT 132: note = Ancestral polymorphism is A, Derived polymorphism is T
MLEYYSTNRTHNMPMPKMLSAYPYPTVAMAILKTRSTSMFTTKPQNIDRFSCSIVSATRLYGRREMEGGEEVEKEGNMSQLAGVQFLLSNEGKEVPLSSIEDRTACLCLFFSAHWCRPCRSFTPTLLQAYTALRSAGKSVEIIFVSLDRDEASFRDHFQGMPWLAVPFDAAGLLRQKLCARFAVERIPALIPLSASATPSSGLGSGEDAVRLVGEYGVDAYPFSAQRRRELESMDDARREGGRLQELLGCEERDYVISADDIKIPIADLDGKTVGLYFGAHWCPPCHVFTKQLKEVYNELKILRPGSFEVIFVSIDRSKGEFQASMSSMPWLAIPYSDAARKKLTRIFAVKGIPGLLILGLDGKVLKTDGRTAISTYGAAAFPFTESRVSEVGEALKREGDKLPRRVNDPRHRHMLELDMAKAYVCDECQQKGRYWVFSCKQCNFDLHPSCVGDNKVDNI

SEQ ID NO: 3752 - protein, 448 aa, Zea mays
  VARIANT 277: note = Ancestral polymorphism is M, Derived polymorphism is I
  VARIANT 314: note = Ancestral polymorphism is R, Derived polymorphism is L
MVMKEAAEEHDGRRDVTVTVEPALPVQQHRLPLSNLDLLLPPLDVSLFFCYLHPAPTAIALKEALAKTLVAYYPLAGEVVANGDGEPELLCSGRGVDFTETAAAGVELREVRLGAVDEGVEKLVPVKKTGVTMAVKLSKFTCGGAVVGCTFDHRVCDAYSFNMFLVAWAAAARGSSAPPPPDPCFRRSLVAPRDTPHRRAPSTDALINRLFSPRSAAPPPPPAAAGSVNRIYRIAAEDIAALKASAGPGRTKMEAFTALLWQLCARAASPRQSQCCMGVVVDGRTRMFPDGAMKAYFGNVLTIPYGVIGSEDLRCMALADVADDVHRWVAEAATGDHFRGLVDWVEALRPKPAAARAYLGGTGGNEAMACIVSSGMSFPVGKADFGTGLPAFASYHFPWPAGAGYVMPMPSARGNGDWVVYVHVAPEVAKVMEESTVFQALVNSYAFE

SEQ ID NO: 3753 - protein, 238 aa, Zea mays
  VARIANT 219: note = Ancestral polymorphism is E, Derived polymorphism is K
  VARIANT 199: note = Ancestral polymorphism is A, Derived polymorphism is S
  VARIANT 37: note = Ancestral polymorphism is A, Derived polymorphism is S
  VARIANT 24: note = Ancestral polymorphism is D, Derived polymorphism is Y
MEDYHVAEYKYVKNHELGLFAIFDGHLGDKVPSYLKANLFSNIMKEPLFWSSPQEAIKNAYCSTNKYILENTKQLGPGGSTAVTAIVVDGKDMWIANVGDSRAVVCERGSAKQLTVDHEPHETNERQRIEKHGGFVTTFPGDVPRVNGQLAVARAFGDQSLKAHLSSEPDISHVPINSSIEFVILASDGLWKVMKNQEAVDLVKSIKDPQAAAKRLTTEALARKSKDDISCIVIRFRC

SEQ ID NO: 3754 - protein, 483 aa, Zea mays
  VARIANT 243..483: note = Derived polymorphism lacks residues 243 to 483
MAAAAAAAPPSECADLMPPPPTAPRPRRRAREVSSRYLSTPVPPTPRLSTVSAASSTRSRSPTPSPRGRQRMATPFANENHPPPPPKGTVARRRAVQKLFDETGAGNPRASVGSNSADVLEATPRPLLRSTRGPVAPTARRGYPRLPTPARAGSCPTSAAVESDASSCCFSSDTSSTSTDFSEADGALGMAPAAPCESPTLLGPASCRGGRLSSELRSSVPESGGSSRASNPLCYRSLNSALSISMAMAGKPTPAGRPPQPQGPKATDLKKAATVGGRKAVGKQEDVHQLRLMDNSYLQYRLLNARAEAAGKAKAAAAEKSLYGLEEKIASLSVSVAEKRVEVQWMRRENRLSSVVNAQISCLNQWSDVEGSYASCLRGATRALYNGSLRLPIIGSVDVNCEELTEVLKSATQLLEPLTSCIDNFLPKVEQIDDVACNLAQVIATEKTLIEECGNLLYHAQNLQMRESSLWSQAMQLKQNEAK

SEQ ID NO: 3755 - protein, 335 aa, Zea mays
  VARIANT 156..335: note = Derived polymorphism lacks residues 156 to 335
MASNLLSAVAIEKETPESELPPTFLREDGRGAGSVRARFESMIRRVQGEVCAALEEADGGGARFVEDVWSRPGGGGGISRVLQDGRVFEKAGVNVSVVYGVMPPDAYRAAKGEAGKNEVAADGHKPGPVPFFAAGISSVLHPKNPFAPTLHFNYRYFETDAPKDAPGAPRQWWFGGGTDLTPSYIIEEDVKHFHSVQKQACDKFDPSFHPRFKKWCDDYFYIKHRNERRGLGGIFFDDLNDYDQEMLLNFATKRRKDTPFNEEHKEWQQLRRGRYVEFNLVYDRGTTFGLKTGGRIESILVSLPLTARWQYDHKPEEGTEEWKLLDACINPKDWI

SEQ ID NO: 3756 - protein, 111 aa, Zea mays
  VARIANT 66: note = Ancestral polymorphism is L, Derived polymorphism is R
MALHVVEGTCTGGAIISHLSSPPPSCSSSSCVVLLDAAEELANNQLPAAQRPAKNMSAFGVLVTALVLSCVAGASIAGYRYMDSEIMAQCMPLDSQHSENQPLRTEEAQQA

SEQ ID NO: 3757 - protein, 881 aa, Zea mays
  VARIANT 467..881: note = Derived polymorphism lacks residues 467 to 881
MSSRLCVKNLPKGADERRLRDVFSRKGEVTDAKVIRTKDGKSRQFAFIGYRTNEEADEALKYFNNTYIDTCKITCEVARKIGDPDAPRPWSRHSLKKSEYGSKDKNNAGAVDAPPKGSNAQGTSAHASGSKGSVANDPKFLEFLEAMQPRSKAKMWANDTAATLDTAAKDSVVAAKESKGPLKNVLTSENDSSSEDTSDEKVANDLSSENASEQLKTENKQDKNMTDADFFKSKVKKNWSDSESDDEGSAHQSNTTTDDEDSSDESQDSDNQLADTKGDPDKRNIVDKDTLVENTDLQEPEDLDNKESEDLDGRPRGTEIHEDQERADENGAPITDEKKLALETGRLYICNLPYATSEDDLVELCRQYGDVEQAHIVVNKATKISTGRGYVLFSLPDSAVRALDELDNSSFQGRVLRVKAAKPLNKLESFHETAVEKVSLKQKRLEQKKASEISGDTRAWNSFYMRQDTVVENIARKNGISKSELLDREADDLAVRIALGETHVIAETKKFLSRSGVNVAALEEHASKRNEKFKRSNYVILVKNLPFNSTEEELATLFQKHGSLDKIILPPTRVFALVVFVEATEAQYAFKKLLYTRYKDTPLYLEWAPENILSPTSAPVDEEVKNEVGERILTKANIDQTVEGVSAEEIDPDRVESRSVFVKNLNFKTTDESLKQHFSTKLKSGSLKSATVKKHVKKGKNVSMGFGFVEFDSVETATGVCKDLQGTVLDGHALILQLCHVKKDGQAAKKNGKDKSSTKLLVRNVAFEATEKDLRQLFSPFGQIKSLRLPMKFGSHRGFAFVEYVTKQEAQNALQALASTHLYGRHLVIERAKEGETLEELRERTAAQFVDESSGFQSLSSKRKRSILVDEGSVKVSRIAE

SEQ ID NO: 3758 - protein, 548 aa, Zea mays
  VARIANT 278..548: note = Derived polymorphism lacks residues 278 to 548
MACMADPHRCSSSCAPLTSRKLAMHIMARPTASCLLLQCTAAQGGRQPGAAMAPKDRVPLVSAGLAVASLLLLLLCATRCEARAMAATARRLSSSSSSPLLNALFKLNFIRTVEPARRIPTAGDEEAASDINSPFCVNPPDAPSATTPPFKPFTPSFPGQAPQLPPITPVPPSFEPSPPAPENGASGGGQGGGQGQGGDQGQGGGGDQGQGGGQSQGGDQGQGGGGGDQGQGGGQSQGGDQGQGGGQGQGGSQGQGGGGGDQGQEGPPASTTPNSPPQVGPGGIPFGSVPPSPIVVVPSPPGSGPDPGSGLGGGGSGSDGGPFQPPIIYPPPLAPPLPPGAGQTLWCVAKPTVPDPIIQEAMDYACGAGAGCDSILPSGSCYRPNTVLAHASFAFNSYWQQAKATGGTCDFGGTATIVTRDPSYEECKFDLIYLVDSQDVATGGIDTNAVIFDRSSGQILCTLTGHSKKNDNVGLVEKDLGNQKVLLSGINLDEDAKPRGDNCEQWSLFVGTAQASLTLALASSVQGQGCTDPKAGAVDPKAENKVLD

SEQ ID NO: 3759 - protein, 161 aa, Zea mays
  VARIANT 32: note = Ancestral polymorphism is Q, Derived polymorphism is P
  VARIANT 127: note = Ancestral polymorphism is T, Derived polymorphism is A
MATNSHRIIAPGLLLVAATTLVVVVVAQLAAPAAACPYCPTPTPPPPPPPPPPVVNPPPSSTPCPPPPYSPSTPTGKCPVDTLKLLACVDALNGLVHAVVGTNASDTCCPLLSGVADLDAALCLCTTIKAKALSVSLVLPVAISVLVNECGKHVPSSFQCP

SEQ ID NO: 3760 - protein, 313 aa, Zea mays
  VARIANT 268: note = Ancestral polymorphism is I, Derived polymorphism is T
  VARIANT 236: note = Ancestral polymorphism is C, Derived polymorphism is Y
  VARIANT 232: note = Ancestral polymorphism is G, Derived polymorphism is E
  VARIANT 226: note = Ancestral polymorphism is T, Derived polymorphism is I
  VARIANT 218: note = Ancestral polymorphism is D, Derived polymorphism is Y
  VARIANT 198: note = Ancestral polymorphism is A, Derived polymorphism is T
  VARIANT 86: note = Ancestral polymorphism is L, Derived polymorphism is Q
  VARIANT 81: note = Ancestral polymorphism is D, Derived polymorphism is H
  VARIANT 73: note = Ancestral polymorphism is L, Derived polymorphism is R
  VARIANT 71: note = Ancestral polymorphism is V, Derived polymorphism is M
  VARIANT 67: note = Ancestral polymorphism is S, Derived polymorphism is P
  VARIANT 62: note = Ancestral polymorphism is S, Derived polymorphism is L
  VARIANT 51: note = Ancestral polymorphism is G, Derived polymorphism is S
  VARIANT 45: note = Ancestral polymorphism is R, Derived polymorphism is H
  VARIANT 41: note = Ancestral polymorphism is A, Derived polymorphism is T
  VARIANT 33: note = Ancestral polymorphism is A, Derived polymorphism is T
  VARIANT 32: note = Ancestral polymorphism is D, Derived polymorphism is N
  VARIANT 29: note = Ancestral polymorphism is P, Derived polymorphism is L
  VARIANT 26: note = Ancestral polymorphism is S, Derived polymorphism is C
  VARIANT 20: note = Ancestral polymorphism is Q, Derived polymorphism is R
MASPDLLFNLRNLFYLGAYQAAINNSDVPGLDADAAAERDAIVFRSYIALGSYQLVISEIDSSAATSLQAVKLLALYLTGDKVSALDLNYVASDLALIALCWSGSGSLEGAISSLKEWLSDSAIGSNPVLRLIAGIVFMHEQDYNEALKHTHSGGTLDLHALNVQIFIKMHRSDYAEKQLKIMQQIDEDHTLTQLANAWLGIAVGGSKIREAYLIFQDFAEKYPMTGMVLNGKAVCCMHMGSFEEAETLLLEALNKDAKDPETLANLIVCNLHLGKPSSRYLSQLKLSHPDHVLVKNAAASEATFERALQAVA

SEQ ID NO: 3761 - protein, 107 aa, Zea mays
  VARIANT 11: note = Ancestral polymorphism is T, Derived polymorphism is A
MPGVITKFAVTSMVMWMAPVAIVYGFYYQAFPGVSRMSSSAQTLASGFLAVISVNLVIGLYIFMAMKETRHQEPQPDPTFLANAKASINQPTSSQPSDDSKGKGKVE

SEQ ID NO: 3762 - protein, 159 aa, Zea mays
  VARIANT 3: note = Ancestral polymorphism is E, Derived polymorphism is G
  VARIANT 4: note = Ancestral polymorphism is Q, Derived polymorphism is H
MAEQTEKAFLKQPKVFLSSKKSGKGKKPGKGGNRFWKSIGLGFKTPREAIEGTYIDKKCPFTGTVSIRGRIIAGTCHSAKMNRTIIVRRNYLHFVKKYQRYEKRHSNIPAHISPCFRVKEGDHVIIGQCRPLSKTVRFNVVKVIPAGSAAAGKKAFTAA

SEQ ID NO: 3763 - protein, 493 aa, Zea mays
  VARIANT 261: note = Ancestral polymorphism is G, Derived polymorphism is E
  VARIANT 258: note = Ancestral polymorphism is A, Derived polymorphism is T
  VARIANT 250: note = Ancestral polymorphism is S, Derived polymorphism is Y
  VARIANT 198: note = Ancestral polymorphism is T, Derived polymorphism is A
  VARIANT 48: note = Ancestral polymorphism is E, Derived polymorphism is K
MKEEMVVGLSAPGPVGRWGAAPPQAMLERMKDYGQEGAFALWDDLSPEDRELLVRDIESLDLSRIDRIIRRSLGSQGIPLPAVEPVPESSVSKVEDRSPEDKERWWKKGLKAISEGKLAVVLLAGGQGTRLGSSDPKGCFNIGLPSGKSLFQLQAERILCVQKLAAQSSESPSNTVLIHWYIMTSPFTDASTRKFFETRRYFGLDPDQVTFFQQGTLPCVSADGRFIMETPYRVAKAPDGNGGVYAALKSKKLMEDMAARGVKYVDCYGVDNALVRVADPTFLGYFIDKGVSSAAKVVRKAYPQENVGVFVQRGRGGPLSVVEYSEMDAAMTTEINQSTGRLRYCWSNICLHMFTLDFLNQVANSLEKDSVYHLAEKKIPSIHGFTTGLKLEQFIFDAFTYSPSTELFEVMREEEFAPVKNANGATYDTPDSAKLMLLRLHSRWVVAAGGFLTHSVPLYMTGVEVSPLSSYAGENLEAICRGRTFHAPSEISF

SEQ ID NO: 3764 - protein, 462 aa, Zea mays
  VARIANT 168..462: note = Derived polymorphism lacks residues 168 to 462
MDSFEGSDHITQRKVVPAKHIALVDGKNEPAVEGLPNGWLKECRPRKNRYGSRVKSDTFYIDPINGYEFHSLKDVHRYLESGDISKCIRLPNKRKIEDLHTKEDQSHHVSFIFKFWPTSEFALDLVNTQTVDLFCKIQTGKLSDHTQLDTADESNRYDLPEGTNALGYALQNPESGENNENIALSKPDNISSIQIEAGQVEATEDKSIQSGSIEYTPGEAKSVTRKGIDVKEKPKGKKYKTKHAKGIAIPLRSSPRLAALKISQEANNATRDGHIGTQTDTNNVPEPKQVEKPRRKTNSSVIPERKDGEPTRSCAETLPSLPNQIQGASFPQSSGDAGCQDAPAEAPVLRQQAGAGQGETSDGLPGSALTSLFQHVWSDPCLVFAFRTLLGDIPVLDDARAYRSSAYDGNRDYYLPPQNMNKNAAANWSALAYDSNRNHAQVDHVMPRTSDTFYSSGWFPPQ

SEQ ID NO: 3765 - protein, 298 aa, Zea mays
  VARIANT 36: note = Ancestral polymorphism is G, Derived polymorphism is S
MESPFRADLLRGKAALVTGGGSGIGFEIAAQLARHGAHVALMGRRREVLDKAVAALRSEGLRAVGFDGDVRKQEDAARVIAATVEHFGKLDILVNGAAGNFLASPEDLKPKGFRTVLDIDTVGTYTMCYEALKYLKKGGPGRGPSSGGLIINISATLQYTAAWYQIHVSAAKAGVDGITRSLALEWGTDYDIRVNGIAPGPIQDTPGMRKLAPEEMGNKGKRETMPLFKLGEKWDIAMAALYLASDAGKYVNGAIIIVDGGLWLSRPRHIPKEEVKALSKVVEKKVRASGVGVPSSKL

SEQ ID NO: 3766 - protein, 915 aa, Zea mays
  VARIANT 105..915: note = Derived polymorphism lacks residues 105 to 915
MAPSSPSPAAPTRVSGRKRAAKAEEIHQNKEEEEEEEEVVAASSAKRSRKAASSGKKPKSPPKQAKPGRKKKGDAEMKEPVEDDVCAEEPDEEELAMGEEEAEEQAMREEVVAVAAGSPGKKRVGRRNAAAAAGDHEPEFIGSPVAADEARSNWPKRYGRSTAAKKPDEEEELKARCHYRSAKVDNVVYCLGDDVYVKAGENEADYIGRITEFFEGTDQCHYFTCRWFFRAEDTVINSLVSISVDGHKHDPRRVFLSEEKNDNVLDCIISKVKIVHVDPNMDPKAKAQLIESCDLYYDMSYSVAYSTFANISSENGQSDSDTASGISSDDVDLETSSSMPTRTATLLDLYSGCGGMSTGLCLGAALSGLKLETRWAVDFNSFACQSLKYNHPQTEVRNEKADEFLALLKEWAVLCKKYVQDVDSNLASSEDQADEDSPLDKDEFVVEKLVGICYGGSDRENGIYFKVQWEGYGPEEDTWEPIDNLSDCPQKIRDFVQEGHKRKILPLPGDVDVICGGPPCQGISGFNRYRNRDEPLKDEKNKQMVTFMDIVAYLKPKYVLMENVVDILKFADGYLGKYALSCLVAMKYQARLGMMVAGCYGLPQFRMRVFLWGALSSMVLPKYPLPTYDVVVRGGAPNAFSQCMVAYDETQKPSLKKALLLGDAISDLPKVQNHQPNDVMEYGGSPKTEFQRYIRLSRKDMLDWSFGEGAGPDEGKLLDHQPLRLNNDDYERVQQIPVKKGANFRDLKGVRVGANNIVEWDPEIERVKLSSGKPLVPDYAMSFIKGKSLKPFGRLWWDETVPTVVTRAEPHNQVIIHPTQARVLTIRENARLQGFPDYYRLFGPIKEKYIQVGNAVAVPVARALGYCLGQAYLGESEGSDPLYQLPPSFTSVGGRTAGQARASPVGTPAGEVVEQ

SEQ ID NO: 3767 - protein, 514 aa, Zea mays
  VARIANT 197..514: note = Derived polymorphism lacks residues 197 to 514
MTIARRLLRSNASAQAISLLKHVTGTASLQGHAHSPLDASVRHFSSAPSAQSDTTEENGFKGHGMLAPFTAGWQSNDLHPLIIERSEGSYVYDINGNKYLDSLAGLWCTALGGSEPRLVKAATEQLNNLPFYHSFWNRTTKPSLDLAQEILSMFTAREMGKVFFTNSGSEANDSQVKLVWYYNNALGRPDKKKFIARSKAYHGSTLISASLTGLPALHQKFDLPAPFVLHTDCPHYWRYHLPGETEEEFATRLATNLENLILKEGPETIAAFIAEPVMGAGGVIPPPKTYFDKVQAVVKKYDILFIADEVITAFGRLGTMFGCDYYNIKPDLVSLAKALSNAYVPIGATLVSPEISEVIHSQSNKLGSFAHGFTYSGHPVACAVAIEALKLYRERDIPGHVKQIAPKFQDGIRALADSPIIGEIRGLGMIMGTEFTNNKSPADLFPAEWGVGAIFGEECQKRGMLVRVAGDAIMMSPTLIMTPGEVDELVSIYGEALRATEERVSDLKMKSEKN

SEQ ID NO: 3768 - protein, 1409 aa, Zea mays
  VARIANT 76..1409: note = Derived polymorphism lacks residues 76 to 1409
  VARIANT 509..1409: note = Derived polymorphism lacks residues 509 to 1409
  VARIANT 724..1409: note = Derived polymorphism lacks residues 724 to 1409
MHVHRESENGVRSQDGEPSNPAGTARGPHSLDAASSAARIQLGNYAYRQPEKSSRYALLSVFVFGACNNLVLQGFQFLVIIICIHCINKVHGDDKENIPNGNANLQVKEADNDEDDGTRSDGFELIDVKQNFDSARVEEEMAAPRSTTVDTSPVTEESETQEDKTTAHEEQSVATNTRHLESSMLNQQTEQLEKLTMRIEELESENDKLVKDLTEAENKQSLHYSCLQEAQCSLAMKDKELAEVTESLKDLGSELGTSKKRIQEIEAELDSSADKLCKLEELKDERSLHAAQEAKRASELDKMLELAQSNMKEMEKHIGSLQEEVKGYQDKAADHQQIEESLRNTISELKVVQEALELSKSQVENLKQKLASQDTDFSKLTEELNLHCSSEESLKEKSLKLETELTTVLEELQAKGGLDKLKDENKTLQGSLVDLNSKLSEKDSILHQAEDELSKAQLVLLEALSQKEELELNLNSLSEQHGKSKAFGENANQKILDLEAQIQAMHAAEQALKFELKEAEASVQAAEKKGSDLEQQLSEIENKFVKSSEEIELLKERIQQEAAVSAERGMQLQETVTSVEGYKEKIIELQSSLGSSVSKNQLLEQEVMELTDKCSEHQEQAHSVRQRSLELEDLLHTSKTHAEGVYSRTQELEQELNNTYEMFKGVEEELEQYRSKASQLSDDLEAYQTKAASLEAVVEAASEKEKEFMESLSQITEEKKKTESRNAEIEAQLQEALEAVGQKEAESRNLNEKLVALESEIESSMHVNEALKQEINAKLVMVDELQEKCSFISSEKEEVAEKLSIHEEKLEHLTEEHSRGLELLSVAESRNKETESQLREVLEKLAQKEAEVTDLTEKLALLEAENEKMTCLNEALKEVDAKLVMFDELQERFSSTLAEKEEAAEKLAVHERTISQLTEVHTRTLELHSVAESKNEEIGAQFLEALETISQKEEQATEAAAAEENRKVKFDEASQKIKILEEQLAETHSKVEHFLTEKESLVQETSSLNKEFEVHQNKLNDLQLALAAALAEKEAAFEEIHSLCKTLDGMIEHKAELEIQVSSTIQEHEELKSKYQNTMEEKQMLSDKYETAKKELEDAIAKLEEEMNVDKSEKESHISKLERQITLSEIKYMEEIKTMQVETTEKNEALTAKMQEHTDLQHEKHELEQQLLEVRKELDGAYHTIVNQEEQASLREIKWDTFRIYSEDRLEAEQQRAEELELQVAALKQQLQEAEEEQVSLREVQWEGDQNHSLNELKSQRQYATDLEKQIEDLTQKLRSADAHYKQKATEERDKLAEITTEFSKLTHKVSKSVELEKKVQDLEQKLQLAYSKSDEQATDVLESRSREFSLDSLSSLVKQQDRTQAADKASPSPTLQEVQEPSGTMAFKFILGVALLSVLAGVFLGKRY

SEQ ID NO: 3769 - protein, 80 aa, Zea mays
  VARIANT 34: note = Ancestral polymorphism is G, Derived polymorphism is D
MSYQAPPPGTAAYPPPGTAYPPPGQQAYPPPAYGAPPPMAAGGYPPPPPPQPQDSKRSNDGFLKGCLAALCCCCMLDMCF

SEQ ID NO: 3770 - protein, 331 aa, Zea mays
  VARIANT 76..331: note = Derived polymorphism lacks residues 76 to 331
  VARIANT 38: note = Ancestral polymorphism is R, Derived polymorphism is C
  VARIANT 33..331: note = Derived polymorphism lacks residues 33 to 331
MARNETAAAAAPGVDFHLPDEILAVIPTDPYEQLDVARKITSMAIASRVSRLEADAARLRRDLADRDRAEADLRACLADSDARLATALDENAKLAKERDSLAATVKKLTRNLAKLEAFKKQLMKSLSEDNLLQLSETSQDHNAEDLTARVPFWKDEVSSSNTSSDASSRSTITESVHDGGYQFSITPYMPPKLTPGSTTMISSSSGSPRAYSTGPPSPKFLSGPTSPAKARSEGQLAFSSWQGSSSHQYSAPTSPPQRRSFTGRPRIDGKEFFRQARTRLSYEQFGAFLANIKEFNAQKQSREDTLSKAEEIFGTEHNDLYISFQNMLNRN

SEQ ID NO: 3771 - protein, 191 aa, Zea mays
  VARIANT 105..191: note = Derived polymorphism lacks residues 105 to 191
  VARIANT 43..191: note = Derived polymorphism lacks residues 43 to 191
  VARIANT 6..191: note = Derived polymorphism lacks residues 6 to 191
MSPSSYFSIPPGLSPAELLDSPVPLHSSSNFFASPTTGAIPAQRFDWKQAADLIASQSQQDDSKTTAELRSAAPSTTSPSTRPPCPRRPRCSLPSRSSSNSKSKQRPWVGATGRGAQIGGDLGAVVEGRRGRGGGMGGRNGEGRGEDYRRWGGRIGSGGGRGGGCGRGGELTRRRRRSGGRDEGCRGSGAD

SEQ ID NO: 3772 - protein, 452 aa, Zea mays
  VARIANT 12: note = Ancestral polymorphism is S, Derived polymorphism is F
  VARIANT 196..452: note = Derived polymorphism lacks residues 196 to 452
  VARIANT 230..452: note = Derived polymorphism lacks residues 230 to 452
  VARIANT 393..452: note = Derived polymorphism lacks residues 393 to 452
MPVILREMEDHSVHPMSKSNHGSLSGNGYEMKHSGHKVCDWDSSSKSDRSHQEASAASESSPNEHTSTQSDNDEDHGKDNQDTMKPVLSLGKEGSAFLAPKLHYSPSFACIPYTVDAYYSGVGVLTGYAPHAIVCSLLIFQFLSSWPHSVHPQQNDTTNTPGMLPVEPAEEPIYVNAKQYHAILRRRQTRAKLEAQNKMVKNRKVIHSNFPIPDADLAAKEGEPFWDSPWGRGRPGWHIECSAMSAHYLGHVFDIHGGGKDLIFPHHENELAQSQAAYPESEVKCWMHNGFVNKDDKKMAKSDNNFSRLEISDVNHSDQALEIASDRVYYIYQILNTSFVKAFTCLKEDVGLLLLHHHRYHATCWNATAGQEHGDEQAQDDSKWRRIPTFDDWNLRDDMPVTQYLQAGTSSSLCRRQRRTTTRICSRCPCVPCQALQLQEVLGANSGLRGPQ

SEQ ID NO: 3773 - protein, 246 aa, Zea mays
  VARIANT 96: note = Ancestral polymorphism is P, Derived polymorphism is H
MAAASATRRGLSSLLLSPSSRALRRRLGPLAAAAASPHVAPWPLLAPRGARTASSGGSGHSPLNDPSPNWSNRPPKETILLDGCDYEHWLIVMEFPTDPKPSEEEMVAAYVKTLAAVLGSEEEAKKKIYSVCTSTYTGFGALISEELSYKVKGLPGVLWVLPDSYLDVPNKDYGGDLFVDGKVIHRPQFRFNERQQVRSRPRPRYDRRREIAQVEPRETMQRGPSTTQQQRPPCPQEAATQNQEQH

SEQ ID NO: 3774 - protein, 124 aa, Zea mays
  VARIANT 106: note = Ancestral polymorphism is T, Derived polymorphism is S
  VARIANT 97: note = Ancestral polymorphism is R, Derived polymorphism is H
  VARIANT 74: note = Ancestral polymorphism is R, Derived polymorphism is H
  VARIANT 73: note = Ancestral polymorphism is R, Derived polymorphism is H
  VARIANT 68: note = Ancestral polymorphism is I, Derived polymorphism is M
  VARIANT 48: note = Ancestral polymorphism is A, Derived polymorphism is T
  VARIANT 45: note = Ancestral polymorphism is E, Derived polymorphism is V
  VARIANT 42: note = Ancestral polymorphism is V, Derived polymorphism is M
  VARIANT 34: note = Ancestral polymorphism is G, Derived polymorphism is D
MTMRGLLRCVSTGACRVAPGAVAEPVPASPGATGGKVPAGHVPVEVGAEGEETQRFVVPAELLGRPPIAELLRHAAQEYGYARRGPLRIPCPVAAFRLLLGALAGSGAGGPDGALTLAYFAVAV

SEQ ID NO: 3775 - protein, 365 aa, Zea mays
  VARIANT 71: note = Ancestral polymorphism is E, Derived polymorphism is K
  VARIANT 105: note = Ancestral polymorphism is S, Derived polymorphism is L
  VARIANT 107: note = Ancestral polymorphism is E, Derived polymorphism is K
  VARIANT 124..365: note = Derived polymorphism lacks residues 124 to 365
  VARIANT 152: note = Ancestral polymorphism is L, Derived polymorphism is I
  VARIANT 156: note = Ancestral polymorphism is R, Derived polymorphism is W
  VARIANT 189..365: note = Derived polymorphism lacks residues 189 to 365
  VARIANT 204: note = Ancestral polymorphism is P, Derived polymorphism is L
  VARIANT 258..365: note = Derived polymorphism lacks residues 258 to 365
MSRALARHPVPPFLKLRSTVCDDGYWMGRLDHKDWLAPNEVLKVFVNIRDTSLINSVFKKACSRRDYKPSEALYSLMIDRLACARRFSDVEELLSKARTEKLRFSDEFFYRLIKMYGNVAEHPQKAMDTLFAMPGYNCWPSTKTFNYVLHMLVCKRQYEVVHEVYSSAPRLGVTLDTCSFNILVKGLCQYGKFDEAISLLHEMPKQGCQPNATTYSTFMHFLCQRSQVDKAFELFERMRKQDIAADTVVYNILISGLCRDERVTEAFDLFKSMTSEGCCPNSGTYQVLLDGLISLGKLFEAKSLVCTMSTEGVRPSFQSYKLLIDGLCSDDCVGDAHLVLKQMVGQGFVPRMGTWTKLLTSMFKF

SEQ ID NO: 3776 - protein, 295 aa, Zea mays
  VARIANT 205: note = Ancestral polymorphism is A, Derived polymorphism is T
  VARIANT 158: note = Ancestral polymorphism is A, Derived polymorphism is T
  VARIANT 36..295: note = Derived polymorphism lacks residues 36 to 295
  VARIANT 24: note = Ancestral polymorphism is R, Derived polymorphism is I
MAGSSDPDKLMSKADKLTKLSFTRWNADWKSATSLYEQAAIAYRFRKDNEKAKDAFEKASKGQEMISSPWDAAKHMESAAALAKELGRWNEVSDFYHRASELYRECGRPQPASDALAKGASALEEKSPEEAIKMYDEACSVLEEDGKEQMAFDLYRAAAALYIKMEKYSDAAALFLRLGSAADKCNAINSQCKAYLSAIIIYLYTHDFQQAQKCYNDCSEVQAFLNSDQNRCATKLLSAYEEGDAEEIKRMAQSSAFNHLDHVVIRLARKLPTDDLQAIKKADDGEESLDEDDLT

SEQ ID NO: 3777 - protein, 75 aa, Zea mays
  VARIANT 56: note = Ancestral polymorphism is G, Derived polymorphism is D
  VARIANT 42: note = Ancestral polymorphism is E, Derived polymorphism is G
  VARIANT 38: note = Ancestral polymorphism is R, Derived polymorphism is C
  VARIANT 35: note = Ancestral polymorphism is A, Derived polymorphism is V
MGTILAAKKDESVFSDPTYNVSVLFGKRDEPLLLACARQLIEHISGSARSLVISLGLKDHSQGTLKDITVAVMIE

SEQ ID NO: 3778 - protein, 159 aa, Zea mays
  VARIANT 23: note = Ancestral polymorphism is P, Derived polymorphism is S
  VARIANT 35: note = Ancestral polymorphism is A, Derived polymorphism is V
  VARIANT 55: note = Ancestral polymorphism is D, Derived polymorphism is E
  VARIANT 77: note = Ancestral polymorphism is R, Derived polymorphism is W
MAAAGGGARAEAGLRKFLVEHQPCCNATVPKGSVVDGGKRKVAAAGVPTEPRYRDAQRRRPRGRYSAEIRDQHKGVWLWLGTFDTAEEAARRYDSEACRLRGPSENTNFLATLDYRVPLPALSLHALLPCVRTLVWIGVERYSQHSKGIVVLHDESTAS

SEQ ID NO: 3779 - protein, 130 aa, Zea mays
  VARIANT 88: note = Ancestral polymorphism is R, Derived polymorphism is H
  VARIANT 85: note = Ancestral polymorphism is A, Derived polymorphism is V
  VARIANT 68: note = Ancestral polymorphism is T, Derived polymorphism is A
  VARIANT 35: note = Ancestral polymorphism is N, Derived polymorphism is D
  VARIANT 20: note = Ancestral polymorphism is S, Derived polymorphism is P
  VARIANT 19: note = Ancestral polymorphism is R, Derived polymorphism is W
  VARIANT 1: note = Ancestral polymorphism is M, Derived polymorphism is L
MEVPMNTTQSGPHFPVQHRSLSLDIKGNKTDIVINKYEDTFLVIVTQIGCMGTILAAKKDESVFSDPTYNVSVLFGKRDEPLLLACARQLIEHISGSGSARSLVISLGLKDHSQGTLKDITVAVIENRLW

SEQ ID NO: 3780 - protein, 448 aa, Zea mays
  VARIANT 16: note = Ancestral polymorphism is P, Derived polymorphism is Q
  VARIANT 52: note = Ancestral polymorphism is F, Derived polymorphism is S
  VARIANT 60: note = Ancestral polymorphism is S, Derived polymorphism is L
  VARIANT 132: note = Ancestral polymorphism is S, Derived polymorphism is F
  VARIANT 145: note = Ancestral polymorphism is N, Derived polymorphism is D
  VARIANT 164: note = Ancestral polymorphism is Y, Derived polymorphism is N
  VARIANT 210: note = Ancestral polymorphism is V, Derived polymorphism is A
  VARIANT 322: note = Ancestral polymorphism is E, Derived polymorphism is G
  VARIANT 373: note = Ancestral polymorphism is W, Derived polymorphism is C
MEKIQDCNSKSLVALPGSLVLHLFRLLGHQDQSSWQKYILAYFLLVRKGCYFSGESKKHSDVFCDISELDFFPYATDSDSEELELKEQKPVPKALSGGDSSGNRSNDCYFPGLHDDLSQDCLAWASRSDHPSISCLNKRFNLLMNSGYLYKLRRKYGIVEHWVYLACSLMPWEAFDPSQRRWMRLPRMPCDECFSCADKESLAVGTQLLVFGREYTGLAIWVYNLLTRSWSPCAPMNLPRCLLASGSSGEIAIVAGGCDKNGQVLRSVELYNSETGHWETVPGMNLPRRLASGFFMDGKFYVIGGVSSQRDSLTCGEEYSLETRTWRRILDMYPGGTSASQSPPLVAVVNSQLYAADQSTNVVKKYDKANNAWDVVKPLPVRADSSNGWGLAFKACGDRLLVIGGHRGPRGEVILLHSWCPEGGEDWEVLSVKERAGVFVYNCAIMGC

SEQ ID NO: 3781 - protein, 374 aa, Zea mays
  VARIANT 340..374: note = Derived polymorphism lacks residues 340 to 374
  VARIANT 76: note = Ancestral polymorphism is G, Derived polymorphism is D
MACCFLFGKKAKQTTEGDEDLHSVKVFSYSELRKATQDFSGANKIGEGGFGSVFRGVLKDGTVVAVKVLSATSRQGIREFLTELTAISDIKHENLVTLIGCCAEGSRRILVYNYLENNSLAQTLLGSRHSNIRFNWHARARIAVGVARGLAFLHEEIRPPIIHRDIKASNILLDKDLTPKISDFGLARLLPPNATHVSTRVAGTLGYLAPEYAIRGQVTKKSDIYSYGVLLLEIVSGRCNTNTRLPSEDQFLLERTWALYEQGRLEDIVDMDIGGDRDVEEACRFLKIGLLCTQDAMARRPNMTNVVRMLSGERRISVEKITRPAMISDFAELKVSSKERRPGEARSPTTAPTTKSFTTTEPFSSSETPTQSSM

SEQ ID NO: 3782 - protein, 152 aa, Zea mays
  VARIANT 4: note = Ancestral polymorphism is A, Derived polymorphism is S
  VARIANT 5: note = Ancestral polymorphism is Q, Derived polymorphism is H
  VARIANT 76..152: note = Derived polymorphism lacks residues 76 to 152
  VARIANT 93..152: note = Derived polymorphism lacks residues 93 to 152
MSEAQRLVQQELELEEWGTEAQVKLGSRLIELLLDSAFVQPAADQTPDSSPDIRPAFKHVLRQPIIENGRLKKKHWVIECDHLVHEGFESSAWHVDIPNLPMLVPPKKWKGYDKGGHLFLPSYIMRTHGVKDQKDAINSVPRKQLRKVFEVY

SEQ ID NO: 3783 - protein, 85 aa, Zea mays
  VARIANT 30: note = Ancestral polymorphism is L, Derived polymorphism is I
  VARIANT 32: note = Ancestral polymorphism is A, Derived polymorphism is V
  VARIANT 34: note = Ancestral polymorphism is A, Derived polymorphism is V
  VARIANT 39: note = Ancestral polymorphism is A, Derived polymorphism is V
  VARIANT 45: note = Ancestral polymorphism is A, Derived polymorphism is G
  VARIANT 46: note = Ancestral polymorphism is T, Derived polymorphism is I
  VARIANT 49: note = Ancestral polymorphism is A, Derived polymorphism is T
  VARIANT 60: note = Ancestral polymorphism is P, Derived polymorphism is L
  VARIANT 62: note = Ancestral polymorphism is P, Derived polymorphism is L
  VARIANT 64: note = Ancestral polymorphism is S, Derived polymorphism is P
  VARIANT 66: note = Ancestral polymorphism is G, Derived polymorphism is E
  VARIANT 67: note = Ancestral polymorphism is I, Derived polymorphism is M
  VARIANT 69: note = Ancestral polymorphism is A, Derived polymorphism is V
  VARIANT 70: note = Ancestral polymorphism is V, Derived polymorphism is F
  VARIANT 79: note = Ancestral polymorphism is A, Derived polymorphism is V
MPPPRICLSRVPPLAPSSNCKTVCPIRPILLAIAEETLAKFLSKATGTAIDWVQMVGMKPGPDSIGIIAVSHNCSGVAAQADQGL

SEQ ID NO: 3784 - protein, 564 aa, Zea mays
  VARIANT 189: note = Ancestral polymorphism is F, Derived polymorphism is S
  VARIANT 162: note = Ancestral polymorphism is R, Derived polymorphism is W
  VARIANT 154: note = Ancestral polymorphism is S, Derived polymorphism is F
  VARIANT 152: note = Ancestral polymorphism is G, Derived polymorphism is R
  VARIANT 133: note = Ancestral polymorphism is L, Derived polymorphism is H
MAFDCNKERGVSSPDSCSRICTEGTLVQANPLSHYWKPKRLENFNKLENQKSSYESAPSGSDPKQDAEASDEATASLCGFRCFTDLPASLVCEVLARLDAKDLGIVSCVSTLLHALATDHQGWKKLYCERWGLPDLPTTLNGPLLPGVPLDGKFWKTFFVEREFRSKSFMGRFNLDILRGHNEDVRAVSLLVSANLIFTGGRDSVVRMWKMEEGLLIDTSRALGGTIRAIAADSRLLVSGGTNAYIQCWRAVEGNGQLFHISGSGTDQNAEFRLWGHEGPVTCLALDSLRIYSGSWDMTVRVWDRDQMECVQKFMHADWVWDLALRGNTVASTAGRDAYVWDIRAGELTSLISNAHVGSAYSIAWTHLPDVLFTGGEDGAIRLFNVSDVCDDEGDIKPVATWVPHSGPVHSLAFEYPWLVSASSDGRIALIDLRKLLSSKSSSKGLRVKRVDGSAIEPPQRMLHGVGCDLFSIAIGADRIVCAGEDGSVRVWNFSEALEIERRAQALRSLRQENRIRRRKSQAEMNTNTRRPDQCSIAMKKNQLKGDKSATWHNKRAINEKAKS

SEQ ID NO: 3785 - protein, 775 aa, Zea mays
  VARIANT 467..775: note = Derived polymorphism lacks residues 467 to 775
MFWHVPGFSAASPVDTILDKENFKLEDLLDEDEIIQECKALNTRLINFLRDKVQVEQLLRYIVEEAPEDAEKKRIFRFPFIACEIFTCDVDVIMKTLVEDEDLMNLLFSFLKPDHPHGTLLAGYFAKVVICLAMRKTLQLVHYVQGHPEIVSQLVDLIGITSIMEVLIRLIGADETMYSSHADSMQWLDDIQVLEMIVDKFSTSDSAEVHANAAEILCAVTRYAPPALAAKISSPSFVGRLFQHAFEDSRPKSVLVHSLSVCISLLDPKRLVSASYQAFRSQLSHGTLVTASPETVNGMLDSLGDLLKLLDVSSAENVLPTTYGSLQPPLGKHRLKIVEFISVLLSIGSEVAETRLIQLGAIQHAIDLFFEYPFNNFLHHHVENIIGSCLESKQDHLIGHVLDECKLVTRILEAEKNSALSSDLTKHTLSTEGRCPPRIGIVGHMTRIANKLLQLANTNIMVQSYLQQNSDWIEWHTSTLTKRNALENVYQWACGRPTSLQDRGRDSDDEDFRDRDYDVAALASNLSQAFKYGIYSNDDIDEAQASLERDDEDVYFDDESAEVVISSLRLGDDQESGSLFTNSNWFAFDEDKALNDGLVSPEASPSPNSEISALKEDDEVILGEVIDDTEGSEPTLPVSNKDANEESGHTVLANGTIDKQEDDIRPLTPDVKESQPEFVEWKEEEAEPGDVAEKDTAVPGIEVESEKQLNSMDDVMLCDAELGEEKKSGGMLGSSAPEAEAASPVSSDIDSIKHPEQAADSAVSEYPMGEQNPEI

SEQ ID NO: 3786 - protein, 471 aa, Zea mays
  VARIANT 384..471: note = Derived polymorphism lacks residues 384 to 471
MASSLLAGRGGGHHHNWGETRAPLEPIPPNPSPSQPHPRADGSKSKPRAAAGYVKFRPASLGHREARALRDRLAVELGQVRALLSRIDTWQQQGPPPRAVLRGAMRKRCGQILSRLRKDKRSVWFNAPVEVERLGLHDYHAVIKRPMDLGTVKEGLAAGRYASHDDFAADVRLTFTNALRYNPVGHEVHTFAGALLAYFERMYKEALVCLEEERKRLEPPRPVAAELPPPPAVEPVEAKAKTRAGNVRMRKPKAREPNKREMSLEEKNMLRLGLVSLPEEKMHNVLQIVRKRNNNPEMLGDEIELDIDEMDVETQWELDRFVTNFNKALKKSQRAAMLNGGVADVTSTAVAEDDTAPVGDVPTLVGNDDAESEEPVKSTTVAEQVDEYVDIGDEMPAATYQSMEIEKDAEGTTGSGGSGSGSSSSSGMIKLALCSPSIVPKFLQGADFLHLQVLSRGAQGTVPQELAMLIL

SEQ ID NO: 3787 - protein, 482 aa, Zea mays
  VARIANT 383: note = Ancestral polymorphism is S, Derived polymorphism is W
  VARIANT 221: note = Ancestral polymorphism is N, Derived polymorphism is Y
  VARIANT 122..482: note = Derived polymorphism lacks residues 122 to 482
  VARIANT 71: note = Ancestral polymorphism is W, Derived polymorphism is S
  VARIANT 68..482: note = Derived polymorphism lacks residues 68 to 482
MASNSSCGENARKPHTPSAIVIGGGFAGLAAADALRNASFQVILLESRDRIGGRVHTDYSFGFPVDLGASWLHGVCEENPLAPIIGRLGLPLYRTSGDDSVLFDHDLESYALYDTNGRQVPQELVEKIGKVFETILEETGKLREGTNEDMSIAKAIAIVMDRNPQLRQEGIAHEVLQWYLCRMEGWFATDADSISLQGWDQEVLLPGGHGLMVRGYRPVINTLAKGLDIRLNHKVLEIVRHRNRVEVTVSSGQTFVADAAVVTVPLGVLKVKTIRFEPRLPEWKEEAIRELTVGVENKIVLHFGQVFWPNVEFLGVVSSSTYGCSYFLNLHKATGHPVLVYMPAGRLARDIEKMSDEAAAQFAFSQLKKILPNAAEPMNYLVSHWGSDENTLGSYTFDGVNKPRDLYEKLRIPVDNLFFAGEATSVKYTGTVHGAFSTGVMAAEECKMRVLERFRELDMLEMCHPAMGDESPVSVPLLISRL

SEQ ID NO: 3788 - protein, 120 aa, Zea mays
  VARIANT 95: note = Ancestral polymorphism is S, Derived polymorphism is A
  VARIANT 45: note = Ancestral polymorphism is D, Derived polymorphism is G
MAKTSSFKLEHPLEKRQSEANRIREKYPDRIPVIVEKAERSDIPDIDKKKYLVPADLTVGQFVYVVRKRIKLSAEKAIFIFVKNTLPPTAALMSSIYEENKDEDGFLYMTYSGENTFGLL

SEQ ID NO: 3789 - protein, 1191 aa, Zea mays
  VARIANT 536: note = Ancestral polymorphism is E, Derived polymorphism is Q
  VARIANT 274..1191: note = Derived polymorphism lacks residues 274 to 1191
MEMNLRAESPLCSRGRPALVVRPAAAATGLALSVVRCSRFTRGGLVRCMVSSSDYPKRNPRRASTSKSKGVASGGYASRPTAESSTKKIEQSRNNEGDFSRANGSLYGEAAEQASTAEESSQVYMTGDILSGAERDGAGTEEEADQNQSSALPSASMDDDSIDRQLDEYRGKISALVSSKPEPSSLASVAGQNESVGGFHGQHEPITGSEEHGSSIVDAPTKGRLFAEAVVGHKDFTESAAGKASSENEEGQAVSLEDDVGISTDADEELPVSEDDPEVLLRRLQELADENYSTGNNCFVFPEVVKADSMIDLYLNRSMSALASESDVFVKGAFNGWRWNRFTETMHRSELRGDWWCCKLYIPKQAYRLDFVFFNGDTVYENNNHNDFFLEIESDIDEHSFEDFLVEEKRKELERLAAEEAERKRQAEERHRREEERAAMEADRAQARSEVEMKKEKLRQMLSSASRYAENLWYIEPNTYRGGDRVRLYYNRSSRSLMHNTEIWMHGGYNNWIDGLSIAERLVKSHEKEGDWWYVEVTLPERALVLDWVFADGPPGNAWNYDNNGRQDFHAIVPNNISDDIFWVEEEHRIFTRLQQERRERESAERIKAERSAKMKAEMKEKTMRAFLLSQKHIVYTEPLEVRAGTTVDVLYNPSNTVLNGKSEVWFRGSFNRWTHPSGPLPPQKMVKAENSSHLRTTVSVPLDAYMMDFVFSESEEGGRYDNRNGMDYHIPVSDSVAREPPMHIVHIAVEMAPIAKVGGLGDVVTSLSRAVQDLGHKVEVILPKYDCLILSSVKDLHYQQSFASGGTEVKVWFGKVEDLPVYFLEPQNGMFWVGCVYGKNDESRFGFFCHSALEFLLQKGSSPDIIHCHDWSSAPVAWLYKEQYALNGMGNGRIVFTIHNLEFGAHHIGKAMAHCDKATTVSDTYSKEVAGHGAIAPHYYKFHGIRNGIDPDIWDPYTDRFIPVHYTSENVLEGKSAAKKALQQMLGLQQTDSPVVGIITRLTVQKGIHLIKHAMHRALERNGQVVLLGSAPDHRIQGDFTNLASKLHGEYHGRVKLCLTYDEPLSHLIYAGADFILVPSIFEPCGLTQLIAMRYGSIPIVRKTGGLYDTVFDVDDDKDRAQAQGLEPNGFSFEGADSSGVDYALDRAITAFYDARDWFNSLSKRVMEQDWSWNRPALDYMELYHSARKN

SEQ ID NO: 3790 - protein, 136 aa, Zea mays
  VARIANT 52: note = Ancestral polymorphism is G, Derived polymorphism is S
MSGALRNSITASMGRSVLGGDRAKSTTDLAAAIFFRWGHRGARSLEAGAKHGTAATPSPSPEAGRGDEEDAGAGACAGAGDEGGGRRVARRSLSSRRRARAPGRRKRRWSPLAAAADGERRSLRVAAMWSPDVGGG

SEQ ID NO: 3791 - protein, 133 aa, Zea mays
  VARIANT 77: note = Ancestral polymorphism is P, Derived polymorphism is L
MAATRKLRRSPSAAAASGDHLRFLRPGALARLRDDRLRRATRLPPPSSPAPAHAPAPASSSSPLPASGDGEGVAAVPCFAPASRLLAPRCPQRKKIAAAKSVVLFALSPPSTDLPIDAVIEFLNAPDMVVAAH

SEQ ID NO: 3792 - protein, 428 aa, Zea mays
  VARIANT 359..428: note = Derived polymorphism lacks residues 359 to 428
  VARIANT 363..428: note = Derived polymorphism lacks residues 363 to 428
MMQQPPQPQPGMALPPPPQTGGGQPPQWGAIPPPMTQQYGAPPPQQPPAMWGQPPSQAHYGQAPPPQPYYAAPPVPAAPAAADEVRTLWIGDLQYWMDDNYVFGCFSNTGEVQNVKLIRDKNSGQLQGYGFVEFTSRAAAERVLQTYNGQMMPNVDLTFRLNWASAGEKRDDTPDYTIFVGDLAADVTDYLLQETFRVHYPSVKGAKVVTDKLTMRTKGYGFVKFGDPTEQARAMTEMNGMPCSSRPMRIGPAASRKNAGGVVQERVPNSQGAQSENDPNNTTIFVGGLDPNVTEDVLKQAFSPYGEVIHVKIPVGKRCGFVQFVTRPSAEQALLMLQGALIGAQNVRLSWGRSLSNKQTQPQQESMQWGAGAPAGVGDYYGGYGQGYEAYGSGYAQPQDPNMYGYGAYVGYPNYQQQPAAQQPQQQQ

SEQ ID NO: 3793 - protein, 424 aa, Zea mays
  VARIANT 205..424: note = Derived polymorphism lacks residues 205 to 424
MVGLPVEVRVRDGSAYAGVLHTACVDAGYGVVLKKAKKIANGKGDVNLSLGSFVDTLVVCPDDLVQVIAKGLSLPLKGVCKPLDSNVVAASGSLKPQISHANDPKMSNKTKNMSPLMQAEKCTSVGQEKNTSVKRNGQDNGITTSLSSSTRHVGACLSNNWDSRSGSMVPKVDVITSSASAVPVVASGVKPSQPVNNSVAKIVTSSKTAAKEFKLNPSAKVFSPSFASSRQVLAAAAPVDTYYISHSAPEVPMGVPVYEPKSVSGVSPLSNKVYCSNLSPANYAISPQYVPSIMGHNASRLDPSRIGTPYHPMQVGATYTTPSPQPVMAGKFSPVVYVQPGPQDAMHGTTVGFQGWPCPLLLNSYQASMQKFQGNPPVYLAPPVMATGNLPLVVPSPASLVQPFEAIHPIMVPAASSMVPGKYM

SEQ ID NO: 3794 - protein, 376 aa, Zea mays
  VARIANT 10: note = Ancestral polymorphism is P, Derived polymorphism is L
MSSEGNKDVPNEALSVDLSSISGAKRKRGRPRKYEHPAYELPQKVQPLQSAPPLHCSQDGSSMASHTSGGYAHGSWSAQPRNSVNASIQGNSGKDDVLGKHFVGKLTKKIPGFSLITVKVKDNQVLKGWVPDEINLRPITPKDDLAPELPMLRPSHVRKRASAIHMQTALTVPLHLEDITLAKPLQMRRPVEETIAKHSVPLAPRPYMGSGVVAPVPISVALAPNNPELTSLTRQDAELVIPQSSVAAVPITSVPPCKQLANQNEFTEKNYVDEFQKDSESRNVTKELPGERQQLNDQVTDVVTESSGARDQPNPANSEQHEQQSSKEPSDITEQYEQMKTETDVQKGVDASKSDASVPDDIQPACDEQEIKVGCK

SEQ ID NO: 3795 - protein, 225 aa, Zea mays
  VARIANT 131: note = Ancestral polymorphism is R, Derived polymorphism is T
MPPLRPPPPRLLLNNVSCMRNAQTVLRDINLSVHDGTALVLTGANGSGKTTLLRMLAGFSRPSAGEILWNGHDITSPGVFQQYKLQLNWMSLKDAVKEKLTVLENVQWFELLEGKDGSRSGPAIELMGLGRLMNEKARMLSMGQRKRLQLARLLAIDRPIWLLDEPSVALDAEGTRLLEYIIAEHRKKGGIVFVATHLPIQIEDSMSLRLPQRFPRRKTLVDLVR

SEQ ID NO: 3796 - protein, 191 aa, Zea mays
  VARIANT 33: note = Ancestral polymorphism is I, Derived polymorphism is V
  VARIANT 38: note = Ancestral polymorphism is A, Derived polymorphism is T
  VARIANT 135: note = Ancestral polymorphism is A, Derived polymorphism is T
  VARIANT 184: note = Ancestral polymorphism is S, Derived polymorphism is F
MDNKSASSSCVITPAATSTMSSAGGESSWAVHIANFLASMPQDDIATTDDPQAAVSGGGGSFSSSFDSFGDADASSFITSQLMCGGDDDESLQDTACSSAAGQKMATMESFGLKQMAAMDGAKESNMPHHLQLMAKYVEAVGSKQQVTGVGDQQAINSSSNSEKALLCESNELRKRGLCLVPISMLIDYLG

SEQ ID NO: 3797 - protein, 109 aa, Zea mays
  VARIANT 13: note = Ancestral polymorphism is M, Derived polymorphism is T
  VARIANT 8: note = Ancestral polymorphism is A, Derived polymorphism is V
MSSCGMEARKFAMCTAQLLSPPADDMVDVAAGVMTHEEEADLLSIVLTGSARPEETVGVAAAALAIDLLCWCCFVFRMGIWDGSEERSLESVDIYTGPITPIVDEPTSR

SEQ ID NO: 3798 - protein, 377 aa, Zea mays
  VARIANT 4: note = Ancestral polymorphism is R, Derived polymorphism is M
  VARIANT 160..377: note = Derived polymorphism lacks residues 160 to 377
MVSRLLFGLVVLPLSLQYSSSALSNPPEEFGGGGLQQPSPPPTSSGLRVGFYQYTCPNAEAIVRDEMAKIISRVPSLAGPLLRMHFHDCFVNGCDGSVLLNSTVPGLPSEKEAIPNLTLRGFGTVDRVKAKLEQACPGVVSCADILALVARDVVVLDDYWRWPNYCFLCYCVRATYVRVRQTKGPHWDVPTGRRDGRRSVKQDALDNLPAPFFDAGRNLYQFFIPKGLDAKDQVVLLGAHTLGTSHCSSFADRLYNFSGTTAADPSLDRRYLPRLKSKCGSPGDTTTLVEMDPGSFRTFDASYYRRVARGRSLFASDQTLMNDPAARAYVQRQAGAGAGAYPAEFFADFAKSMVKMGAVQVLTGAQGEVRRHCAAVN

SEQ ID NO: 3799 - protein, 600 aa, Zea mays
  VARIANT 351: note = Ancestral polymorphism is P, Derived polymorphism is T
MEHHIIQQVGEHEGEEEEDGMGTEAAFEGVHNHDTFRYKHKKRSKVWEEYKPIFLNGKVQFAECLYCHSRMSCKDSNGTSHLWRHQKICPGKRDVVFRRLKDSYFPCVLVNQSEPVTPGDSVNQIISETLDDISSVIPNRFKSKVWREFSPIYVEGKLQAADCVHCRKRLSANKFGGRSHLSRHLQTCQARRGYNNQKGTLYPSSVPDLKSIGQDELSPALANGKKILSLTSVGEVRNALSSSKLKEILVEKKCLPIRGKLYDVACVDDVLNTIASKVQQNIIHLVGDMVTEFFVAHTSSSLNQQQLMEVISQMSLKCPQEDAKWWYKFYFRLEVFLHFNKPFPFEEAASPEHVIVAESICKILRTFYRVIEVISASSSPTANMYFNEIWKVRTVLQEEASSEHAEITAMVAEMQETFNEYWQHSYLWLCIPVILDPRFKFGFIEFRLKRAFGLKSASYLSGIRETLQELFNEYCSPVDQPNVRVPKSESFSLDDNDSFEDWDQHLNEQASSQKSTELDNYLADGLVPRKDDFDNLNWWMCHATKYPTLAAIVQDILAMPASAVPSEAAFTSSGPVIPKHHSMLSIKTIEALVCTRDWMR

SEQ ID NO: 3800 - protein, 1227 aa, Zea mays
  VARIANT 864..1227: note = Derived polymorphism lacks residues 864 to 1227
  VARIANT 717..1227: note = Derived polymorphism lacks residues 717 to 1227
  VARIANT 678..1227: note = Derived polymorphism lacks residues 678 to 1227
  VARIANT 466..1227: note = Derived polymorphism lacks residues 466 to 1227
  VARIANT 425..1227: note = Derived polymorphism lacks residues 425 to 1227
  VARIANT 142..1227: note = Derived polymorphism lacks residues 142 to 1227
MESIIARALEYTLKYWLKSFSRDQFKLQGRTAQLSNLDINGDALHASLGLPPALAVDTARVGKLQITLPSLSNVQVEPIEVNIDKLDLVLVEKDDSENLSSPSSTASSPSATKSSGYGYADKIADGMTVQVGIVNLLLETHGGAHRQGDATWSPPLAAITFRDLVLYTTNEKWQVVNLKEARDFSNNKGFIYVFKKLEWQSLSVDLLPHPDMFADARFNSSSSQDDKRDDDGAKRMFFGGERFLEGISGEANITVQRTEQNNPLGLEVQLHITEAVCPALSEPGLRAFLRFMTGVSVCLNRGDIDPKAQQLAEAAGSSLVSIIVDHIFLCIKDTVFVLLTGNFLQDFNCCYTLQGFNYKFFFILKASISDGECSKNLSCIKVGGMFLRDTFSRPPCTLIQPSMQAVSQEPPPVPDFGQNFCPPIYPFGNQLLDFAAGVPLFSLYCLQTTPSPSPPKFASKTVITCQSIMVTLQEQSCLRIASFLADGVVPNRGAILPESSINSLTFSLKEFDLSVPLDTDEIARCSGTKNTNPQSSFSGARLHVEDLYFCQSPSTKCPLLNLDRDPACFLLWEYQPVDASQMKWATWSSHLSLSLETSSTSNGQRAVSDSNLWKCIELDDIRFEVAMVTADGGPLLDVPPPEGVVRIGVAFQQFKSNTSVEQLFFVLGFYTYFGQVAERISKVSNANKSESVKSSADKSENKLPSDTAVSLTMNNLQLNFLESLSASDVHMPLVQFGGGDLFLKVSHRTLGGAFAVTTNLMWTTVSVNCLEGESAIVCEHGTAVTGEHSILVHGNGHPKMRAVFWVDHRSKHQVKEPQFLDINITHVMPYDIQDMECHSLNVSAKVSGVRLGGGISYTESLLHRFGILGPDGGPGEGLLRGLKDLSSGPLAKLFKSSHLTEKEDERSKIDDHNSKFDLGVPDDLDVSIELRNWLFALEGTEEVGYLFSPRGGDGISREEKCWHSTFRNLHISGKSSDRLKLGGRRKVSPEKAFPVERFTAGIEGLQAIKPRLRDQCTKKGPSNNHEMGRDFNSSSSVGDHGVDVEATMVIGEDEIEGAKWTMDNVKFSVKEPIEAVATKEELEHLVMLCRSEADAMGRITAGILRLLKLDKSLGQGTIEQLRNLGSGGMDNIFSPRRLSRQNSFGSIGTPRTPTMQAIADVMGSKTTLEATISSLQGEISESKAKCMALISQASSTEDQNRAEDIRQLSEKLESMQSLVTRLRTLII

SEQ ID NO: 3801 - protein, 282 aa, Zea mays
  VARIANT 191: note = Ancestral polymorphism is R, Derived polymorphism is W
MTAVALALPTDDDKDGGRRGVDHSPTAPAPPPPPPPPQELVMVARAVQRLVARNDAVVPPAPDGRGGGRRLGMRAFEAAEGAAAPRIGVPEYLERVHRYAALDPECYVVAYAYVDMAAHRRPAAAVASRNVHRLLLASLLVASKVLDDFHHSNAFFARVGGVSNAEMNRLELELLDVLDFAVAVDHRVYRRYREHLEKETTLMMLRRDDGHGPPVPVPGSGAAPTKSRTAASSVVKPPLTEDRRRPAEAGDADGGGEHDDRRKLPNSATAAASLRELWAFDY

SEQ ID NO: 3802 - protein, 287 aa, Zea mays
  VARIANT 27: note = Ancestral polymorphism is V, Derived polymorphism is L
  VARIANT 34: note = Ancestral polymorphism is L, Derived polymorphism is F
  VARIANT 40: note = Ancestral polymorphism is R, Derived polymorphism is C
  VARIANT 58: note = Ancestral polymorphism is A, Derived polymorphism is V
  VARIANT 145: note = Ancestral polymorphism is R, Derived polymorphism is C
MASASVSAPVAGAGAGGGKDEELADLVRRLMDALARYADRLPFDLDRQKLRSLTTLAAISITLLFAWKMLRAPQEQPRRPRRRAAPSSSNTSTRSRPGALTVADACSSADSRAHEAVNQLFQPVNLTLEQLVRHKLSEGRRFTCRLLGVILEETAPEELQNHVTVKPSVVEVLLEIAKFCDVYLMERILDDESEGKVLSALSEAGLFGGGGLIKDKVLFCSTENGRTSFVRQLEPDWHIDTSPEVVHQLARFIKYQLHISPQRPERIATNVFTAPSLEQYFGGLDQR

SEQ ID NO: 3803 - protein, 979 aa, Zea mays
  VARIANT 335..979: note = Derived polymorphism lacks residues 335 to 979
MSDKADPAHMLPSNMDIIDLSSDGEQEIIDLSSDSEDNNTLFRSYREDYVDYDDPGSPFHLPFFPHNTAPDWNIMEELDDWRVLAKKEYDDWLSSKASSSYSPVDDILTTEMNSKLPQSFTYGGFIPQSCAPGHSSLGDNRTKEEPSMTFSGFQGCTASGNGMPSSTVPIDDIFVYGGPRPHRIFPPPMPSSVNDIKVEYDVEQRLFSSDERAVYEEALKHITQETKEEDLPKGVMSVLLLKHQKIALAWMLSKENCSHCPGGILADDQGLGKTISTIALIQKEMVKQSRFMTAGSYSTKFVPNSDYDNDSDVVIDMDKKEPKDEPLNELDGSARLHVASSLKLCDSKPNTATDKAEPKKKARVRYSASNLRSKTRPAAGTLVVCPASVLRQWANELSVKVMEDNKLSVLVYHGSSRTRDPNELATYDVVVTTYMTVANEVPKENSNDERKKCEMDGICPEISIGSKRKKQSKPKKKNKPSNSEGGPLARVRWFRVVLDEAQTIKNYRTQVSRACCGLRAQRRWCLSGTPIQNKIDDLYSYFCFLKYEPYSKFSNFKYMIKHQITRDSVRGYKKLQAILRIILLRRTKETLIDGEPILKLPPKTIQLNKIDFTQKERAFYLTLEEGSRQKFKAYDAAGTIRENYANILVLLLRLRQACDHPLLLNGHESDLVDSSSIERAKQLPKETVTNLIEKLERGPAICSICNDPPEDAVVTTCGHVFCYQCVHERLTSDGHVCPYALCGNKLSFRSVFTPAVLKLCTSPKPEFGEETSCSTAADKPSSICESSYISSKIRSAVEILNSIIKTPALTAGDTTESIPSMAPPVKAIVFSQWTGMLDLLELSLNRNGIQFRRLDGAMSLDLREKEVNGFKTDPEVRVMLMSLKAGNLGLNMVAACHVIMLDPWWNPYAEDQAVDRAHRIGQTRPVTVSRFTVKDTVEDRILALQEKKREMVESAFGEDGSRGTATKLTVEDLRYLFMV

SEQ ID NO: 3804 - protein, 367 aa, Zea mays
  VARIANT 182: note = Ancestral polymorphism is T, Derived polymorphism is I
  VARIANT 232: note = Ancestral polymorphism is R, Derived polymorphism is P
  VARIANT 237: note = Ancestral polymorphism is D, Derived polymorphism is A
MSSSAGDKRKKTACVTGGNGYIGSALIKMLLEDGYAVKTTVRNPDDMDKNSHLKGLQQLGPLTVLRADMDEEGSFDDAVAGCDYAFLVAAPVNLSAQDPEKEQIEPSVRGTLNAMRSCAKAGTVRRVILTSSVAGVYIRPDLLQLRGDGHVLDEESWSDVEYLRANRPPTWVRPPYTSLMVTWTARSHSQGYCVSKVLLEKEACRFAGEHGISLVTVCPVITVGAAPAPKVRTSIIDSLSMLSGDERGLAVLKGIEKTSGAVQLVHVDDLCRAELFLAEAAAADGRYICCGLNTTVLELARFLAHKYPQYGVKTNLDGDEQQLLEKPRVRVSSEKLVREGFEYRHNTLDEIYDNVVEYGKSLGILPY

SEQ ID NO: 3805 - protein, 343 aa, Zea mays
  VARIANT 291: note = Ancestral polymorphism is T, Derived polymorphism is M
  VARIANT 278: note = Ancestral polymorphism is R, Derived polymorphism is C
  VARIANT 264..343: note = Derived polymorphism lacks residues 264 to 343
  VARIANT 260: note = Ancestral polymorphism is A, Derived polymorphism is T
  VARIANT 188: note = Ancestral polymorphism is G, Derived polymorphism is S
  VARIANT 121: note = Ancestral polymorphism is T, Derived polymorphism is R
  VARIANT 72: note = Ancestral polymorphism is S, Derived polymorphism is R
MSTGGRKMRTACVTGGNGYIASALIKVLLEKGYAVKTTVRNPDDMEKNSHLKDLQALGSLEVFRADLDEDGSFDDAVAGCDYAFLVAAPVNLHTKNPEEEMIEPAVRGTLNVMGSCVKARTVRRVVLTSSAAAVTTRPQLQGDGHVLDEESWSDVEYLRAHKPAGPWGYPVSKVLLEKEASRFAEEHGIGLVTVCPGLTVGAAPAPTARTSVPNCLSLLSGDEAAFAVLDAIESATGCLPLVHVDDVCRAELFAAEEGAAAGRYVCCGLNTTVAELARFLADKYPQYGVKTNLLSGERLEKPRVCLSSAKLVKEGFEFRYRTLDDIYDDMVEYGKDLGILPDL

SEQ ID NO: 3806 - protein, 345 aa, Zea mays
  VARIANT 221: note = Ancestral polymorphism is S, Derived polymorphism is Y
MAAAAGEERKKTACVTGGNGYIASLLIKMLLEKGYAVKTTVRHPEDKESNSHLEDLEKLGLGPLEVYRADLAEEGSYDEAVAGCDYAFLLAAPVNYTSKNPEKELMELGVQGTLNVMRSCVKSGTVKRVVLTSSTAAVSSKPLENDGHGHVLDEESLSDIDYLTAKRTGLWAYPVSKVLMEKAAAEFAAVEGVSLVTLCPSVTVGEAPDRQVYTTVPAILSLLSGDEAELKVLRGIERASGSVPLVHVEDVCRAEIFAAEEAADGRYICNGVDTTIVEMARFLADKYPQYDVNTNLSGGDLLEKPIALRPSTKLIKEGFEFKYKTLEHIYENMVEYGKAIGILHN

SEQ ID NO: 3807 - protein, 382 aa, Zea mays
  VARIANT 55: note = Ancestral polymorphism is P, Derived polymorphism is L
MQPDPGWSIHGRPDHAINQAKMEPKADARGLLPGPRRVWHPVYAARSRLDTRPLPGLAALGFLVGAAALWAPLAKELGHEACGLDAGGLGAGTPAQGALLPPPSCCHSIPIGHTVLIWASAGLSMITKSHTPCMSAYDSELLTKKYSDTPLVRLLLIADLQGQGSVVDVPNELMDLAMKGSLNDVGSVDVFSWISCLDLRSLAVLTNSTLSSSSDPHNISFHYLIPEGGNDKLSYFKLKSKANQGQAKCCHSRRKFSLVIPHRIVTLSYRKISVVEKEIFYIAADSIIKGKVEDLGRMELGGYAIGAIEDCSKRLSDYISMDVLSAIQRAGAAFSWVPKEPYNEDACLLDFDVLLMEPRKLEKTLITSIMWWATGCLQQCRY

SEQ ID NO: 3808 - protein, 141 aa, Zea mays
  VARIANT 27: note = Ancestral polymorphism is I, Derived polymorphism is V
  VARIANT 45: note = Ancestral polymorphism is S, Derived polymorphism is L
  VARIANT 67: note = Ancestral polymorphism is S, Derived polymorphism is L
  VARIANT 79..141: note = Derived polymorphism lacks residues 79 to 141
MTVVTSIDGHPTKTWIVMTYKGGKVSVWDYQEKKTVMELKVNEESGKIARIAHGISQNFKETGVPHSVCSAKFIAQGKWLVVGNSDGYIYVYTYTDTKLKEAKKFRAHDNSVDVLAVHPTEAYLLSSSAYGKTIKLWSLGR

SEQ ID NO: 3809 - protein, 475 aa, Zea mays
  VARIANT 156: note = Ancestral polymorphism is E, Derived polymorphism is D
MSSEDSLKSLSLDYLNLLINGQAFSDVAFSVEGRLVHAHRCVLAARSLFFRKLFCGLDPNHPPPPPGARAAAAAAPELVIPVSSIRYEVLVLVLQFLYSGQASVAAPKSGPLPGCGARGCWHTRCGAAVDLALDTLAAARSFGVEQLALLVQKQLESMVKEASVDDVMKVLMASRKFEMQELWATCSHLVARSGLSADLLAKHLPIDVVAKIEEIRAKSPVPAGAPRSPFLTHHYLPINAASSAADRDHKIRRMRRALDAADIELVKLMVMGEGLDLDDALAVHYAVQHCGRDVVKALLELGAADVNSRAGPTGKTALHLAAEMVSPDMVSVLLDHHADPSARTLDGVTPLDVLRGLTSEFLFKGAVPGLTHIEPNKLRLCLELVQSAVMVTTRDVDAAGDDAGGSDGGGGGNFPRSDADDSLVSLTMNSTLMYQGQEMAAAAVAAGEARKGNGGGGGGGRGSPSNLYFPNGGFP

SEQ ID NO: 3810 - protein, 118 aa, Zea mays
  VARIANT 12: note = Ancestral polymorphism is A, Derived polymorphism is T
  VARIANT 19: note = Ancestral polymorphism is E, Derived polymorphism is V
  VARIANT 24: note = Ancestral polymorphism is A, Derived polymorphism is S
  VARIANT 25: note = Ancestral polymorphism is A, Derived polymorphism is T
  VARIANT 36: note = Ancestral polymorphism is Y, Derived polymorphism is N
  VARIANT 105: note = Ancestral polymorphism is H, Derived polymorphism is Y
MCGDPNLVLRFTFIEFTDEEGARAALNLSGTVLGYYPVRVLPSKTTIAPVNPTFLPRSDDEREMCARTIYCTNIDKKVTQADLKLFFESICGEVFRLRLLGDYHHSTRIAFVEFVMVS

SEQ ID NO: 3811 - protein, 168 aa, Zea mays
  VARIANT 2: note = Ancestral polymorphism is P, Derived polymorphism is L
  VARIANT 10: note = Ancestral polymorphism is T, Derived polymorphism is I
  VARIANT 11: note = Ancestral polymorphism is A, Derived polymorphism is V
  VARIANT 14: note = Ancestral polymorphism is V, Derived polymorphism is I
  VARIANT 16: note = Ancestral polymorphism is V, Derived polymorphism is I
  VARIANT 17: note = Ancestral polymorphism is G, Derived polymorphism is S
  VARIANT 20: note = Ancestral polymorphism is G, Derived polymorphism is R
  VARIANT 21: note = Ancestral polymorphism is K, Derived polymorphism is T
  VARIANT 136: note = Ancestral polymorphism is E, Derived polymorphism is A
  VARIANT 146..168: note = Derived polymorphism lacks residues 146 to 168
MPSSHSATVTALAVAVGLNGKCAYMLLIAVRLASSKLWDLMKWQVFVVCVSLIKGTHIYVCDINPNMLNVGKKCVAERGYSEEHCLSWIQGDAEALSFEDGSMDGYTIAFGIRNVTHIEKALSEAYRPVNLKPWQEKFAQMIQEAGFQRVEYENLLSGVVAIHSGLKL

SEQ ID NO: 3812 - protein, 176 aa, Zea mays
  VARIANT 153..176: note = Derived polymorphism lacks residues 153 to 176
  VARIANT 85..176: note = Ancestral polymorphism lacks residues 85 to 176
  VARIANT 75..176: note = Derived polymorphism lacks residues 75 to 176
MAPLRHRHATTLLAASAPLRLLSLPHHRPRLLIAIHRRRRRSPPRRVSSPAAPSSSPSSSWPARWLEGSLLMEAQNDKFSGKIIQPNRGSKKLQKLIIDMSDKEADAKLPSIIPTVNIDTFLGFLNFFDLIFVKKFFSSASMANRVFCSSRSQDLTLQQLTSDATIEVAIDIPFPF

SEQ ID NO: 3813 - protein, 81 aa, Zea mays
  VARIANT 53: note = Ancestral polymorphism is R, Derived polymorphism is C
MAAAARASWMVAMSVGAVEALKDQAGLCRWNYAGVVGGGVDVEHEQLLREERCQEEHGERRRRRRRVARSSSSSRYMLELV

SEQ ID NO: 3814 - protein, 197 aa, Zea mays
  VARIANT 10: note = Ancestral polymorphism is E, Derived polymorphism is G
MVCIRQATIEDLLAMQACNLMCLPENYQMKYYFYHMLSWPQLLFVAEDYGGSIVGYVLAKMEEDPSEPCHGHITSLAVLRSHRKLGLATKLMSAAQAAMDQVFGAEYVSLHVRRSNRAAFNLYTSTLGYQIQDIEAKYYADGEDAFDMRKLLRQPQPKKHHHHHHHGPGGCCSHDAPVAATGSSPQSSGSPDKKAIT

SEQ ID NO: 3815 - protein, 263 aa, Zea mays
  VARIANT 93: note = Ancestral polymorphism is E, Derived polymorphism is K
  VARIANT 100: note = Ancestral polymorphism is R, Derived polymorphism is C
  VARIANT 119: note = Ancestral polymorphism is T, Derived polymorphism is A
  VARIANT 126: note = Ancestral polymorphism is C, Derived polymorphism is Y
  VARIANT 154: note = Ancestral polymorphism is M, Derived polymorphism is V
  VARIANT 225..263: note = Derived polymorphism lacks residues 225 to 263
MTSRASDLKMSEGDATQFALEKGSPQVSNDDGSSSPATVHKLKVDTEDAGSKIESPTPEKLESRSKWVVVSSLARNLLAERHKDLLNLFNRMESSIRLLRLRKRMATFNNIATQVEILAKRKLSYCHLAQMKYLFPEAIQIKRVLLHDEKSLCMYADMKIILVMDVVEYTSPDHSPSMAICDAFYSKLLTFSDAHHKVPTKEQVDALSKELFALSTATGFMKLQWDLNETMELGPLVVKALGVNNGSMGEDFKQKNVFLSLQL

SEQ ID NO: 3816 - protein, 555 aa, Zea mays
  VARIANT 220: note = Ancestral polymorphism is L, Derived polymorphism is I
  VARIANT 222: note = Ancestral polymorphism is M, Derived polymorphism is T
  VARIANT 255: note = Ancestral polymorphism is V, Derived polymorphism is G
MRRRPFLDQRRPSFKRRWQQRPWWVRLALSLLLALACVLLLAVLLGSPDPGASPSTSAASSGSETTSSPLLRQRTYLEGITDALNMTDEMLSARSFSRQLMDQIYLAKTYVVVAKEANNLQFVAELSAQVRRAQSILAHAAAYGGTVMEQEAEKAIRDMSVLLFQAQQLRYDSSITIMKLKGQIQSLEEKSKVEVEKSTKYGQIAAEDLPKGLYCLGVRLTMEWFKSPELQRKFSDRSPAVQSNLRDNSLYHFCVFSDNILAVSVVVNSTAINSRHPDKVVFHLVTDELNYAPMKAWFGMNDYRGVTVEIQKVEDFTWLNASYVPVLKQLQNAATQKFYFSGSGSRGTPIKFRNPKYLSMLNHLRFYIPEIYPELQKVVFLDDDIVVQKDLSELFTINLNGNVMGAVETCMETFHRFHKYLNHSHPLIRAHFDPDACGWAFGMNVLDLVEWRNKNVTGIYHYWQERNADHTLWKLGSLPPGLLAFYGLVEALDPKWHVLGLGYTNVDLATIKEGAVLHYNGNMKPWLKIGMEKYKSFWDNYVDYSHPLIQQCFMR

SEQ ID NO: 3817 - protein, 143 aa, Zea mays
  VARIANT 16: note = Ancestral polymorphism is S, Derived polymorphism is T
  VARIANT 17: note = Ancestral polymorphism is T, Derived polymorphism is A
  VARIANT 30: note = Ancestral polymorphism is T, Derived polymorphism is I
  VARIANT 34..143: note = Derived polymorphism lacks residues 34 to 143
  VARIANT 54: note = Ancestral polymorphism is E, Derived polymorphism is K
  VARIANT 55: note = Ancestral polymorphism is T, Derived polymorphism is M
  VARIANT 65: note = Ancestral polymorphism is G, Derived polymorphism is C
  VARIANT 69: note = Ancestral polymorphism is R, Derived polymorphism is W
  VARIANT 105..143: note = Derived polymorphism lacks residues 105 to 143
MLGLAKRVGARILLTSTSEVYGDPLEHPQIEAYWGNVNPIGVRSCYDEGKRVAEMLMFDYHRQHGIEIRIARIFNTYGPRMNIDDGRVVSNFIAQAVRGEPMTVQRPGTQTRSFCYVADMVCLPLHSQLCHPLQRTGIYLVYI

SEQ ID NO: 3818 - protein, 560 aa, Zea mays
  VARIANT 126: note = Ancestral polymorphism is L, Derived polymorphism is R
  VARIANT 333: note = Ancestral polymorphism is G, Derived polymorphism is W
  VARIANT 388..560: note = Derived polymorphism lacks residues 388 to 560
  VARIANT 482: note = Ancestral polymorphism is S, Derived polymorphism is L
MAPPSVQEQELVLLVPALYQCAAHVSEGSLEKANFSLSEIKRLSSIADGPLQRLPDALARRLLLPCEGLAGALIHPSDYFERSGGVRSARRTFAGLSPFLHAAFAATNRAILEAMEDEKVVRIVDLSCCSAASHPCQWLDLLHGFVHGRRPPPEVRLTVVHDDDDFVAGMRAALAKEAHRLNIPFQFNHVLVVRGGGLETMDLRGDFRDVLGVKYGEAVALQNMATTAAAQLKHMACSSRSPASILNYPRTPSPQCQCQVPRPLASFLGAVHHRLKPSIVVVMEQDANHNAPPFSARFAEALGYYAALFDSLDAVAAASAAGDRAQVERMVLGEEIKNVLLCEGASRLERHERLSQWAMYMDASGFRRVPLSFRAIRESAQRRAAISQARATFVSHARTARLAGLHGDACLAKLCGVIAADERRHEAAYTRASDRAFEEDPDGMVRALAAVMRAKVTMPGELMADGRDDRLFDHFSAVARRSGVYTAADYADMVEHFVRRWKVAELDAGLSGEGRRAQDYVCGLPRKIRRMEELAQDRAAQMEAQSVCFSWVFDRPVRIH

SEQ ID NO: 3819 - protein, 171 aa, Zea mays
  VARIANT 82: note = Ancestral polymorphism is C, Derived polymorphism is R
MDEHGEKEENKSQDSALAAEQREETAAAEGEDTSEESTDQREDGHGYKADESAGLLPEDDVGSGEASAAPHFGHPCSLLRACAGFLGLHGCGGDQKPAAAAVAASAAEAATAAAASSSQDEEDGGVDMAKANGFYMHEVITRVWAVAVRRPRPRPPDHAREGSGGNGGVHH

SEQ ID NO: 3820 - protein, 66 aa, Zea mays
  VARIANT 40: note = Ancestral polymorphism is T, Derived polymorphism is N
MAMAMASFVAQLKDMFLGLVDRVTGCRGCGGDKQDVPEATKLASLQPVEIRSRDPVVGGGSVAGAN

SEQ ID NO: 3821 - protein, 75 aa, Zea mays
  VARIANT 5: note = Ancestral polymorphism is A, Derived polymorphism is S
  VARIANT 27: note = Ancestral polymorphism is G, Derived polymorphism is R
MANLAAQIKDKFLGLVDRVTDAAAGFGRAAGGKDDDVQDPTTTKLHLHAVQRAEVIIRSRGGEPVVDTGSTAGAN

SEQ ID NO: 3822 - protein, 86 aa, Zea mays
  VARIANT 9: note = Ancestral polymorphism is M, Derived polymorphism is V
  VARIANT 15: note = Ancestral polymorphism is L, Derived polymorphism is V
MASFAAQVMDMFFVLVERVTGYGGHAEDDQKDASGAHEPTKLLTSSGVSETEQGEEEVVVAVQNVQIRARGGGEPFVQGGSMPQVN

SEQ ID NO: 3823 - protein, 135 aa, Zea mays
  VARIANT 94: note = Ancestral polymorphism is T, Derived polymorphism is I
MAAAARAIICELAPQKVSSTAPKKRDAGTKVVLQPRLCTLRSYGAGSGVVTRRILTGEEDGSGAADSGGSSASPFFASLANYIESSRKSQDFETISGRLAMMFTLGCNAFVDSLIDNIVEALFSEGELQDWSDDM

SEQ ID NO: 3824 - protein, 776 aa, Zea mays
  VARIANT 449..776: note = Derived polymorphism lacks residues 449 to 776
MSASSPASAALAATVAAAAALLLLLLLCCPNVARAQTPAFACDASNATLASYGFCNRSAAAAARAADLVSRLTLAEKVGFLVDKQAALPRLGVPLYEWWSEALHGVSYVGPGTRFSPLVPGATSFPQPILTAASFNATLFRAIGEVVSNEARAMHNVGLAGLTFWSPNINIFRDPRWGRGQETPGEDPLLTSKYAVGYVTGLQGAVSGAGALKVAACCKHYTAYDVDNWKGVERYTFDAVVSQQDLDDTFQPPFKSCVVDGNVASVMCSYNQVNGKPTCADKDLLSGVIRGDWKLNGYISSDCDSVDVLYNNQHYTKTPEDAAAISIKAGLDLNCGTFLAQHTVAAVQAGKLSESDVDRAVTNNLVTLMRLGFFDGDPRELPFGNLGPSDVCTPSNQELAREAARQGIVLLKNTGKLPLSATSIKSMAVIGPNANASFTMIGNYEGTSCTPCKYTTPLQGLGANVATVYQPGCTNVGCSGNSLQLDAATKAAASADVTVLVVGADQSIERESLDRTSLLLPGQQPQLVSAVANASSGPCILVVMSGGPFDISFAKSSDKIAAILWVGYPGEAGGAAIADVLFGYHNPSGRLPVTWYPESFTKVPMTDMRMRPDPSTGYPGRTYRFYTGDTVYAFGDGLSYTSFAHHLVSAPKQLALQLAEGHACLTEQCPSVEAEGAHCEGLAFDVHLRVRNAGERSGGHTVFLFSSPPAVHNAPAKHLLGFEKVSLEPGQAGVVAFKVDVCKDLSVVDELGNRKVALGSHTLHVGDLKHTLNLGV

SEQ ID NO: 3825 - protein, 35 aa, Zea mays
  VARIANT 6: note = Ancestral polymorphism is T, Derived polymorphism is I
  VARIANT 31: note = Ancestral polymorphism is G, Derived polymorphism is R
MELLPTDQICSGHENIDMGIEMLSLGSFKTGAILS

SEQ ID NO: 3826 - protein, 125 aa, Zea mays
  VARIANT 19: note = Ancestral polymorphism is G, Derived polymorphism is A
  VARIANT 23: note = Ancestral polymorphism is P, Derived polymorphism is S
  VARIANT 36: note = Ancestral polymorphism is E, Derived polymorphism is K
  VARIANT 43: note = Ancestral polymorphism is E, Derived polymorphism is K
  VARIANT 57: note = Ancestral polymorphism is A, Derived polymorphism is T
  VARIANT 65: note = Ancestral polymorphism is I, Derived polymorphism is T
  VARIANT 78: note = Ancestral polymorphism is P, Derived polymorphism is S
MHAVFKAELTELLGPRFAAAALPRVFIDWRYLGGAEDVHFLHEAGELRRALEGCEAAPSQKLGYIEACAACGDIRFVPCETCYGSCKIFVEDDDLDDRYNDVGEFRRCPDCNENGLVRYSDVCCC

SEQ ID NO: 3827 - protein, 244 aa, Zea mays
  VARIANT 44: note = Ancestral polymorphism is G, Derived polymorphism is C
  VARIANT 11: note = Ancestral polymorphism is T, Derived polymorphism is S
MSETGHTVQVTNLSSRVSESDLYEFFSFSGPIEHVELIRSGEYGATAYVTFKERFALETAVLLSGATIVDQPVCITYWGQPEETFNFWDRPTWEVEEEIEYTSYQSCQYNTTPQEALTVAQDIVKTMLAKGYVLSKDALAKARAFDESRGLTAAAAAKAAELSKRIGLTDRVSAGVGAMRSVDETYRVTETTKTVATATGRTAAKVVNGIVTSSYFSAGAMMLSDALTRAAKAAADLAAHGRQS

SEQ ID NO: 3828 - protein, 1273 aa, Zea mays
  VARIANT 1002..1273: note = Derived polymorphism lacks residues 1002 to 1273
  VARIANT 955..1273: note = Derived polymorphism lacks residues 955 to 1273
  VARIANT 954..1273: note = Derived polymorphism lacks residues 954 to 1273
  VARIANT 942..1273: note = Derived polymorphism lacks residues 942 to 1273
MAESAATDGKADKVANGGGGGGDAAGEGKKRGDQAVAFHELFSFADKWDLMLMAAGSLGALAHGAAMPFFFLLFGDLINGFGKNQTDLRTMTDEVAKYALYFVYLGLVVCVSSYAAAFFRSPEIACWMYTGERQVIALRKAYLDAVLRQDVGFFDTDARTGDIVFGVSTDTLLVQDAIGEKVGNFMHYIATFLAGLVVGFVSAWRLALLSVAVIPAIAFAGGLYAYTLTGLTSKSRESYTNAGVVAEQAIAQVRTVYSFVGESKALNSYSEAIQNTLKLGYKAGMAKGLGIGCTYGIACMSWALVFWYAGVFIRNGQSDGGKAFTAIFSAIVGGMSLGQAFSNLGAFSKGKIAGYKLLEVIRQKPSIVNDHKDGKWLAEVHGNIEFKEVTFSYPSRPDVIIFRDFSLFFPAGKTVAVVGGSGSGKSTVVALIERFYDPNEGQVLLDNVDIKTLQLRWLRDQIGLVNQEPALFATTILENILYGKPDATIAEVEAATTASNAHSFISLLPNGYNTMVGERGIQLSGGQKQRIAIARAMLKNPKILLLDEATSALDADSESIVQEALDRLMVGRTTVVVAHRLSTIRNVNMIAVIQQGQVVETGTHDELLAKGTSGAYASLIRFQETARNRDLGGASSRRSRSIHLTSSLSTKSLSLRSGSLRNLSYQYSTGADGRIEMISNADNDRKYPAPRGYFFKLLKLNAPEWPYAVLGAIGSVLSGFIGPTFAIVMGEMLDVFYYRDPNEMEKKTKLYVFIYIGTGIYAVVAYLVQHYFFSIMGENLTTRVRRMMLSAILRNEVGWFDEEENNSSLVAAHLAVDAADVKSAIAERISVILQNMTSLMTSFVVGFIIEWRVAILILATFPLLVLANFAQQLSMKGFAGDTAKAHAKSSMVAGEGVSNIRTVAAFNAQSKILSLFSHELRVPEQQILRRSQTSGLLFGLSQLCLYSSEALILWYGSHLVRSHGSTFSKVIKVFVVLVVTANSVAETVSLAPEIIRGGESIRSIFGILNRATRIEPDDPESERVTTIRGDIELRHVDFSYPARPDIQIFKDFNLKIQAGRSQALVGASGSGKSTIIALIERFYDPCGGKVAIDGKDIRTLNLKSLRRKIGLVQQEPVLFASSILENIAYGKEGASEEEVVEAAKTANVHGFVSQLPDGYRTAVGERGMQLSGGQKQRIAIARAVLKDPAILLLDEATSALDAESECVLQEALERLMKGRTTVLVAHRLSTIRGVDRIAVVQDGRVVEHGSHSDLLARPEGAYSRLLQLQHHRV

SEQ ID NO: 3829 - protein, 405 aa, Zea mays
  VARIANT 200..405: note = Derived polymorphism lacks residues 200 to 405
  VARIANT 203..405: note = Derived polymorphism lacks residues 203 to 405
  VARIANT 214..405: note = Derived polymorphism lacks residues 214 to 405
MDPTNQRSSGAGRRSSVAATMGRGGACVHGQQHVPAPTSLRSPSLPELQQAQSAMPPNPSWNFYPPNGFLNLINQPYMPMSSQPLGENFHFVGLTQNFNTSPPPPPSAKRTKKASRLAKETIQIGGDGDAATEESKAVNKRYWAHDEEVRLASSWLNCSHDPIHGNDKKGETFWKEIAEYFNKHAPADRQRDVNQLKIHWTRLKTVTNNFNGCWSAVSKMHTSGYSDDQLMDEAQKMYANGSNGKPFTLVHWWKALRNEPKFCAQISQMIKEKGQSHTIDITKDKDQLPLQRPIGRDAAKAQRNGKRKAEEVLDGIARLGDSINKIIEVQHDRKQERKKVAETQLEISRLQLKAAQEQKEVKLLEVYSSLLQQDTSQLSNQGKINREKALQKMELKLFGDSENMM

SEQ ID NO: 3830 - protein, 320 aa, Zea mays
  VARIANT 259: note = Ancestral polymorphism is V, Derived polymorphism is L
  VARIANT 234..320: note = Derived polymorphism lacks residues 234 to 320
  VARIANT 207: note = Ancestral polymorphism is E, Derived polymorphism is K
  VARIANT 202: note = Ancestral polymorphism is G, Derived polymorphism is S
  VARIANT 134: note = Ancestral polymorphism is A, Derived polymorphism is T
  VARIANT 109: note = Ancestral polymorphism is F, Derived polymorphism is V
  VARIANT 82: note = Ancestral polymorphism is E, Derived polymorphism is D
  VARIANT 38: note = Ancestral polymorphism is A, Derived polymorphism is P
  VARIANT 16: note = Ancestral polymorphism is P, Derived polymorphism is L
  VARIANT 9: note = Ancestral polymorphism is L, Derived polymorphism is H
MDMAASGALPVVDLAPFFTDGDEGGASRARATEAVRQACRTHGFFRVVNHGVPAHLMARALELSSAFFALPDDDKARARAPEGSEAPLPAGYARQPAHSADKNEYLLVFGPKLGFNVYPAEPSGFREAVEECYTKLTELGLLVQEVLNECMDLPPGFLTDYNSDRSFDFLAALRYFPATEEEDNGISAHEDGNCITFVIQDGVGGLEVLNDDGDWVPAEPVEGSIIVNLGDVIQVLSNNKLKSATHRVVRKPVHRHSFVFFFNIHGAKWIEPLPEFTAKIGEAARYRGFVYNEYMQLRMRNKTHPPARPEDVVHITHYAI

SEQ ID NO: 3831 - protein, 167 aa, Zea mays
  VARIANT 2: note = Ancestral polymorphism is K, Derived polymorphism is E
  VARIANT 5: note = Ancestral polymorphism is A, Derived polymorphism is D
  VARIANT 21: note = Ancestral polymorphism is T, Derived polymorphism is P
MKMRAPAVAFAALLMLLVVATRAHGIRLDRQLHDAINSSKEMADPRRTGDAEASSIAAGDSVKEHCTRDGRCSGTTKQMTTPGLVLSLLPGDSTGNDHRGTTVGGEAATQQGRRHEEEAAAAPTDSYSSSSPEAPGVAARQRQTYPDIMDIAGMDYSPAARKPPIHN

SEQ ID NO: 3832 - protein, 506 aa, Zea mays
  VARIANT 137: note = Ancestral polymorphism is M, Derived polymorphism is T
  VARIANT 268: note = Ancestral polymorphism is G, Derived polymorphism is S
  VARIANT 274: note = Ancestral polymorphism is H, Derived polymorphism is Y
MDMFQEDTLSSATSSPASSLCTPSPHPHGSSWVQELSHDQQGLRLISLLYQCAAEVAAGAFDRANFYLEQITQLASLDAPHTLQRLAAVFADALARKLLNLVPGLSRALLPTGPGSPAEAHLVPAARRHLFDVLPFMKLAYLTTNHAVLEAMEGERFVHVVDLSGPAANPVQWIALFHAFRSRRGGPPHLRVTAVHDAKEFLASMACVLAREAEAFDIPFQFSAVEARLEDLDADALRHLLRVRSGEALAVSVVGQLHRLLAADDAGGGRSSRHVHVPGSSCLTPVQIIARSSPSSFGELLERELNTRLQLSPDYSPVLSISPQSSPVPGQQQQREKAPKLGSFLRAVRALSPKIMVVAEPEANHNAPTFMERFEEALNYYASLFDCLERASAAQAHRCAGERARAERLVLGEEIRGVVAREGAERKERHERLARWARRMEAAGMERVGLSYDGMMEARKLLQSCGWGGGGDDSAYQVAHDASGKAFFFCWHRKPLYSVSAWRPAA

SEQ ID NO: 3833 - protein, 553 aa, Zea mays
  VARIANT 403..553: note = Derived polymorphism lacks residues 403 to 553
MAPASSSSAGVACLVLLLLLLLAGASAAHGSFQARRALSDDHGSGIVARWRRLLADAATPANNSLVLAAARTHRSDPFANLTAYSGGWNISDEHYWASVTYTAVPLFLMAVLWFVGFGIVMLVISCCCCCFCRGKNDAYSPGCYLSSLVLLIIFTMATIAGCLILHGGSDLFHGSTIRTVEYVFGQGNLTVDHLRNFADSLAAAKDITINQIFLPADVQQKIDVVEEKLNSSAGVFSTRLQENSRKIKGVLNHMCVWMDGSFDTICYFAMDFPGSTNCLLLQLLWLAYQYSDSCSPYWGCGFLSPCKLVIAAWILLTNTIISSGLFLLLHNVVADTCVAMGDWVAHPQAHTALDDILPCVDVATANESLYRSQEVTSQLVALVNNVVVNISNRNFPPGLRPLYFNQSGPLMPVLCNPFNPDMSPRRCAPGEVDFGSAAREWKRFECQTTGPPGSELCATPGRVTPAAYGQMTAATSVSKGLYEFSPFLVQLQDCSFVRETFTSITNYNCPGLEQYSRDVYVGLVVISAGVMLSVVFWMVHTRHRRRRAMRKQL

SEQ ID NO: 3834 - protein, 292 aa, Zea mays
  VARIANT 222: note = Ancestral polymorphism is S, Derived polymorphism is G
  VARIANT 217: note = Ancestral polymorphism is F, Derived polymorphism is S
MSHCCPCASASSSTAPFFLPSIPDSSSCRSGSGGAFSAAVGRSKLRCGGGPRRGQATVAAGSKDGGSGGTAGGEKGEDDAPAFNPFGFVTDNPSSRSAIQLPAVPAEDGNVGQMLYGFLVGSYGLTWALNNSSKVLKLAILNSPLTVSSPVPGLFQQLKWPLFGEFTCQNAVLAERFIEAGSAYMLKLEKADVYRLPYLSSGAPGFALLEAARKINFQDVLSRISAGFSSNGWEKPILLAWGISDKYLPLSIAEEFKQANPGVVKLEAIEGAGHMPQEDWPEKVVKALTSFL

SEQ ID NO: 3835 - protein, 294 aa, Zea mays
  VARIANT 62: note = Ancestral polymorphism is G, Derived polymorphism is S
  VARIANT 214: note = Ancestral polymorphism is K, Derived polymorphism is E
MAASPDHLFGLRNSFYVGAYHAVITSSQSLPAHALSPDDLVERDALMYRSYIAIGSYQLVIGEIGPSAATPLQAVKLLAVYLSGDGGNRESVVSRLRELLSDAAVGSNPILRVMAGTVFMHERDYAEALKHTNSGGSMELLALNVQIYLQMNRTDHAEKQLRVMQQLDEDHTLTQLANAWVDLVLGGSKIQEARLIFQDLSEKYPTTCTILNGKALCSMHMGNFEDAEGLLLESLNKDAKDTETLANLTVCSLNLGKPATRYLNQLKLAHPDHALVKRMSSAAESFDRACQAMA

SEQ ID NO: 3836 - protein, 237 aa, Zea mays
  VARIANT 21: note = Ancestral polymorphism is V, Derived polymorphism is M
  VARIANT 49: note = Ancestral polymorphism is A, Derived polymorphism is T
  VARIANT 55: note = Ancestral polymorphism is S, Derived polymorphism is P
  VARIANT 100: note = Ancestral polymorphism is G, Derived polymorphism is C
  VARIANT 103: note = Ancestral polymorphism is A, Derived polymorphism is T
  VARIANT 220: note = Ancestral polymorphism is R, Derived polymorphism is H
MDALCPQVLHVAVAGRALAVVERDGTSDPATGRVLTGSWLWESSLVLAAHLAADPRARRRLRGATVVELGAGTGLPGIAAVACLGAARCVLTDVAALLPGLRANADANGLSAARARVRELRWGDLLPLDDGDGRVGVVLLSDVFYDPEDMPAMAATLRGMWWTDEGGGGTAGWAASEVRDSVLDCMDVLREHGFEVVEVDRVTTPLLRDPGQSAAFAVYRISLRHGDYENFSCSLSC

SEQ ID NO: 3837 - protein, 297 aa, Zea mays
  VARIANT 181..297: note = Derived polymorphism lacks residues 181 to 297
MGSSFKYRAGLCLIVAVVLIWVISAEVTQDKQLSTKEIATYGLYLCPLWFVTEYLSNAALARTSVASTTVLSSTSGLFTLFIGVLLGQDSISASKVIAVFISMAGVVMTTMGQTWASDESEVGKSGATQRTLLGDMFGFMSAIAYGLFTVLLKKFCGEEGEKVDVQKLFGYLGLFTLVALWWIVWPLTALGIEPKFSMPHSAKVDEVVVANSLIGSVLSDYFWLTVELMARALSVVWTTPLVATLGMSLTIPLAMVADMIIHGRHYSAVYILCSVQVFSGFVIASLADRLSRSLGLL

SEQ ID NO: 3838 - protein, 259 aa, Zea mays
  VARIANT 115: note = Ancestral polymorphism is G, Derived polymorphism is D
MEVKKEGAKATLPPGFRFRPTDEELIVHYLRRRALASPLPAAVDIPDVRILAHDPSDLLPPGFGEQERYFFTCKEAKYVKGRRANRATGAGYWKATGKEKPVAVAVRGVQGQGQGQGVLVGMKRSLVFYRGKPPTGSKTEWVMHEYRLAGAGLAPCRRRHADADGDGVARAPAEGWVLCRVFRKKGSAAVARRPGDRSDGEGDESAGGGGGCGGRGFIDFFARADAAGRRRRAPSPAVSSRWLADASPQPEQEATSRGP

SEQ ID NO: 3839 - protein, 184 aa, Zea mays
  VARIANT 44: note = Ancestral polymorphism is A, Derived polymorphism is D
MKTAKAQITIDPWTPAVNAKGCLQKGWFRISGIPMEQRSLVTIAKVGGLVGKVIEIDERTRLRNEYSIFYGGVDIHDRHRDMRLDIDNMSYEELLALEERIGNVGTGLSEEAVIRLLKQRKFSSWTLKASLDPEPCCICQEEYADGDDLGKLDCGHDFHAGCIKQWLVVKNVCPICKSTALKKT

SEQ ID NO: 3840 - protein, 413 aa, Zea mays
  VARIANT 133: note = Ancestral polymorphism is G, Derived polymorphism is D
MWDLNDSPAAEAAPPSPSADDSGASFSSAAALVDIPDDDSAAAAVVTRQFFVLAPAATIGAAPGSSNARAGWLRRAAAPAGGPAAVQAAAGKKSRRGPRSRSSQYRGVTFYRRTGRWESHIWAYDRAAIKFRGVEADINFSLEDYQDDMKQMCHLSKEEFVHVLRRQSTGFPRGSSKYRGVTLHKCGRWEARMGQFLGKKYVYLGLFDTEEEAARAYDRAAIKCNGKDAVTNFDPSIYAEEEVAPAAATGGAAGDEHNLDLSLGSSAGNKRGSLDGGGGGGGDDKSSDQRVPMAFDIDWQTAARRSTKAKLLSNGDPGTAAGGLSLAIGGGGGHWPPQLQHQQQQQRLHGARNNGGGTSWPPPPHPCPPPVPAAAATAAAASSRFHPYVVTSTTQSPAGWVQKNGFHSLARPT

SEQ ID NO: 3841 - protein, 175 aa, Zea mays
  VARIANT 65: note = Ancestral polymorphism is D, Derived polymorphism is Y
MVQLNGRSISSGTKVPLTGGDEVIFNSCGNHAYHPLSDKVPKTVPSSAVSLIESPVASVKRIRTYKRTGDTSAIALAVHFSTCCRGLARVGVCARDGGLHGNHWTKIKPAVNQIETHPYFQRDSLVKFCQKHGICVTAHTPLGGSTANAEWFGRVSCLDDPVIKSLAEKYGKTPA

SEQ ID NO: 3842 - protein, 93 aa, Zea mays
  VARIANT 55..93: note = Derived polymorphism lacks residues 55 to 93
  VARIANT 53: note = Ancestral polymorphism is R, Derived polymorphism is W
  VARIANT 50: note = Ancestral polymorphism is R, Derived polymorphism is C
  VARIANT 49: note = Ancestral polymorphism is R, Derived polymorphism is C
  VARIANT 48: note = Ancestral polymorphism is R, Derived polymorphism is C
  VARIANT 47: note = Ancestral polymorphism is E, Derived polymorphism is A
  VARIANT 41: note = Ancestral polymorphism is G, Derived polymorphism is R
  VARIANT 28..93: note = Derived polymorphism lacks residues 28 to 93
  VARIANT 26: note = Ancestral polymorphism is A, Derived polymorphism is T
  VARIANT 24..93: note = Derived polymorphism lacks residues 24 to 93
  VARIANT 17: note = Ancestral polymorphism is T, Derived polymorphism is M
  VARIANT 8..93: note = Derived polymorphism lacks residues 8 to 93
  VARIANT 1: note = Ancestral polymorphism is M, Derived polymorphism is K
MEAEEYGEMMESVDEVTFALDGLRPAAQKRTRRASLLALLGICASAERRRVLRSQGLVQQIIDAILVLDIDDPPCAIAAGALLFVLASDVSTS

SEQ ID NO: 3843 - protein, 109 aa, Zea mays
  VARIANT 59: note = Ancestral polymorphism is R, Derived polymorphism is W
  VARIANT 49: note = Ancestral polymorphism is G, Derived polymorphism is R
MPVHVALLAVPAVAAGFLQAFQFAFLLWPFNLALPLARHLPHACIAFRGVASLYGAELRRYAGAAARAAVPVLQPPSHHRYASLRAVQQRAHGDAVVAHAMVALVDISY

SEQ ID NO: 3844 - protein, 79 aa, Zea mays
  VARIANT 36: note = Ancestral polymorphism is C, Derived polymorphism is Y
  VARIANT 42: note = Ancestral polymorphism is P, Derived polymorphism is L
MYPRRHFAMQQQQQSSVAGGSSAAAMPLLHGRQPTCAPVAMPGLAEPDAVAHHGSIGWSSPSVVVPAASSDGGGKYLSF

SEQ ID NO: 3845 - protein, 320 aa, Zea mays
  VARIANT 177..320: note = Derived polymorphism lacks residues 177 to 320
MGGWNRSLYVTGHRDRSAGASRTPLPPPSPDYGDKHQQVPLWEREFCRHVGDITWEQFCENKQYVGQFHKLEPWDDSAAFDCFQNAKARFWASYHGQPSDIPLLDDPDLYIDKVDHQCEVDPELVADLDSVGLPFESDDNPASAKGWTNAGADNKCTQNGSGNWDAFVEKPAEVSKWDSEANLASNTTWGGQANVATPEAVWRGQSFSKWGNDSNTSRGVPLEKPSWRGCNKNRYTPNSWSSNFHSRPSDNRYQQLEDPSYTSGTGRKWNGGDGGGYVKQRSFKHRNQDQGQHQQPRSGSWQQDQRGRSRQWRPVHSRAP

SEQ ID NO: 3846 - protein, 84 aa, Zea mays
  VARIANT 51: note = Ancestral polymorphism is W, Derived polymorphism is L
  VARIANT 27: note = Ancestral polymorphism is R, Derived polymorphism is C
MGFPLLAFVAARGLMQVFNLSAPLNLRLPLARHLPEAFAVLFGVLASHAAWLSDALARGAAWRHTGNRGGVDEYVRYAMLSISD

SEQ ID NO: 3847 - protein, 452 aa, Zea mays
  VARIANT 259: note = Ancestral polymorphism is R, Derived polymorphism is W
  VARIANT 257: note = Ancestral polymorphism is T, Derived polymorphism is M
  VARIANT 256: note = Ancestral polymorphism is R, Derived polymorphism is W
  VARIANT 239: note = Ancestral polymorphism is G, Derived polymorphism is S
  VARIANT 216: note = Ancestral polymorphism is P, Derived polymorphism is L
  VARIANT 154: note = Ancestral polymorphism is A, Derived polymorphism is G
  VARIANT 10..452: note = Derived polymorphism lacks residues 10 to 452
MKLPLLRPLWPGLGPAAAGPPDAAPEPAKPSLPATWLLLHALFCATSMAVGFRFSRLIVFLLFLPTPPINPAAHLVSLVSSPAVALAGANATATITTTTTTTTTVTTTTTTVAADIGGAHPHHHHHRHGPVFVGRHPIRVRAWPHPDPSELLKAHRILAAVQNAQRSTKRRGAGPARPVIAVTPTTTSALQVPSLTSLAHTLRLVDAQLVWIVVEPGNRTDAVAAVLSRSNLDFLHITGPGDSTASLRIHALREIRTKRMDGIVVFADENSILRTELFDEAQKVTTVGAVPVGILGEDDGASESFLQAPSCDAEGNLVGYRVSEETVLPANRSDMLMASRLEWSGFVVNARALWEDAKERPVWVRDLDDADPRAASPLALVTDAGRVEPLASCVQAALAWSSLRSDSIHEVKFPHEWKIDPPSLNTGARQQTVQPETQPMQATLASTEDQQH

SEQ ID NO: 3848 - protein, 203 aa, Zea mays
  VARIANT 184: note = Ancestral polymorphism is W, Derived polymorphism is R
  VARIANT 182: note = Ancestral polymorphism is P, Derived polymorphism is S
  VARIANT 178: note = Ancestral polymorphism is K, Derived polymorphism is R
  VARIANT 174: note = Ancestral polymorphism is G, Derived polymorphism is D
  VARIANT 164: note = Ancestral polymorphism is A, Derived polymorphism is T
  VARIANT 150: note = Ancestral polymorphism is P, Derived polymorphism is S
  VARIANT 145: note = Ancestral polymorphism is P, Derived polymorphism is R
  VARIANT 137..203: note = Derived polymorphism lacks residues 137 to 203
  VARIANT 136: note = Ancestral polymorphism is R, Derived polymorphism is C
  VARIANT 134: note = Ancestral polymorphism is L, Derived polymorphism is F
  VARIANT 123..203: note = Derived polymorphism lacks residues 123 to 203
  VARIANT 122: note = Ancestral polymorphism is E, Derived polymorphism is K
  VARIANT 116: note = Ancestral polymorphism is A, Derived polymorphism is V
  VARIANT 82: note = Ancestral polymorphism is A, Derived polymorphism is V
  VARIANT 42: note = Ancestral polymorphism is R, Derived polymorphism is P
  VARIANT 30: note = Ancestral polymorphism is T, Derived polymorphism is A
MDPLQASSNTSKHSARHASDCLAPILRAATARNAARARGRCRRCPRRRPRPPGSATPPPRPRSGPGSAAPSRARPWRCDLQAYRPGATKKHARTYELSEARSARAVDRSSMGWRLAVVVSVEQVEDFLALVHLFRRQLLRHVAHPSQPQPLPLAMDALDEQCRAFFYSDSISSDQKSKQQIPIWQATGHLFLVLVGHQKTTRQ

SEQ ID NO: 3849 - protein, 330 aa, Zea mays
  VARIANT 265..330: note = Derived polymorphism lacks residues 265 to 330
  VARIANT 177..330: note = Derived polymorphism lacks residues 177 to 330
  VARIANT 138..330: note = Derived polymorphism lacks residues 138 to 330
  VARIANT 49..330: note = Derived polymorphism lacks residues 49 to 330
MDNGTILSGEAAMNHAAVSPGTAISGFTRLLNQKLKDDLVKSEMKLSPSYKFSEREGRAAIQIQAAGGGQVIELCPLDLADILFSELKHRAEAHLGCELSAAIIAMPHHLNYNGRQDVVNMARYDAGFRRAAKAIDRQIAAAVAHHRHTEQGDDFTARIIDYMAELIKEPHQWDIRQDAEALRRLRVSCEHAKKALSDQEETMVQIHVTGVESSAPLAGQAGGAQPGPVRQGHATCGWGVGGCPGPTTRAARTWSMRSSSSVAARGCPSSISSSRTTSMAGSQTAAREWNQRTPSFEAPPFFPVLRRRATWRSALTFFTARTDFLWDVMS

SEQ ID NO: 3850 - protein, 144 aa, Zea mays
  VARIANT 120: note = Ancestral polymorphism is R, Derived polymorphism is G
  VARIANT 119: note = Ancestral polymorphism is E, Derived polymorphism is D
  VARIANT 108: note = Ancestral polymorphism is P, Derived polymorphism is S
  VARIANT 98: note = Ancestral polymorphism is D, Derived polymorphism is Y
  VARIANT 95: note = Ancestral polymorphism is V, Derived polymorphism is I
  VARIANT 93: note = Ancestral polymorphism is Q, Derived polymorphism is L
  VARIANT 90: note = Ancestral polymorphism is S, Derived polymorphism is N
  VARIANT 83: note = Ancestral polymorphism is S, Derived polymorphism is P
  VARIANT 82: note = Ancestral polymorphism is T, Derived polymorphism is M
  VARIANT 74: note = Ancestral polymorphism is G, Derived polymorphism is S
  VARIANT 70: note = Ancestral polymorphism is L, Derived polymorphism is R
  VARIANT 55: note = Ancestral polymorphism is R, Derived polymorphism is C
  VARIANT 53: note = Ancestral polymorphism is E, Derived polymorphism is G
  VARIANT 50: note = Ancestral polymorphism is G, Derived polymorphism is R
  VARIANT 38: note = Ancestral polymorphism is S, Derived polymorphism is P
  VARIANT 9: note = Ancestral polymorphism is A, Derived polymorphism is V
MEARCMTKARRLGVPTPVLYDVDPVLHTLTFEHVDGLPVKDILLRFGLDGVNEERLNDIATQIGNAIGKLHDGGLVHGDLTMSNMMIKNSNNQLVLIDFGLSFTSTIPEDKAVDLYVLERALISMHSSRGDVVRRLNRYSSCFH

SEQ ID NO: 3851 - protein, 562 aa, Zea mays
  VARIANT 102..562: note = Derived polymorphism lacks residues 102 to 562
MSEVNNTQLDLEKGFSQVSHDNDSSSPVTVHKMKVETEGGSEIESPTPEKRESRSKGVVVSSLARNLLAERYKDRLANQLVEDESETDDEDYNESVSPSGSRSLFLESIELLEKHKDLLNLFNRMESSIRLLHLRKKMATFNNIATQVEILTKRKLLYSHLAQMKHLFPEAIQIKRILVHDEKSICMYADMEITLVMDVVECTSPDHSLSMTICEAFYSKLLRFLDAHHKGADIPEAILPEPFNSRPREKLYLEAVHNGHAAEPPLHGAVEEGFSNASHFPQSFQKFMSKKIIADGTEKTQLLSDPAELSSVSAYGTKGSNRNPKKQDEHAPVPVNSEISATPSRHLISCCQESTPKQQTSESPLLSGTPAMQTPKRPLLAPLEKPKATCGHISEPRSASSARRSLNTSLTYEGGSPSYYDGMEHTATAKKCMISEDLSSFNKSFEEDSHVFFTDKDKINEVESVDSQERIASLRTTFDIVYDISHSTKNPLITKQELFHNILANNLEIEEIGEIEEQLHILEDLAPDLISKKVINGGEILYSIEPITDKNSVRARLVVEPV

SEQ ID NO: 3852 - protein, 480 aa, Zea mays
  VARIANT 33: note = Ancestral polymorphism is L, Derived polymorphism is Q
  VARIANT 31: note = Ancestral polymorphism is A, Derived polymorphism is V
  VARIANT 21: note = Ancestral polymorphism is Q, Derived polymorphism is H
  VARIANT 19: note = Ancestral polymorphism is P, Derived polymorphism is L
  VARIANT 13: note = Ancestral polymorphism is V, Derived polymorphism is M
  VARIANT 12: note = Ancestral polymorphism is H, Derived polymorphism is D
METAAAPTLAPHVLVVPFPAQGHALPLLDFAGLLAARGLRLTVVTSPANLPLLSPFLAAHPGAVTPLTLPFPSSSSIPPGVESTRGCPPEYFPVFIHALTALREPVRAWARSRSPSDDGPIVAVVADFFCGWAQPLARDLGAAGIVFSPSGVLGAAVPHSLFRRLVRRPAAAEESSVVTFPAIPGEPVYQWREVSMLYRWFVEGGEEDEQAREPVRRNFLWNVEESWGFVFNTLRALEGRYLEQPLEDLGFRRMWAVGPVAPDADAAGARGGETAVAAASLGAWLDPFPEGSVVYVSFGSQAVLTPGVAAALAEALERSAVPFVWVVGAGSSGVVPKGFEVRAASAGRGVVVRGWAPQLATLRHPAVGWFMTHCGWNSVLESAAAGVAMLTWPMTADQFVNARLLVDEARVAVPACAGGFGVAPDPGELATVLADVVGEKGRDVRARAKELAAEAARAVMEGGSSYADLDGLVQEIRNLR

SEQ ID NO: 3853 - protein, 612 aa, Zea mays
  VARIANT 291..612: note = Ancestral polymorphism lacks residues 291 to 612
MAAPPATTATTHHRALLPPTRTHAAATHSALRLPLRAHPHAHAQRARLTAAAAPAPAASTASLESSAAGKPTVLVAEKLGAAGLALLREFANVDCSYGLSPEDLRAKISLCDALIVRSGTKVGRDVFEASGGRLRVVGRAGVGIDNVDLAAATEHGCLVVNAPTANTVAAAEHGIALLTAMARNIAQADASLKAGKWQRNKYVGVSLVGKTLAILGFGKVGSEVARRAKGLGMHVIAHDPYASADRARAIGVELVSMEEAMTTADFISLHMPLTPATNKMLNDEAFAKMKYGVRIINVARGGVIDEDALVRALDSGIVAQAALDVFTKEPPAPDNKLVLHENVTVTPHLGASTVEAQEGVAIEIAEAVIGALKGELAASAVNAPMVPAEVLSELAPFVVLAEKLGHLAVQLVAGGGGIKSVKVTYASARAPDDLDTRLLRAMITKGLIEPISSVFVNLVNADFTAKQRGVRITEERIILDGSPETPIDYIQVQIANVKSKFPSAISETGEITVEGRVKDGVPHLTKVGAFQVDVSLEGSLILCRQVDQPGMIGSVGSVLGEENINVSFMSVGRIAPRKHAVMAIGVDEEPSKVTLRKIGEIPAIEEFVFLKL

SEQ ID NO: 3854 - protein, 256 aa, Zea mays
  VARIANT 183: note = Ancestral polymorphism is P, Derived polymorphism is T
  VARIANT 165: note = Ancestral polymorphism is D, Derived polymorphism is A
  VARIANT 163: note = Ancestral polymorphism is D, Derived polymorphism is G
  VARIANT 158: note = Ancestral polymorphism is A, Derived polymorphism is V
  VARIANT 152: note = Ancestral polymorphism is E, Derived polymorphism is G
  VARIANT 140: note = Ancestral polymorphism is P, Derived polymorphism is L
  VARIANT 135: note = Ancestral polymorphism is P, Derived polymorphism is T
  VARIANT 127: note = Ancestral polymorphism is T, Derived polymorphism is I
  VARIANT 122..256: note = Derived polymorphism lacks residues 122 to 256
  VARIANT 113: note = Ancestral polymorphism is K, Derived polymorphism is N
  VARIANT 66: note = Ancestral polymorphism is A, Derived polymorphism is V
  VARIANT 55: note = Ancestral polymorphism is S, Derived polymorphism is L
  VARIANT 50: note = Ancestral polymorphism is S, Derived polymorphism is L
  VARIANT 46: note = Ancestral polymorphism is A, Derived polymorphism is T
MEYKLLCSQSTSYFRVNLPACPHRSPQNSRFLCKSNAIASQMSIAAVRSSSLALSARSCCSLRRSANSSPFKPVTSQLSKASTSASLGGHRTASSSLSSPSFAGAKGSSAAKKATKELRFWQSWRPTRLHCRHPPLARLPSSTGAQKVESTELWILLACDSDDVDHRTAEVGLDGLDAVFSFPTTVEVVWLGCGVLLHDSGRGGTRRLPWTSTGLVLRQGALVLPRRLGRGRGGGGDLCGEMSEGCSWREGSNRGC

SEQ ID NO: 3855 - protein, 191 aa, Zea mays
  VARIANT 18: note = Ancestral polymorphism is G, Derived polymorphism is V
  VARIANT 36: note = Ancestral polymorphism is S, Derived polymorphism is A
  VARIANT 38: note = Ancestral polymorphism is S, Derived polymorphism is P
  VARIANT 43: note = Ancestral polymorphism is A, Derived polymorphism is T
  VARIANT 49: note = Ancestral polymorphism is S, Derived polymorphism is P
  VARIANT 61: note = Ancestral polymorphism is G, Derived polymorphism is R
  VARIANT 66: note = Ancestral polymorphism is G, Derived polymorphism is V
  VARIANT 74: note = Ancestral polymorphism is V, Derived polymorphism is M
  VARIANT 79: note = Ancestral polymorphism is C, Derived polymorphism is Y
  VARIANT 135: note = Ancestral polymorphism is A, Derived polymorphism is T
  VARIANT 146: note = Ancestral polymorphism is D, Derived polymorphism is N
  VARIANT 147: note = Ancestral polymorphism is R, Derived polymorphism is K
  VARIANT 151: note = Ancestral polymorphism is D, Derived polymorphism is N
  VARIANT 155: note = Ancestral polymorphism is A, Derived polymorphism is V
MDLMRTPHPSHTTSTVVGKENTASKPSKPTSAVRWSTSSLSQASKIQSSVDSTFWAPVLLGSRASGGWRQWRRVGLQLCQNRNSLVAFFAADDPFAPAKDGDDKDDEAVRCPPKEADVDALLSWDVTGLKGLELALLLRLQHDLADRARDDDLTAAIDIWLAIAFDLQRKREFCGLRWGQAGRFTLKYEVL

SEQ ID NO: 3856 - protein, 118 aa, Zea mays
  VARIANT 28: note = Ancestral polymorphism is R, Derived polymorphism is C
  VARIANT 37: note = Ancestral polymorphism is S, Derived polymorphism is F
  VARIANT 65: note = Ancestral polymorphism is R, Derived polymorphism is C
  VARIANT 66: note = Ancestral polymorphism is A, Derived polymorphism is V
  VARIANT 73..118: note = Derived polymorphism lacks residues 73 to 118
  VARIANT 89: note = Ancestral polymorphism is S, Derived polymorphism is C
MDTNSMDPFNGLYVGAFSPYGPEIVQLRRKFGHWNSFDDVEFFEYVEAVKLTGDLSVPAGQITFRAKIGKGKRLENRGAYPEEFGVIASYKGQGRIAQPGFKNPRWVDGELLVLNGKG

SEQ ID NO: 3857 - protein, 243 aa, Zea mays
  VARIANT 81: note = Ancestral polymorphism is G, Derived polymorphism is W
  VARIANT 38: note = Ancestral polymorphism is L, Derived polymorphism is F
MGASASVLSFPTAAAFPAAATAVAGAAGCFALGYLLAFTRLPRHAAGPGSGGTSDDDSEDDSEEDDDENSGRSRAAKRAGGQKRAGLRLLYWARNVVTKSDSAREAERSRSQAAASPLEIENLAEIIEDFKMVLVVRNDLKMGKGKIAAQCSHATLGLFKKLQQRAPKSLRRWERCGQVKVVVKIESEEDMLVLQGRAKSLNLPTHITIDAGRTQIAPNSRTVMAILGPADMVDDVTGGLKLL

SEQ ID NO: 3858 - protein, 240 aa, Zea mays
  VARIANT 173: note = Ancestral polymorphism is V, Derived polymorphism is I
MATAPVTSSMATNSTCVRLPSMPLRRAPAIVSFASRPWSTAMTSCTGLSRHSDVVAAAGHQKLMGSLNNNEGLMFGVVVARFNEVVTNLLLQGALETFERYSVKAENITVVSVPGSFEVPITAQKLGKSGKFDAILCIGAVIRGDTTHYDAVANSAASGVLNAGLSAGMLFSVLPYHLIIKIQIILAFNGDTGVPCVFGVLTCEDMDQALNRAGGKAGNKGAEAALTAIEMASLFRHHLG

SEQ ID NO: 3859 - protein, 230 aa, Zea mays
  VARIANT 122: note = Ancestral polymorphism is A, Derived polymorphism is D
  VARIANT 136: note = Ancestral polymorphism is R, Derived polymorphism is W
MDRLEERNIKKGEREMEEARKEEERKEEAGDRNTQEPQQGQGLSLSLANGSDSGRSGMLPMSNPSANPTQLTIFYGGSVCVYDSVPPEKAQAIMLIAAAAAAAAATKGSAATAFNPPMVHTDTVAPAAVFSPVLTRSPSLQSTSVAAGQAQVVADPSSISKLQADLPIARRHSLQRFLEKRRDRVVSKAPYSPAKSFDGMESAGMEMTADGKQGARPSILKGWGAAKSEV

SEQ ID NO: 3860 - protein, 156 aa, Zea mays
  VARIANT 45: note = Ancestral polymorphism is T, Derived polymorphism is I
  VARIANT 44: note = Ancestral polymorphism is H, Derived polymorphism is Y
  VARIANT 14: note = Ancestral polymorphism is A, Derived polymorphism is D
MGHELSMSQKLSLAYAALVGAGGVMGYMKSGSQKSSALVLYFVHTQLPVRPVFASSIGLGISGRASVGDGVALQEVREDVPSWCRVPCIPGHVLLAFGVFKGLLLFYSSVDDLLTVPTENMVRHSITSEQRSINVTKSTGVAVRYAVLRNPLQNTT

SEQ ID NO: 3861 - protein, 694 aa, Zea mays
  VARIANT 373..694: note = Derived polymorphism lacks residues 373 to 694
MAALEAVRSWAVSVIPPELAAAAGGDPLAALAATAAALVAGLLILAVWFRSGGGAPSKPVATPLRPPPVKVDADADVDDGRKRVTIFFGTQTGTAEGFAKSMADEARVRYEKAVFKVVDLDDYAQEDEEYEEKLKKETVALFFLATYGDGEPTDNAARFYKWFTEGKEKEVWLKDLKYGIFGLGNRQYEHFNKVAKVVDELLEEQGGKRLVPVGLGDDDQCIEDDFTAWKELVWPELDQLLRDEDDTNGASTPYTAAIPEYRVVFIDKSDLSFQDRSWSLANGTGVIDIHHPCRANVAVRKELHKPASDRSCIHLEFDISGTSLVYETGDHVGVYAENSVETVEEAESLLDLSPDTVFSIHADAEDGSPRKGGSSLAPPFPSPCTLRTALLRYADLLNPPKKAALLALASHASDPAEAERLRFLASPAGKDEYSQWITASQRSLLEVMAAFPSAKPPLGVFFAAIAPRLQPRYYSISSSPKMAPSRIHVTCALVYGPSPTGRIHQGVCSTWMKNTIPLEYSEECSWAPIFVRQSNFKLPADPSTPIIMIGPGTGLAPFRGFLQERLALKQSGAELGTSILFFGCRNRNMDYIYEDELQTFLEEGALSELIVAFSREGPTKEYVQHKMVEKATEIWNIISHGGYLYVCGDAKGMARDVHRMLHTVVQEQGSLDSSKTESYVKSLQMEGRYLRDVW

SEQ ID NO: 3862 - protein, 234 aa, Zea mays
  VARIANT 194: note = Ancestral polymorphism is R, Derived polymorphism is C
  VARIANT 171: note = Ancestral polymorphism is S, Derived polymorphism is P
  VARIANT 144: note = Ancestral polymorphism is R, Derived polymorphism is I
  VARIANT 143: note = Ancestral polymorphism is R, Derived polymorphism is H
  VARIANT 133..234: note = Derived polymorphism lacks residues 133 to 234
  VARIANT 127: note = Ancestral polymorphism is S, Derived polymorphism is L
  VARIANT 93: note = Ancestral polymorphism is A, Derived polymorphism is P
  VARIANT 75: note = Ancestral polymorphism is P, Derived polymorphism is L
  VARIANT 46: note = Ancestral polymorphism is N, Derived polymorphism is Y
  VARIANT 1: note = Ancestral polymorphism is M, Derived polymorphism is T
MACGQSAGCGGRDRVTASGVVPHGGGGVPVSAGAETTDQREHTINYIAKVVKYEMSFSGSSLFAALADEIKHYIPGEHLALELNNSVLFFCKAKMMEDVVCTCKCMREQNIRPTSHTFCHMLCGYSSMDMHREVTMLWGEIKRRHEYGELDLFRDLLDSLVLNFLKGGYFPRVMEIISYMSKHNIYCDKWKYGCAFLKLHKNLYMNLNSLHDKTEAQSKRIEDVRAFRLWASIN

SEQ ID NO: 3863 - protein, 554 aa, Zea mays
  VARIANT 226: note = Ancestral polymorphism is K, Derived polymorphism is N
MASLFGARRRRSPEYDGEDDRSGGGRAKRRRLSPEEAAASPAEPGAATGTSHGWLSGFVSGAKRAISSVLLSSSPEETGSGEDGEVEEEDDDVYEEGIDLNENEDIHDIHGEIVPYSESKLAIEQMVMKETFSRDECDRMVELIKSRVRDSTPETHEYGKQEEIPSRNAGIAHDFTGTCRSLSRDRNFTESVPFSSMRMRPGHSSPGFPLQASPQLCTAAVREAKKWLEEKRQGLGVKPEDNGSCTLNTDIFSSRDDSDKGSPVDLAKSYMRSLPPWQSPFLGHQKFDTSPSKYSISSTKVTTKEDYLSSFWTKLEESRIARIGSSGDSAVASKLWNYGSNSRLFENDTSIFSLGTDEKVGDPTKTHNGSEKVAATEPLGRCSLLITPTEDRTDVSYKVAEGNDVSSTGITKDTTGHSADGKALTSEPHIGETHVNSASESIPNDAAPPTQSKMNGSTKKSLVNGVLDQPNANSGLESSGNDYPSYTNSSSAMPPASTELIGSAAAVIDVDSAENGPGTKPEQPAKGASRASKSKVVPRGQKRVLRSATRGRAT

SEQ ID NO: 3864 - protein, 392 aa, Zea mays
  VARIANT 128: note = Ancestral polymorphism is D, Derived polymorphism is E
MKKKIVKKVLEEIEKKNREMQASNAVEDVAIEVGPVETFLNQILNEKPMRFSSEQLAACTRNYSSELGSGGYGVVYKGELPNGLLVAAKVLKVSSMNRKVQEAFMAEIGTIGRTYHVHLVRLYGFCFDASTKALVYEFLENGSLEKYLYGGDEGSTTSTRLEWGTLHGIAVGTAKGIRYLHEECQQRIVHYDIKPANILLTADYTPKVADFGLARLGERENTHMSLTGGGRGTPGYAAPELWMAMPASEKCDVYSFGMVLFEILGRRRNYDPCLEGESKEWFPRWVWEKYEQGEIEHVVSCSCDGIVGGADREKAEIMCKVALWCVQFQPSARPTMSSVVRMLEGEMPIVPPVNPFHYLMESGGGSTSSGLWSGTYQSSSRDTAGAELSPVG

SEQ ID NO: 3865 - protein, 203 aa, Zea mays
  VARIANT 113: note = Ancestral polymorphism is G, Derived polymorphism is C
MTSPPTPLPALARQAMQSPSPPTKVGPPPLPPPPLPAVDAAVIMGVLTAVLLALFLFLIYAKHCKQRGPGERPGGLGLGFAPSSCDRCRSGLSSSAVGALPAVRFGDGDVDVGRATECAVCLGAFDAAELLRVLPACRHAFHAECIDTWLLAHSTCPVCRRRVTGGHVDDSEPEDSAATRQHGRRSADDAEVQVVVHRAWDQR

SEQ ID NO: 3866 - protein, 271 aa, Zea mays
  VARIANT 202..271: note = Derived polymorphism lacks residues 202 to 271
  VARIANT 244..271: note = Derived polymorphism lacks residues 244 to 271
  VARIANT 246..271: note = Derived polymorphism lacks residues 246 to 271
MPGGLEVRGPAHQAFGGLPLVPRAVHNHLYLRVVRRAPAVLPRRRRVLRLGVVHVAPGDAAAADGARGVRQQPGVDALGVEGVAAGGQDAEQLGGVEGAQAHRALGGAAHVDVTVAEPDRRKRAHRGAAEPRAAAVARGGREAEAQAAGPLAGAALLAVLGVDEEEEERQQHGREHAHDDGRVHGRQRRRWQRRWSHLRRRRRRLHGLARKRRQRRRRGRHPVSIMAGAPMNRSRSRERICMSWGGSETESWRRAGLPSELARLKNSASYL

SEQ ID NO: 3867 - protein, 174 aa, Zea mays
  VARIANT 44: note = Ancestral polymorphism is L, Derived polymorphism is F
MGYPREPWRGRELALQPLLFLVGNSPRPQDGSTARTMKPSCAALVSGLLLLLATFAAGAGAASSSSPPSSSLGKHPAELVLLGRKGRELGQLSSSSAYRYYQHQSKQTQQPEEAVAMEVKQPEEEEEEKAKLRWTAGQGADAEAGLIYSADYSGVAMHAGSPPTTKPKHRHPRP

SEQ ID NO: 3868 - protein, 49 aa, Zea mays
  VARIANT 41: note = Ancestral polymorphism is K, Derived polymorphism is Q
  VARIANT 40: note = Ancestral polymorphism is R, Derived polymorphism is W
  VARIANT 29: note = Ancestral polymorphism is V, Derived polymorphism is M
  VARIANT 26: note = Ancestral polymorphism is Y, Derived polymorphism is C
  VARIANT 25: note = Ancestral polymorphism is Q, Derived polymorphism is R
  VARIANT 13: note = Ancestral polymorphism is A, Derived polymorphism is V
  VARIANT 9: note = Ancestral polymorphism is G, Derived polymorphism is S
  VARIANT 8: note = Ancestral polymorphism is V, Derived polymorphism is F
MWEGTWHVGGVLAVSRAFGDKLLKQYIVVDPEIRESYNSRKCGHLGVWW

SEQ ID NO: 3869 - protein, 99 aa, Zea mays
  VARIANT 22: note = Ancestral polymorphism is G, Derived polymorphism is A
  VARIANT 75: note = Ancestral polymorphism is D, Derived polymorphism is E
MYGSEVSLANPSPSHICMLDFGDPFRKHHMVCRYRNKPQLPWSAISLPSGVFVICMLVGYIVGAAWSHYDNVKEDCRKMEELKNRQRQPMLLNLRFKLV

SEQ ID NO: 3870 - protein, 208 aa, Zea mays
  VARIANT 118: note = Ancestral polymorphism is R, Derived polymorphism is S
  VARIANT 104: note = Ancestral polymorphism is V, Derived polymorphism is A
  VARIANT 82: note = Ancestral polymorphism is R, Derived polymorphism is C
  VARIANT 67: note = Ancestral polymorphism is R, Derived polymorphism is S
  VARIANT 28: note = Ancestral polymorphism is R, Derived polymorphism is G
MAGGKRTTARHQHNHPPPPPPNPSPNRGRGVADPPPASDDSPSSKRMLAFHFLRALARIHSTTPAPRRPRTIRRAAYSSMARAASPRRAWTQALLLRRARSRGVAVVGSSRRAVLLRRRVSASAPPPMLRASAGATSAAAPPVQGPPPRQAGEPARADALRRIVPGGAGMEYCSLLDETADYVLHLRAQVQLMQSLVDLFSPPNPTSN

SEQ ID NO: 3871 - protein, 345 aa, Zea mays
  VARIANT 77: note = Ancestral polymorphism is R, Derived polymorphism is L
  VARIANT 113: note = Ancestral polymorphism is A, Derived polymorphism is T
  VARIANT 168: note = Ancestral polymorphism is L, Derived polymorphism is I
  VARIANT 170: note = Ancestral polymorphism is R, Derived polymorphism is L
  VARIANT 175: note = Ancestral polymorphism is T, Derived polymorphism is M
MSQSEPERSHADSPLHLVFVPFLERSHFAPLAAKAASSAAAGAEHEVAATTTAAIVTTAHFAALAPASVPVHAAPLRCPGGYEDFSLLPDDASAAPTFFAAAEAALAPALTAAIRAHHHGGGGGRPVAVVSDAVLYWAPRVARDCGVPHVTFHTIGAFAAAAMVALHLYRPEVHTDRFAVPGGFPRPVTIHRAQVNEEALAHLPLFRAAEAQSCAVVFNSVAALDADFAAYYRSQLPGTPKEVFLVGPTVSPSPLAVASGGTERDPILQWLDGRDEGSVVYVCFGSTCSLGETQLRELATGLRASGRPFVWVVSTTPRGDGGCAEREARASSNGMVVAGRLHVLP

SEQ ID NO: 3872 - protein, 440 aa, Zea mays
  VARIANT 51: note = Ancestral polymorphism is S, Derived polymorphism is L
MEMDGVLQAADAKDWVYKGEGAANLILSYTGSSPSMLGKVLRLKKILKNKSQRAPSCIVFSSHEQLLWGHIPELVESVKQDCLAQAYAVHVMSQHLGANHVDGGVRVRVSRDFLELVEKNVLSSRPAGRVNASSIDNTADAALLIADHSLFSGNPKGSSCIAVEIKAKCGFLPSSEYISEDNTIKKQVTRYKMHQHLKFYQGEISKTSEYNPLDLFSGSKERICMAIKSLFSTPQNNLRIFVNGSLAFGGMGGGADSVHPADTLKCLEDLSKISGLKLPDFTELLSETIFRSEVLGNLLATQKLDDHDIEGVIHLYYNIISQPCLVCKNLTDVELLRKYTFLHSLPLDKSLKIVRDFLISATAKDCSLMISFRPRENGSTDSEYDSVFLESVKRTYEYKAYFLDLDVKPLDKMEHYFKLDQRIVNFYTRNGGGLAISKGQ

SEQ ID NO: 3873 - protein, 212 aa, Zea mays
  VARIANT 61: note = Ancestral polymorphism is E, Derived polymorphism is V
MGQKHEAATAVLTSHCKTRQDQPPHVKYCQDVKGKPPRMAMATSSSYPPPPPFYRLYKNFEQDPSSAPEPPPPIDGPFKALGVDYTGDVVIPSLESHNVRQLYPKGPNIDFKKELRTLNRELQLHILELADILVERPSQYARRVEDITLIFKNLHHLLNSLRPHQARATLIHMLESQIQRRKEAIEDIKQRRVEAQKLLAESLHILDASQAN

SEQ ID NO: 3874 - protein, 331 aa, Zea mays
  VARIANT 120: note = Ancestral polymorphism is N, Derived polymorphism is S
MDVVKAAQLSGRTLERVVVHPLVLLSIVDHYNRVARDTRKRVVGVLLGTSSRGSVDVTNSYAVPFEEDDKDPRIWFLDHNYHESMFSMFKRINAKEHVVGWYSTGPKLRENDLDVHALFNSYVPNPVLVIIDVQPKELGIPTKAYYAVEEVKENATQKSQKVFVHVPSEIAAHEVEEIGVEHLLRDVKDTTISTLATEVTSKLAALKGLDARLREIRSYLDLVIEGKLPLNHEILYHLQDVFNLLPNLNVNELIKAFAVKTNDMMLVIYLSSLIRSVIALHNLINNKVGCFYLLLVLFQSLGASLVDFDVFVTLTTSNEITQFCCEHEIWS

SEQ ID NO: 3875 - protein, 171 aa, Zea mays
  VARIANT 14: note = Ancestral polymorphism is G, Derived polymorphism is D
  VARIANT 19: note = Ancestral polymorphism is S, Derived polymorphism is R
  VARIANT 120: note = Ancestral polymorphism is P, Derived polymorphism is Q
MSFAAFSWPFRRRGGAGSSGASKSAATAEEDEELGVTPQLLDFLRTLSPDAFKAAALQLQGGSTEAAAGDLTSWQERHAVLVLSKAKELAKIRYDLCPRHLKDKQFWRIYFLLAKSYISPYELRAIQKEKLRRMETENCKPKQVISVEVEMQESKRTSLSQASEVDLESQV

SEQ ID NO: 3876 - protein, 152 aa, Zea mays
  VARIANT 57..152: note = Derived polymorphism lacks residues 57 to 152
MKQNIYRYVLPVWFEPTGPGPLAVVTRSAVVVTTYEPRPAGRSIRPHTPSRRRRPSRLRPPAGRSSPSRSGNPRRWLLRRLQGTSTTGTVRWDMPNGAEASVCALSGRWMDSFRIDMTDVCRSTNTSNNYDEDGRAPQREALNRAMSCSCWS

SEQ ID NO: 3877 - protein, 110 aa, Zea mays
  VARIANT 39: note = Ancestral polymorphism is R, Derived polymorphism is H
  VARIANT 43: note = Ancestral polymorphism is P, Derived polymorphism is L
  VARIANT 56: note = Ancestral polymorphism is C, Derived polymorphism is Y
MASSKVVVMAATDALLLIMFSFLILPSPSDGKGMCPLFRSIVPECRDAPLLCIARCQDKGYVGGFCTTQQICMCAQCKSSLLLQQQQHHRFQLAAAAAPEPSATAAAAST

SEQ ID NO: 3878 - protein, 176 aa, Zea mays
  VARIANT 109: note = Ancestral polymorphism is V, Derived polymorphism is I
  VARIANT 102: note = Ancestral polymorphism is G, Derived polymorphism is V
  VARIANT 96: note = Ancestral polymorphism is R, Derived polymorphism is L
  VARIANT 87: note = Ancestral polymorphism is E, Derived polymorphism is K
  VARIANT 84: note = Ancestral polymorphism is I, Derived polymorphism is V
  VARIANT 81: note = Ancestral polymorphism is V, Derived polymorphism is M
  VARIANT 78: note = Ancestral polymorphism is G, Derived polymorphism is R
  VARIANT 73: note = Ancestral polymorphism is G, Derived polymorphism is D
  VARIANT 71: note = Ancestral polymorphism is R, Derived polymorphism is M
  VARIANT 64: note = Ancestral polymorphism is A, Derived polymorphism is V
  VARIANT 42: note = Ancestral polymorphism is C, Derived polymorphism is Y
  VARIANT 14: note = Ancestral polymorphism is R, Derived polymorphism is W
MPGFAQRLAGIPWRSIARQGLSRVFLVAKAYCVIHVVNDHLCSVTLVRGASMLPSLNLAGDAVAVDRVSVRLGRVAPGDIVLMISPEDPRKSVVKRVVGMQGDSVTYLVDPGKSDSSSRTVVVPQDHVWVQGDNIFASNDSRQFGAVPYGLITGKIFCRVWPPESFGAIDDATKQS

SEQ ID NO: 3879 - protein, 244 aa, Zea mays
  VARIANT 181: note = Ancestral polymorphism is Y, Derived polymorphism is C
  VARIANT 154..244: note = Derived polymorphism lacks residues 154 to 244
  VARIANT 147..244: note = Derived polymorphism lacks residues 147 to 244
  VARIANT 108: note = Ancestral polymorphism is R, Derived polymorphism is C
  VARIANT 102: note = Ancestral polymorphism is G, Derived polymorphism is D
  VARIANT 44: note = Ancestral polymorphism is S, Derived polymorphism is P
MRRRAHTGDEFRCPDYPASSRDPAPRFFKARLKNSQQFFMSLYSVMISDDVILDICAESGKENPNDDGPENNPQFTTVYVGNLPHEATMNDVRLFFHSLGAGSIEEVRVTRDKGFGFVRYSTHEEAALAIQMGNGQLIGGRQIKCSWGSKPTPQGTASLPLPPPALAPFSTGVSATDLLAYQRLALSKMASNHPALMGQHSLKQVAALGIGGGASQSIYDGGFQGINTVTGTTSAQQQQQLMYY

SEQ ID NO: 3880 - protein, 763 aa, Zea mays
  VARIANT 164..763: note = Derived polymorphism lacks residues 164 to 763
  VARIANT 205: note = Ancestral polymorphism is A, Derived polymorphism is S
  VARIANT 206..763: note = Derived polymorphism lacks residues 206 to 763
  VARIANT 522..763: note = Derived polymorphism lacks residues 522 to 763
  VARIANT 568..763: note = Derived polymorphism lacks residues 568 to 763
  VARIANT 673..763: note = Derived polymorphism lacks residues 673 to 763
  VARIANT 686: note = Ancestral polymorphism is P, Derived polymorphism is L
MTAPVVNHAAQSAEKLDDGWQLVESKQSKWRRLKLERQRRLKSNQQRRPVPDDMVAVHAEDGVAEYCLREGGVPKAKKLVWRRKDHQHPSEDTALADRHQKPSSLEGDGRGLVSQEFDVIPSKRQRVRKRRHRAKPVSASAKRHAGSVSPVVGDKPCILRWTQQMTRAEDDLQKAVVITVISDREKGAVLPTLLDIELQGIPIHAWEVKTVEQLLSPFASVHHVHPDTLELKDVVVYRCSAWCLDTSLVPASRELWIVEPPFAVDGESSGRRMLMYPIRITFSSAPWRDGSDPIPQAIGMGGDNIGSVQQGYPLSRPPQSRHRGGEDDDDMQQRNLSYQKMAEDRQDNPDVVNPTLEKVKQLKVYSRQRLKNVMTLEGAGDPNPATVLPPSPSDVAAVDTVPSEALVLDVDDVLATPSKDGLPLSLSLLEPGTLPSSLSDVAAAHAAPSEANALDVDAELAAPSEEDLPATPASLEISAREQFINRLSHQITSVLPGPKSIRRQPSWLLQGAADEWRGGNRQKSGSTSTSTGDELVAAATLMRRASCSGVGGGLIILGAEEGLHLRLQPVMLVLFLRRDIGIRQLHLHALLLPHLDRLQHVELFVHLLLHAQALLEEQLYLDLVLLHLLHELRPDVLHQLPCLALHLIALCLLLHRLPHLCQVTQQPGVGLLQLPSVPPLRAELVLEGGHGVASLGPNPGLPRRLLLAGQHQHHGSITFAALSLMITFESSDSKEFPISEFLTFCTHGPSKPQVLMRRRSFYI

SEQ ID NO: 3881 - protein, 220 aa, Zea mays
  VARIANT 64: note = Ancestral polymorphism is G, Derived polymorphism is C
  VARIANT 59: note = Ancestral polymorphism is R, Derived polymorphism is H
MKQAAAAAAAAQQALLLQQQSQPPLFPVHHPHPGLLAAPQIEPIVSGNLPPGFDSSTCRSVYVCNIHLQVTDAVLQEVFQSIGPVEGCKLIRKEKSSFGFIDYHDRRYAALAILSLNGRQLYGQPIKVNWAYTSTPREGTSGHFNIFVGDLCPEVTDATLFAFFSGYSTCSDASVMWDQKTGRSRGFGFVSFRNQQDAQSAINDLNGVFSSSMFLTYVPF

SEQ ID NO: 3882 - protein, 136 aa, Zea mays
  VARIANT 87: note = Ancestral polymorphism is P, Derived polymorphism is A
  VARIANT 74..136: note = Derived polymorphism lacks residues 74 to 136
  VARIANT 58: note = Ancestral polymorphism is S, Derived polymorphism is F
MAAARRRSRSFTFARSWDTASDSVAGIMNAQSELDVLLDGMQGAATVAEDDDDEKLSSDQHTLSLRNAAEARRQPVCSSTIASSMRPRWKQTWPRTKYVYVDVGIDHQETTWSDSHSRQIKAPIRAMLKVPYLPWV

SEQ ID NO: 3883 - protein, 149 aa, Zea mays
  VARIANT 45: note = Ancestral polymorphism is A, Derived polymorphism is E
MEKCSSKIRSIVWLRQTLRRWRSRAASRAAAAAAADAAVPSGHVAVCVGGASRRFVVRAAHLNHPVFRELLRQAEEEYGFPRAGPIALPCDEALFEHVLRHLSAPSKSSSRFVTLDDLQSAGATHCCCVAAAGDSLPLLRGFSADKAVW

SEQ ID NO: 3884 - protein, 475 aa, Zea mays
  VARIANT 331: note = Ancestral polymorphism is Y, Derived polymorphism is H
  VARIANT 305..475: note = Derived polymorphism lacks residues 305 to 475
  VARIANT 5..475: note = Derived polymorphism lacks residues 5 to 475
MGALEGAHLAAVACACDDDEEQSDCIPLLAGDAATAADAMEPAVRALLLGLGEDDRREGLRRTPKRVSKAFRDGTRGYRQKVKDIVRGALFPEVGVDKRTGSAGGTGGQVVVRDIELFSYCESCLLPFSIQCHVGYVPSGGRVVGLSKLSRVSDVFAKRLQNPQRLANEVCGALHASIQPAGVAVALQCWHIPLPENLECKTLQGWIRTSRSCRSGLFEGESSTLWSDFLALVKLRGIDMEAGTGDRCVSVPWCPLRSREVPLSNGLCKKSSTNGMVSAVASMLLSLGEDPLRKELLGTPQRYVQWLMKFRARNLLDVKLNGFTLGNASLHERPGGGTADHGHGSIRTELHLPFCAQCEHHLLPFYGVVHIGYLDKGSGEGIIDRSHFQALVRFYGCKLQVQERMTRQIAEAVHSVSRNGAMVVVEASHMCMISRGVEKIRSNTATVAVLGHFLTDPSAKARFLQNVLRTAGSAV

SEQ ID NO: 3885 - protein, 325 aa, Zea mays
  VARIANT 285: note = Ancestral polymorphism is S, Derived polymorphism is I
  VARIANT 186: note = Ancestral polymorphism is F, Derived polymorphism is L
  VARIANT 70: note = Ancestral polymorphism is G, Derived polymorphism is R
  VARIANT 64: note = Ancestral polymorphism is A, Derived polymorphism is S
  VARIANT 48: note = Ancestral polymorphism is G, Derived polymorphism is S
MAANAGGGGAGGGSGSGSVAAPAVCRPSGSRWTPTPEQIRMLKELYYGCGIRSPSSEQIQRITAMLRQHGKIEGKNVFYWFQNHKARERQKRRLTSLDVNVPAAGAADATTSQLGVLSLSSPPSGAAPPSPTLGFYAAGNGGGSAGLLDTSSDWGSSGAAMATETCFLQDYMGVTDTGSSSQWPCFSSSDTIMAAAAAAARVATTRAPETLPLFPTCGDDDDDDSQPPPRPRHAVPVPAGETIRGGGGSSSSYLPFWGAGAASTTAGATSSVAIQQQHQLQEQYSFYSNSTQLAGTGSQDVSASAAALELSLSSWCSPYPAAGSM

SEQ ID NO: 3886 - protein, 405 aa, Zea mays
  VARIANT 332..405: note = Derived polymorphism lacks residues 332 to 405
  VARIANT 301: note = Ancestral polymorphism is D, Derived polymorphism is Y
  VARIANT 295..405: note = Derived polymorphism lacks residues 295 to 405
  VARIANT 277: note = Ancestral polymorphism is I, Derived polymorphism is S
  VARIANT 250: note = Ancestral polymorphism is P, Derived polymorphism is S
  VARIANT 79: note = Ancestral polymorphism is S, Derived polymorphism is A
MSPCAHAEQQEPDAPPLHNDHHRHQTYVELYHHGLHHVKSSALLCAVGLGIPGAIHRRGGAATVSDLVSGTGVHPAKRAQLRRLMRMLACFGIFGAAGGDEGESETVYTLTPVSSVLVGDKDKEASATSSASSPDMSALLRLLARPSTSVSTFFDMEEWFRDGGTTTLFETALGVASWSLTKSDAAYNRAMNEACVADTSLSMDIMLKDTGGCCGGGGASSVFGGGRLTSLVDVGGGHGAAAIAIANAFPHIKCTVLDLKQVIDKVPPAAATGTDRIINSTAATAVQFVAGDMFESIPPADAVLLRHVLDCWDDEHCVKILGQCKRAIPGREAGGKVIIINVVVGYGSPDKLVKETQVLFDMYMMRYDGSEREEHEWREIFSRAGFSDYKITPTLGFHSIIEVFP

SEQ ID NO: 3887 - protein, 959 aa, Zea mays
  VARIANT 462..959: note = Derived polymorphism lacks residues 462 to 959
  VARIANT 434..959: note = Derived polymorphism lacks residues 434 to 959
MMASSQEKATSGVLRNAAALLDEMQLMGETQGAKKVINSELWHACAGPLVCLPQRGSLVYYFPQGHSEQVAATTKKIPNSRIPNYPSLPPQLLCQVHNITLHADKETDEIYCQMTLQPLHSETDVFPIPTLGAYTKSKHPTEYFCKNLTASDTSTHGGFSVPRRAAEKLFPQLVRASAQTRVFNPQDYSMQPPNQELIVRDLHDNMWTFRHIYRGQPKRHLLTTGWSLFVGAKRLKAGDSVLFIRDEKSQLLVGVRRATRQQPALSSSVLSTDSMHIGVLAAAAHAASSGGSFTIYYNPRTSPSPFVIPLARYNKATYLQPSVGMRFAMMFETEESSKRRCTGAIVGISDYDPMRWPNSKWRNLQVEWDEHGYGERPERVSIWDIETPENMVFSSPLNSKRQCLPSYGVPGLQIGSVNMSSIPRAQGNPIGNLQHMPGMGSELALLLLNQSGQNIGSPIACQQSSFSSIIQNAKHSYFPPKTFGASTASMKQESMPSTEAQPQLNALGIQRSDRVSCEVQTASDSNPAQEMSVKPRAPRSTDSHSSQSISDQNSKGEPRTKTRRSKKSSYQKTISDKSELCSVPSQICDDKKHGSEPRLADCEAEQATCGNNEESSGALTHGDFAGELQVQQQVEQHELLAPPKIESSKSPDGGKSVSSFPNQGCIPQFFEGLDWMIPPSYYQDSNGIQSVTASDNIFNPSEGIPSTMNADALDAFQTSCLSECFPSSIQEFIGSPDINTLAFMSPEMQQLDAGSNLPSTSNSYVQMSFSEESHSASLSGLHMEAIHINSSSCSQPLATGSFDAGAFPKLSNIRECQPLPLQEIHTSSMGTPSCSMDAAAEYGTDRSAKQMKPPVRTYTKVQKLGSVGRCIDVTRFRDYHELRSAIACMFGLQGKLEHPGSSDWKLVYVDYENDVLLVGDDPWEEFINCVRCIRILSPSEVQQMSENGVHVLNDCIQIA

SEQ ID NO: 3888 - protein, 392 aa, Zea mays
  VARIANT 241: note = Ancestral polymorphism is L, Derived polymorphism is H
MVSDQEIASCVESVLRGSAGGPGEVSLTAVLQQAEATLGVDLSHKAGFIRDQMDLFFGPRLQPQPLTTPQLAPPPPQAVVAPADAVPQPQPQHQVLPQAPPSAQQMQPQQLAPLQPQLMFQTIHQLPAISPVPVVSAPPAMAFYPPPPLAFRYTTGLAGAATGGTVSFQQPAPGAGGTASPTAAPQVAGDNKESSSKRKRGGPGGLNKVCAISPELQTIVGETAMSRTQVLNFIVIEIYTLCTLLNNLQDPDDKRKIICNDELRVVFETDNTDMFKMNKLLAKHITPLDPKGQLHEVKRMKAPTMSPQPGRSIDQPSIVISDALAKFIGTDGTFPHDFALKYLWDYIKANQLEDVINESILCDSKLQELFGCESIPMSGLSEMLGHHFIKKT

SEQ ID NO: 3889 - protein, 301 aa, Zea mays
  VARIANT 16: note = Ancestral polymorphism is L, Derived polymorphism is P
MAGLSLEHPWAFAFGLLGNVISFMTFLAPIPTFYRIYKSKSTEGFQSVPYVVALFSAMLWIFYALIKSNETFLITINAAGCVIETIYIVMYFVYAPKKAKLFTAKIMALLNGGVFGVILLLTLLLFKGSKRVVLLGWICVGFSVSVFVAPLSIMRRVIQTKSVEYMPFSLSLSLTLSAVVWFLYGLLIKDKYVALPNVLGFIFGVVQMVLYVFYMNKTPVAAAVGKDAGKLPSAADEHVLVNIAKLNPALPERTSGMHPVTQMAAVPARSCAAEAIAPAMLPNRDVVDVFVSRHSPAVHVV

SEQ ID NO: 3890 - protein, 315 aa, Zea mays
  VARIANT 114: note = Ancestral polymorphism is S, Derived polymorphism is L
MAASVALTPAYPAFLPVPFRVRRDGRVRLSPRRPRYSAGRCRAMAQTFQGGAAASYAREMERLSAKESLLLAFKDAGGFEALVSGKTTEMQRIDVNERIVGLERLNPTPRPTTSPFLEGRWNFEWFGDSSPGAFAARLLFERSPTSVAHFMGLDVLIKDGYSKLSSNLKFLNTVMSEDFSRQVYFFCFQIQSKFLLTTQLSVEGPIRMKEEYVEGLIAIPRINEESLPEQLKGLLGQTAGALQQLPSPIREAVSEGLKLPLGGAFQRLFMISYLDEEILIVRDAAGAPDVLTRLEGPQPSPGDGTADAVISEYES

SEQ ID NO: 3891 - protein, 217 aa, Zea mays
  VARIANT 181: note = Ancestral polymorphism is A, Derived polymorphism is T
  VARIANT 173: note = Ancestral polymorphism is A, Derived polymorphism is T
  VARIANT 92: note = Ancestral polymorphism is G, Derived polymorphism is D
  VARIANT 82..217: note = Derived polymorphism lacks residues 82 to 217
  VARIANT 71: note = Ancestral polymorphism is R, Derived polymorphism is H
  VARIANT 64: note = Ancestral polymorphism is I, Derived polymorphism is S
  VARIANT 50..217: note = Derived polymorphism lacks residues 50 to 217
MQSCPLVSLARLHPSSPPPPPPSPSQAMMLNINLFRTDKGDNPDLIRESQRSRFASVELVDEVIALDKAWRERQFELDKIRQELNATSKKIGKLKASKQEEEAKKLMESTDEIKKRLTGKEVEVKGGVWVGHLLSGYSLPMDMPSQVNVKSSEEVAGMWKHSIKVSYEATKAAFPGGEVIAHLDHKMGECRMLLHILFLGPSNLLDPNASFAQMWQK

SEQ ID NO: 3892 - protein, 168 aa, Zea mays
  VARIANT 74: note = Ancestral polymorphism is E, Derived polymorphism is G
  VARIANT 31: note = Ancestral polymorphism is A, Derived polymorphism is D
MLLLSCWGVVSSKLTHLHLYFHEVDAGAPNATIVNVSSLHILLRAWWLWLPRQAGARRRSPFGDVNVFDNELREGPDPASRLIGRAQGFAVNASLDGSSILSAIDFVFSGSTLTTQGQFDPAGGPSERSIVGGTGKLRFARGYMTSRLLSSTNTTIVVVFDMYFTLPH

SEQ ID NO: 3893 - protein, 169 aa, Zea mays
  VARIANT 14: note = Ancestral polymorphism is S, Derived polymorphism is Y
  VARIANT 15: note = Ancestral polymorphism is D, Derived polymorphism is N
  VARIANT 54..169: note = Derived polymorphism lacks residues 54 to 169
  VARIANT 88: note = Ancestral polymorphism is S, Derived polymorphism is N
  VARIANT 89: note = Ancestral polymorphism is S, Derived polymorphism is L
  VARIANT 124: note = Ancestral polymorphism is S, Derived polymorphism is I
  VARIANT 155: note = Ancestral polymorphism is T, Derived polymorphism is I
  VARIANT 157: note = Ancestral polymorphism is T, Derived polymorphism is I
  VARIANT 163: note = Ancestral polymorphism is G, Derived polymorphism is R
MRGQRLYDSLKALSDVSGPLNPFLLCLAMVDMLVLFETPPDFALFKALDKGKLEKFECLTEFIPNSLVDLNQKNFTGSCMRIVSPFSSSSMNGFWRISVSVVKVYGAWQDHPPCLSYQENDRISVPTLSLAMEIERYIFVCMVSWQIKKQLAADTITVVDTSRDSRHVW

SEQ ID NO: 3894 - protein, 185 aa, Zea mays
  VARIANT 88: note = Ancestral polymorphism is K, Derived polymorphism is I
MPPAPKSGDALFASVDRVNAELFTLTYGAIVRQLLTDLEEVEEVNKQLDQMGYNIGTRLVDEFLAKSNVSRCVDFKETADVIAKLGFKMFLGVTATVTNWDVEGTSCSIVLEDNPLVDFVELPDTCQGLQYCNLLSGVIRGALEMVSMKTEVTWVRDMLRGDDAYEMRVKLIKQVPEEYPYKDDD

SEQ ID NO: 3895 - protein, 256 aa, Zea mays
  VARIANT 250: note = Ancestral polymorphism is V, Derived polymorphism is A
  VARIANT 137..256: note = Derived polymorphism lacks residues 137 to 256
MSGGYGMASSPAWPLPRRRAGHWRVWDARLSRPRMVGYSRCGGGEVGGQRRANAAARDREARSLSGVGGASRWDAKREMRWRTAGLAEVPGLPIAALPSGRPGGGTAGMPADASYPSEQLLISGEKETQDQVYFIKQIESLGNACGTIALLHAVGNASSKRAVFLEKDDTMARAHLLAANDGATELSDLIEEHYVCFVYVNGTLYELDGMKDGPIKHGPCSSISLLQDVVPVIKAIMCNIPNSINFNLMVLSRKEK

SEQ ID NO: 3896 - protein, 90 aa, Zea mays
  VARIANT 38: note = Ancestral polymorphism is L, Derived polymorphism is I
MALPSSSTPTASAPASLGERWPPLESTPAVFNQFVWSLGVPEDDVEFHDVYGLDADALDMVPQPVLAVVLCFPDPPQVHSILEEISPPIL

SEQ ID NO: 3897 - protein, 151 aa, Zea mays
  VARIANT 140: note = Ancestral polymorphism is S, Derived polymorphism is I
MAAKKVVLKLDLHDNRDKQKVLKAVSTLHGIDSIAVDMKESKLTVVGLADPVDVVGRLRKVGSAAIVSVGPATEEKKKDGDKKEGGGDKKDADKKGDDKKPPPPPVYPYPYPWHAYAAAAAAAQYQYHPRPYPPQYVVHSAEEDPNSCVIC

SEQ ID NO: 3898 - protein, 280 aa, Zea mays
  VARIANT 24: note = Ancestral polymorphism is A, Derived polymorphism is E
MSMAASRRLLHLLPRLELCLRSRALSIPLSSRAQGMARRKLVTCRQGAFEQGNAAARDKAVPIPDKVLRHCKYANGRALDLEPIEKNFANESMQFSFEEETDDMVCEISESVVRDVEKAAIELLAARAFTVSELRKKLRSKKYPFDTIDAVIANFKSRGLLNDGFYAESFSRSRWLTSTWGPRRIKQALHQKGVPEAEVDQATRRVFQDGDDYGKEATFGMSEASMDHLFAQASKQWQRAQSLTLESRRARMVRWLQYRGFNWAVTNAVIRKLEAQHPPP

SEQ ID NO: 3899 - protein, 329 aa, Zea mays
  VARIANT 17: note = Ancestral polymorphism is A, Derived polymorphism is T
MAWGVSPRRQPSFPVQALYELCKRSFPSPSAASSSPPPADVVRSISSLMDTITPADVGLRDYNLEDDRGHGFFDSNLLKGSGRLPRWARPIKYLHIYSCDAFSIGIFCLPTSSVIPLHDHPGMTVLSKILYGSMHVKSYDWIEPTVLASSQPARLAKLHTDDVRTAPCPTSILYPQSGGNLHCFTSVSSCAVLDVLAPPYNDDAGRICTYFHDYPFSSLSAAGRTKVAGNPDNYAWLEAINTPVNINMHTGMYTGPTVQKLCRKPVHITVGLVYFLMWPLFSSDDVFAPSLAPLIIIINIMKVTVIGLGFVKAEGVVNSMTRHGDRRIV

SEQ ID NO: 3900 - protein, 420 aa, Zea mays
  VARIANT 84: note = Ancestral polymorphism is V, Derived polymorphism is M
MDAVPPARAARPTSPSRAPKAIRSTKPRGLDEDTAAPPAFPKAKSLPSSAAGAEASLLHHNHHADVPMDARVWAGLPDDLLVEVLARVSPFLLFRLRTVCRRWESVLHDPAFLAAHAAVPSHGPCLLTVSRGGNGTHSPPQCSVLSVPLHARYKLPFAFLPAWDLWLVGSSGGLVCFSGFDGAAFRTIVCNPLTQAWRVLPDMHCNQQRQLVLTVDKNRRSFKVIAASDVYGDKTLPTEVYNSKENKWSVHQMMPAANLCSSKMAFCDSTLYLETLSPLGLMMYRVDAGRWEHIPAKFPRSLLDGYLVAGARTRLFLVGRIGLYSTLQSMRIWELDHGRSVWVEISRMPPRYFRALLRLSAERFECFGQDNLICFTSWNQGKGLLYDVDKKTWSWIAGCASQLCNSQVCFYEPRFDTSIY

SEQ ID NO: 3901 - protein, 420 aa, Zea mays; identical to SEQ ID NO: 3900
  VARIANT 84: note = Ancestral polymorphism is V, Derived polymorphism is M

SEQ ID NO: 3902 - protein, 209 aa, Zea mays
  VARIANT 68..209: note = Derived polymorphism lacks residues 68 to 209
  VARIANT 174: note = Ancestral polymorphism is V, Derived polymorphism is L
MASSLARLGAALPRARPRAATRTLPPPRWDAAALGASRRAAPNVCRCLVHSDVKVAPTSDFKDSSKSETWRIKMLYDGDCPLCMREVNMLRERNKSYGAIKFVDISSKDYSPDDNQGLDYETSMGRIHAVLSDGTVVTDVEAFRKLYEEVGLGWVYAVTKYEPVASMANAVYGLWAKYRMQITGRPPLEEIMASRRAAGECKDDKVCKM

SEQ ID NO: 3903 - protein, 207 aa, Zea mays
  VARIANT 137..207: note = Derived polymorphism lacks residues 137 to 207
MVVRRLGGAGRALLTLPNIRRRASNSWAAVCDTFFSTKQVFENHRIVFTVGTSIASVLTAWAGYSLRHVQQSRIEQRLESIESSLKGNHKVEHEEIKKIVTSSNISAPACVATAMTTMVVGSAVGWRGGAWYARRGLRKEQQKLVGMGHMKSHDRWHWRPFNRLRNSRLASKNKRADAHPSTEAPSTSSNAASADVSCASQPAAGSA

SEQ ID NO: 3904 - protein, 130 aa, Zea mays
  VARIANT 21: note = Ancestral polymorphism is D, Derived polymorphism is N
  VARIANT 40..130: note = Derived polymorphism lacks residues 40 to 130
  VARIANT 75..130: note = Derived polymorphism lacks residues 75 to 130
MLLDASPRFIHLVSLRRLPFDLRAFSSCLWPQFEPCMPRRHGEQERRPVETALERDAAAGTGEVPLIQITPAHRRQQCLLGRHRRDAVLAHVSGVHEPAVGPEEAADAEAGAERAWRREAEEAGEASYED

SEQ ID NO: 3905 - protein, 603 aa, Zea mays
  VARIANT 236: note = Ancestral polymorphism is A, Derived polymorphism is T
MRVNAVDSTMYALSGALRAAAGLAVLEQTCGIHAHAVVVGLDGNVCVGTALVDAYGKAGGVDDAARVFKGLGADRNLITWNTVLSAHAQQGDVQAVIGLFNQMMELGFAPDGLTFLAVLTACSNAGAATEAEFWLETMQSKYSVKPGLEHYTCVVGAMARMGRLEDAESVACTMPCKPDAAVWRTLLMGCVVHRKVDLAESMGQRLLEINPKDDSAYVLLANVYSAAGKKNEEAEAWTAMRDHGVRKEGGRSWIEVRGLVHVFVANERRHEQLLEIYDKLTELILEVEKLGYKETDEGFGHHSERLALAYGLISGAAPSGKVLRIVKNLRICAHCHEFFKYASMVIDRVIVVRDVNRPFIRIIEFYQDIRNFRVLERRLQPLPTEFWLDFADVVATTEGEEVTFMDWGNATVKEIKVECGVITELVGELNLEGSVKTTKLKITWLADIEELVPLSLVEFDYLISKKKLVQGEFFFLLLADGFVMPSWFVVHELPMSAGALTLASVLLYPKKLGGGAVFSRWVPFGSSVRGFHLKRGRLKLREGIYAHLRTFGDRNQDREKAIYNENRTHFFGRIDGMADKVVLFEAGQAGPPFFFAEHISLLS

SEQ ID NO: 3906 - protein, 362 aa, Zea mays
  VARIANT 242: note = Ancestral polymorphism is L, Derived polymorphism is P
MEKSIAIFCLLSIASLKVKVLRRGGVVVSVPELRPRRMEEERPPAAGSGAGTGRVRRGGFVVWLHGLGDCGRANEFIADHFSAAALSDARWAFPTAPTAPVTCNRGMRMPSWFDIHDAPITSVSQNRPVASLLPCAASSLLLPCVCVRACVKRSVRGEEDVLRAVQIVHTMIDREIASGTGPEDVFVFGLSQGGALSIASVLLYPKTLGGCAVFSGFLPFDSSSSSSFAARVTDEAKKTPVLWIHGGADSLIPVQEGWKGETGSSSCGDSAWHASSRNTTGSATLWRRTNWSTASGGRRRPFWEWERTNTDEDKARGRRRRRVAVRGRGRGRGARASRCSAGSSISSPDSRRRRRLFLFLLL

SEQ ID NO: 3907 - protein, 358 aa, Zea mays
  VARIANT 155..358: note = Derived polymorphism lacks residues 155 to 358
  VARIANT 77..358: note = Derived polymorphism lacks residues 77 to 358
  VARIANT 75..358: note = Derived polymorphism lacks residues 75 to 358
  VARIANT 72..358: note = Derived polymorphism lacks residues 72 to 358
MSSTPTVPLPKESNWPDIPAMSWSSPCSCRPADLADLKNTIEETIAICEELQKQCTSLKEALKIVENVSSLQKDEAWKVNVHIHDCDLEQGYLCGTMEALNVPLADTPKLRGRIGVRNKMEVVQQDDEALVKLENTGIERSKAVDSAVLGKYSIWRRENENDKADSRVCLMRDQMIMARIYSILAKSRDKLDLYQELLARLNESQRSLGKATTDAELPKSASDRIKATGQVLSKARDLLYDCKEITQRLRAMLQSADEQRKKFPNSENLENLDLYHYALFSDNVLSASVVVNSTIMNAKSIGFLGPGIDLLCLNAAKSPIIASAWLTVVVGLKSFGHSGDCPTICCRPLLLFTSGEYD

SEQ ID NO: 3908 - protein, 431 aa, Zea mays
  VARIANT 24: note = Ancestral polymorphism is S, Derived polymorphism is W
MAGAAAAAVAVLVLAAAHGALCGSSHVEFVAPAPSPSWDHRGTNSTAALEGCGCEPSPPPPWRFRNDKLRALYPVIQAFKQTITCDPLGVTATWTGTELCDSFFNNGSTTTYYRGFYCDYPPDAPGVLTVASIDFNGFGLCAPSLAGFIDAFPDLALFHANSNNFSGDVPDLTQLRYFYELDLSNNNFSGAFPEAVVPLGGLLFLDLRFNRYAGEVPAPVFALTVEALFLNNNGFGGRIPDTLGSTGAQYLVVANNQFTGPIPRSIYNASATLSEVLFLNNRLSGCLPYEIGLVEGLAVFDAGGNEITGPVPLSFGCLRDVEELNLAGNQLYGQVPDVVCLLARTGKLQNLSLSDNFFHSVGHHCMELVRSRVLDVRRNCILGFPDQRPPLECAAFYVDPSKHCPFIPHIPCELPGYTAHGHPHQGHGGGN

SEQ ID NO: 3909 - protein, 386 aa, Zea mays
  VARIANT 349: note = Ancestral polymorphism is F, Derived polymorphism is S
  VARIANT 344: note = Ancestral polymorphism is T, Derived polymorphism is P
  VARIANT 272: note = Ancestral polymorphism is D, Derived polymorphism is Y
  VARIANT 237..386: note = Derived polymorphism lacks residues 237 to 386
  VARIANT 103: note = Ancestral polymorphism is G, Derived polymorphism is S
  VARIANT 70..386: note = Derived polymorphism lacks residues 70 to 386
MACMWALSARSSLPLCFARHVFPVQCQSNFTKFVTSACLVRALNDERMNHDNIEIEVRHEGNVAIGNVVEYDLDHVIVVVEVTFTLDVYCAVPLSYAEELMPGRKVVAVGRDISGKLMATSGTLTDSGQSEGCGHLMFSTCKLSEVMQGGALFEFDGNFVAMNLFSDMERPIFLPRDIVFERLNHLRTSKEKIIFLAMLKLVRAVKRVQGEEEWSTVQLELTHANAKQPCCSLHQDKQGSMNVNAFEEHFGDKYPNGVWGEFKKEISSNISYTVVALASFHGESKFFACTGFFIDYDGCLTILTSASLVRDPDGANEIAVIGGPLVDLDGRFMGINYYDTEIGTPFLFFHDIWTILCDLKTKKAMAGSHEGRLRNDNGPPNINLLT

SEQ ID NO: 3910 - protein, 328 aa, Zea mays
  VARIANT 8: note = Ancestral polymorphism is P, Derived polymorphism is T
  VARIANT 10: note = Ancestral polymorphism is S, Derived polymorphism is F
  VARIANT 28: note = Ancestral polymorphism is G, Derived polymorphism is E
  VARIANT 48..328: note = Derived polymorphism lacks residues 48 to 328
  VARIANT 299: note = Ancestral polymorphism is P, Derived polymorphism is H
MELPKILPPSYRGISIRYFYYVRTKLFGRPVVLGNGDQYKGLVNSAIQLSKANDNADLEEGYDSSKDEVSSVSSYNPSKANREFSLGSSLSTQSLSSRLSTSEPFYNQVERPNFPSYSPIPGLSVSEISDDHDGGSVAPQRNLNLLLPDHPSNGQRVSPDFDLSKDDVGLPLTPKNVEPAGYEGFTRGRSYNIRIDDQVSITLETSETINPRALHPSRRGSPTVTKLHSEHHEVVSDLHHTSFLFSIPIDGPMSFSTSKVTVQWSLRFEFFTTPEGTDPARYEHPLLVEKREKGEWVLPVTVYAPPLHRRATRGRNDRSGLPGNILDS

SEQ ID NO: 3911 - protein, 458 aa, Zea mays
  VARIANT 170: note = Ancestral polymorphism is R, Derived polymorphism is L
MKRLPILVVPVLLLLLSISFFLFRPTTPPVLSSRQAFEPDRRLRVYVADLPRAFNYGLLDRYWSLRAADSRIQASSDPDHPPPHDHPPYPENPLIKQYSAEYWLLASLRAAATAPAAVRVVADWREADVVFVPFFATLSAEMELGWGTKGAFRKKDGNEDYRRQREVVDRVTSHPAWRRSSGRDHIFVLTDPVAMWHVRAEIAPAILLVVDFGGWYKVDSKSSSKNSSRVIQHTQVSLLKDVIVPYTHLLPTLLLSENKDRRTLLYFKGAKHRHRGGLVREKLWDLLGNEPDVIMEEGFPNATGREQSIKGLRTSEFCLHPAGDTPTSCRLFDAIASLCIPVIVSDEVELPFEGIIDYTEISIFVSVSNAMRPKWLTSYLRNISKQQKDEFRRNLARVQPIFEYDTSYSSSRGSTSIDGAVSHIWKKIQQKLPMIQEAIIRDKRKPDGVSIPLRCHCT

SEQ ID NO: 3912 - protein, 352 aa, Zea mays
  VARIANT 245: note = Ancestral polymorphism is M, Derived polymorphism is T
  VARIANT 156: note = Ancestral polymorphism is N, Derived polymorphism is I
  VARIANT 107: note = Ancestral polymorphism is G, Derived polymorphism is R
MYPLPSSLSFSLVRVEDSKSNSKHATRKSRTHDKRKKNPRNISAALLVPSRAGEMAGMSRAIRNFAAASRRTLTAASGPALPKEAAAAGARVRAAAPGRMGRDQEDGRRVQWVFLGCPGVGKGTYASRLSQLLGVPHIATGDLVRDALATPGPFSNKFAEVVSHGKLLAEIVNHGKLVSDEIIINLLSRRLEEGEEKGELGFILDGFPRTIGQAEILEGVTDIDLVINLKLREEALLAKCLGRRMCSQCGGNFNVASIDIEGEDGGPRMYMPPLLPPPQCESKLIARADDTEEVVKERLRVYHDLTEPVEEFYRARGKLLEFNLPGGIPESWPKLLQALNIEDPDNKRSAAA

SEQ ID NO: 3913 - protein, 731 aa, Zea mays
  VARIANT 16: note = Ancestral polymorphism is A, Derived polymorphism is V
MSILYSISVTPFSLPALPVLLTLESSTFLLPSRLQRCASSSGRLARPTALPPSSGELPPLFLVCLRASSSSCRFWARSPPPPGCAARTRFVDSAEGSAPSSPPICRSTSKAASPSLRSPEQPACPRAGLLLPIRSKSFICLPLIVCELVCCTPSDIWKAHAGSSQSEASGLDMERNGCNHNCCPSPLQPIASAGQHSESSAAYFSWPTSTLMHGSAEGRANYFGNLQKGVLPGHLGRLPNGQQATTLLDLMIIRAFHSKILRRFSLGTAIGFRIRKGTLTDTPAILVFVARKVHRKWLSPTQCLPGALEGPGGVWCDVDVVEFSYYGAPAPTPKEQLYDELVDGLRGSDPSIGSGSQVASLETYGTLGAIVKSRTGNKQVGFLTNRHVAVDLDYPNQKMFHPLPPNLGPGVYLGAVERATSFITDDVWYGIYAGTNPETFVRADGAFIPFADDFEIASVSTSVKGVGVIGNVKAIDLQSPIGSLIGRQVVKVGRSSGMTTGTVVAYALEYNDEKGICFFTDFLVVGENQQTFDLEGDSGSLIILTGQDGEKPQPIGIIWGGTANRGRLKLKSGQGPENWTSGVDLGRLLDLLELDLITTSEGLQAALEEQRITLAAAAAAATNSTATESSPVAGPQEDDKIDKIYEPLGINIIPRDGSAISTDQPNEDVEELNLMSPMRNGEEGNGDFNNLMDLESENSPDGISIALNLGEREPERLRSVSDSMLDIDLQK

SEQ ID NO: 3914 - protein, 529 aa, Zea mays
  VARIANT 404..529: note = Derived polymorphism lacks residues 404 to 529
MDQPPNGFAAGGFFTHIDGQNRSPPSVIVIGGGISGIAAARALSTASFKVTLLESRDRPGGRVHTDYSFGCPIDMGASWLHGVCNENSLAPLIRMLGLRLYRTSGDNSVLYDHDLESYALFDKHGQQVPQEIVSKVGETFERILKETVIVRDEHANDMPLFQAIAIVLDRNPHMKLQGLEYEVLQWCICRLEAWFATDMDNISLKTWDQEHVLTGGHGLMVNGYDPVIRALAQGLDIHLNHRVTKIIQRYNKVIVCVEDGASFVADAAIVTVPLGVLKANIIKFEPELPKEKLSAIADLGVGIENKIALKFDTVFWPDVEVIGRVAPTSNACGYFLNLNKATGNPVLVCMVAGRFAYEIEKLSDEESVNFVMSQLRNMLPQATDPVKYSTGKHSTCFRFQTVWWVDDGSMAPDVFLGSLLQVQYLVSRWGSDPNSLGSYSCDLVGKPADLYERFCAPVGSLFFAGEAACIDHSGSVHGAYSSGIAAAEDCRRRLSAQLGISAGLFQVGKAAMREEMTAEAMVPFQISRL

SEQ ID NO: 3915 - protein, 180 aa, Zea mays
  VARIANT 115: note = Ancestral polymorphism is H, Derived polymorphism is Y
  VARIANT 100: note = Ancestral polymorphism is P, Derived polymorphism is A
MASLSRTAAAAVVALRSAVRSAPLTGRVLGAPLPSFASPSATRSARILRRSAAAASAGLETLMPLHSAVAAARLRSCIAVDSSCWCSLSQGNPFCSGLLPTACCQIFVSVLALQHFRVIVHFEVFRVSDKVEREGEGLKRRGIIVFNHEILSLSVSASMAWICFAFMTARRAAPEETKES

SEQ ID NO: 3916 - protein, 93 aa, Zea mays
  VARIANT 80: note = Ancestral polymorphism is S, Derived polymorphism is F
  VARIANT 48: note = Ancestral polymorphism is S, Derived polymorphism is L
MASLSRTAVAAVRSAARSAPLTGRVPGAPLPSLASSSAARSARILRRSAAASSSGLETLMPLHSAVAAARLRSCIAVDFSCWSSLSQGYALPL

SEQ ID NO: 3917 - protein, 848 aa, Zea mays
  VARIANT 525..848: note = Derived polymorphism lacks residues 525 to 848
MSSSSAASIGQQPPEEEKKCLNSELWHACAGPLVCLPTVATRVVYFPQGHSEQVAASTNKEVDGHIPNYPNLPPQLICQLHDVTMHADVETDEVYAQMTLQPLNPQEQNDPYLPAEMGIMSKQPTNYFCKTLTASDTSTHGGFSVPRRAAERVFPPLVWYSVVCRISHSSLQHRSLLHGIFMMSSGSSGISSEASQPKRHLLTTGWSVFVSAKRLVAGDSVLFIWNEKNQLLLGIRRASRPQTVMPSSVLSSDSMHIGLLAAAAHAAATNSRFTIFFNPRASPSEFVIPLSKYIKAVFHTRISVGMRFRMLFETEESSVRRYMGTITEVSDADPVRWPSSYWRSVKVGWDESTAGERPPRVSLWEIEPLTTFPMYPSLFPLRVKHPWYSGVAALHGTLQILMLVAITLSAAPLVLWLFTCVISVTATNNALMWLRGVAGEGGFQSLNFQSPGVGSWGQQRLHPSLLSNDHDQYQAVVAAAAASQSDGYLKQQFLHLQQPMQSPQEQCNLNPLLQQQILQQGSQQQMVSPDAQNIQSVLNPNAIQQQLQQFQQMQHAHNDQKQKIQPDQPYQVPSSAVLSSPTSLPSHLREKFGFSDPNVNSSSFISSSSNENMLESNFLQGSSKSVDLSRFNQPVVSEQQQQQAWKQKFICSQSMSFGGSVSLNSPTTKDGPVDNKIGRDVQNQTLFSPQVDSSSLLYNMVPNLTSNVADNNISTIPSGSTYLQSPMYGCLDDSSGLLQNTGENDPTTRTFVKVYKSGSVGRSLDITRFSNYAELREELGQMFGIKGQLDDPDRSGWQLVFVDRENDVLLLGDDPWESFVNSVWYIKILSPEDVHKMGKPGNDPRYLS

SEQ ID NO: 3918 - protein, 101 aa, Zea mays
  VARIANT 71: note = Ancestral polymorphism is L, Derived polymorphism is P
  VARIANT 41: note = Ancestral polymorphism is I, Derived polymorphism is R
  VARIANT 15: note = Ancestral polymorphism is D, Derived polymorphism is N
MAEKRATAFGLMKIDEEGRIIEFAEKTKGEQFTEMMVDTTILSLDDVRAKEMPYIASMGIYVFSKDAMLQLLREQFPEANDFGSEVIPGARQNPKETARVT

SEQ ID NO: 3919 - protein, 168 aa, Zea mays
  VARIANT 107: note = Ancestral polymorphism is A, Derived polymorphism is V
MSTPGCGLHCWICCYIGGATDLGPPITSMDRTANNAVLDIESLPQPPDKCCSGSPKMIRALSRKGSNRMERRGGGGGEQEQEDLAKKLVIKVVPSQLEQQPLGQNKALVAPHCTPVLVDSGEGRSKRFISRFTSINPRKILLLFATLSSVGTTILIYFTLAINSKAEA

SEQ ID NO: 3920 - protein, 719 aa, Zea mays
  VARIANT 547..719: note = Derived polymorphism lacks residues 547 to 719
  VARIANT 540: note = Ancestral polymorphism is C, Derived polymorphism is Y
  VARIANT 539: note = Ancestral polymorphism is T, Derived polymorphism is N
  VARIANT 534: note = Ancestral polymorphism is I, Derived polymorphism is N
  VARIANT 447..719: note = Derived polymorphism lacks residues 447 to 719
  VARIANT 397..719: note = Derived polymorphism lacks residues 397 to 719
MSLRLGFHNLEPALAAAAEALFGTRSPPRAVLRRARALHALLVVSSLPSAPRPPTFLVNQLLALYCRLSAVPDALALLRSTPCPSVISYNTVLSALSRTPRHAQDAFGLFRGLHSSGLRPTAPSLCAVLRAAGALRDGRAGAAAHAHASALGFLASDIVPTALLQMYSGCGSPRDANQVFDEMMTPDVVAWNCVMHCNVRYDYLDRALRKFCRMVSTGLAPTESTLSSVLSGCGRSGDLHHGRALHGWVVKSEELDPDLPLHNALLDMYCCCGDLDTAVLVFRRIETPDLVSWNTIISGFSGVADGWTAVQAFVKLKAVSSEWLAPDEYTFAAVVAAAASLPAMCSGKPLHACVIKAGLESSVFVANTLLNMYFTNEDPESAHILFDSVMVKDVIMWTEMVAGHSALGEGELSLKYFIGMLEVGHKADNFSLSSALNSAADLAGLKQGEMLHAQVVKSGYEGNICVSGSLVDMYAKNGTLLRAYSVFCTIQKPDLKCWNAMIGGYGNHGDSEMAFKLFGDMIRSDLQPDHVTYISLLSTCSHCGLVEKGKLYWFCMINDGIVPGFKHYTSMVSLLSRAGLLEEAVELINKSPSAKRYPELWRILLSSSVTFKNLSIGVHAAEQALELDPDDLSTHILLSNLYASIGKWDSVSEIRRKIRGLMIEKEPGLSWIEIEKMVHVFSADDECHTRIDDCRDELLRIMENMVLLDSYENEIVLNG

SEQ ID NO: 3921 - protein, 171 aa, Zea mays
  VARIANT 49: note = Ancestral polymorphism is N, Derived polymorphism is S
  VARIANT 18: note = Ancestral polymorphism is C, Derived polymorphism is F
  VARIANT 15: note = Ancestral polymorphism is V, Derived polymorphism is I
MANNLLRPLALLLAVLGCALCPRADATAFEVGGDDGWVVPPASDGGRYNQWASKNRFLVGDVVHFKYSEDSVLVVTEADYDSCRASHPVFFSNNGDTEVTLDRPGPVYFISGETGHCERGQRMVVRVAGQGAPPPAPPSPPAPTGGSAAPGTTSGAIAALAMALLAIAIGV

SEQ ID NO: 3922 - protein, 309 aa, Zea mays
  VARIANT 211: note = Ancestral polymorphism is P, Derived polymorphism is L
  VARIANT 140: note = Ancestral polymorphism is L, Derived polymorphism is R
  VARIANT 67: note = Ancestral polymorphism is L, Derived polymorphism is V
  VARIANT 41: note = Ancestral polymorphism is R, Derived polymorphism is Q
MFLADKYRSLLPSSHQQPHSKPSRRRQQQQQLLQQEGEADRFGAARLGSLLPLPASPLAALARVADVLALTLADAGPALAGADPAVAAHLDAGVALLDACNAISAGLDRLRRRLLLARLALHLVLSPSPSGGRARARAALADRGDHPAPSPLPSLPFEQPRGRLSAAARVLAAVDAISSLAAAAAAAVLVGGPVTFPRVSGGVGDLPWAEPFNAVSGQLAALGDGEVASLDEAVRRLASALDASGEGAADDEAAVRAAAQEAERRAEEVAPLLDHLSDAVGGVFRAALGLRNAEVDSFMVGPAGKPCST

SEQ ID NO: 3923 - protein, 227 aa, Zea mays
  VARIANT 8: note = Ancestral polymorphism is L, Derived polymorphism is M
  VARIANT 105: note = Ancestral polymorphism is P, Derived polymorphism is L
  VARIANT 135: note = Ancestral polymorphism is P, Derived polymorphism is R
  VARIANT 173: note = Ancestral polymorphism is R, Derived polymorphism is S
  VARIANT 214: note = Ancestral polymorphism is W, Derived polymorphism is R
MLGARVQLKGWQQAAVAFGSAFGALLDPRRADLIAALGETTGKPAFERVLQRMKNSAEGREVLSERPRVVSSQVSHAWDLPQNTFGAAYAQFMGSRNFSPDDRPPVRFMDTDELAYVATRAREVHDFWHVLFGLPTNLIGETALKVIEFEQMFLPMCMLSVVGGSARFSDKQRALFFQHYFPWATKAGLKCTDLMSVYYEKHFHEDLEVVRRNWGILPCPSPKKSSV

SEQ ID NO: 3924 - protein, 121 aa, Zea mays
  VARIANT 47: note = Ancestral polymorphism is M, Derived polymorphism is V
  VARIANT 61: note = Ancestral polymorphism is C, Derived polymorphism is R
  VARIANT 63: note = Ancestral polymorphism is K, Derived polymorphism is N
  VARIANT 69: note = Ancestral polymorphism is R, Derived polymorphism is S
  VARIANT 70: note = Ancestral polymorphism is H, Derived polymorphism is N
MMFFPEAASVEVLAKRAALTYEAALPNGRGAARNVSKVMPSESHFGMNMLISRVLESHGDCCKNSSKVRHNLLEAVWIVTVVPAASSTVAMSDSNGNLCAMIMLPPMVVVFRTNGEATLLR

SEQ ID NO: 3925 - protein, 720 aa, Zea mays
  VARIANT 451..720: note = Derived polymorphism lacks residues 451 to 720
MAPSALASLPAPLRSLRLKTKQQELLLRVSALALIYVLAFAVRLFSVLRYESMIHEFDPYFNYRTTLFLTENGFSEFWNWFDSESWYPLGRVVGGTLFPGLMVTAALLHRLLRALSLAVHIREVCVLTAPFFAANTTLVAYAFGREIWDSGAGLVAAALIATVPGYISRSVAGSYDNEGVAIFALLLTFYFFVRAVNTGSLAWALASAFGYFYMVSAWGGYVFIINLVPLYVLVLLVTGRYSQRLYVAYNCMYVLGMLLAMQIRFVGFQHVQSGEHMAAMGVFFLLQVFFFLDWVKYLLNDARLFKSFLRITLTCVITVGTLALGIGTASGYISPWTGRFYSLLDPTYAKDHIPIIASVSEHQPTAWSSFMFDFHILLFLFPAGLYFCFKRLSDATIFIVMYGLTSMYFAGVMVRLILVAAPAVCLISAIAASATIKNLTTLIRTKSRSPQTTSGKTTGSKSAAKGVVDQSLPFQHNAAIGLLLGAFYLLSRYAIHCTWVTSEAYSSPSIVLAARGHNGGRVIFDDYREAYYWLRQNTPPDAKIMSWWDYGYQITAMGNRTVIVDNNTWNNTHIATVGRAMSSYEDEAYEIMQSLDVNYVLVVFGGVTGYSSDDINKFLWMVRIGGGVFPVIKEPDYLVNGEYRIDKGAAPKMLNCLMYKLCYYRFGELTTEYGKPPGYDRVRGVEIGNKDIKLEYLEEAFTTSNWIVRIYKVKPPKNRS

SEQ ID NO: 3926 - protein, 175 aa, Zea mays
  VARIANT 43: note = Ancestral polymorphism is A, Derived polymorphism is D
  VARIANT 57: note = Ancestral polymorphism is A, Derived polymorphism is S
  VARIANT 139: note = Ancestral polymorphism is L, Derived polymorphism is F
MASAPSTTAPTLAPSLRTPFSSAPRGARLAAAPRLSRAQPGQAGCRAAPGRLARPRSRVRCGAAARFIGQGEFPAEVLESELPVLVDFVADWCGPCRLIAPVVDWASEEYDGRVKIVKIDHDANPQLIEEYKVYGLPTLIFFKNGREVADSRREGAMTKDKFKQYLEPLLTTTVT

SEQ ID NO: 3927 - protein, 145 aa, Zea mays
  VARIANT 19: note = Ancestral polymorphism is A, Derived polymorphism is G
  VARIANT 18: note = Ancestral polymorphism is T, Derived polymorphism is I
  VARIANT 7: note = Ancestral polymorphism is T, Derived polymorphism is M
MTMAQRTMCLLRRSIGFTGPQAQRALSTTAAPAAEGAAVAEATAKEAKRRRKNLFDVVQFLPEWGIGYKVAKTTWRDVSYQITKINLYKDGRHGKAWGLRYKAGVQAADTPTRISGVNKRGWKYIKESQKKLQEAPKVDVAVAAA

SEQ ID NO: 3928 - protein, 482 aa, Zea mays
  VARIANT 208: note = Ancestral polymorphism is S, Derived polymorphism is P
  VARIANT 53: note = Ancestral polymorphism is A, Derived polymorphism is V
MEEDSSAMEPNRLREAEAAAGELKRLREAGQSQYMYRSIADARVVGGRVCLFAVVSEIGATVHSRGTDFTVTLRVIDESYKSGISVTFFADSTALLPCVKSCGDVISLHNVVIKKYRDFFVQFDKKYSSFALFEGKTYTECSPYQTSIRYHDSEHDKDFLNQMRTWLPQGLKDFTSNNSELYLMNLKSDSTFDLVCKVFHVHVENNNSIFYVWDGTDTPAAEFPAILDAEAAKSLSLHEGPPLSREILCTMPDFGTVLRIFSDRFVNKVSYMQKNIYWARFWNITCKQNFGIWKGTFSDSGGVRLLSNKDDSVVDRLKMYDSRIANRVRRRPMASIPSSVTDVEYEDAGYASLMKSLTHHDVTHKLRTLVRVVAAHPCEASLLSTGNCHLRLTLEDPTARIHAYVHKNDLVGFFGGGFLTAEVIVKKMNMVLGIPEPQGSVEVAPSTRNPPWIWCCLMSYYMDKNDPWVSRKYRIYSTAIRD

SEQ ID NO: 3929 - protein, 123 aa, Zea mays
  VARIANT 13..123: note = Derived polymorphism lacks residues 13 to 123
MRRRNSMDKERRRSSIPDITSVDNGDAQGPITGQTNGQAANPGKPPSKQPPCPANTPLGVDAYGTTIGQPVGGPLVSVVGTPVSAPSHLAYGMHVPVPGVVVLDAVVNLAPMPYPMPPPSSHA

SEQ ID NO: 3930 - protein, 387 aa, Zea mays
  VARIANT 92..387: note = Derived polymorphism lacks residues 92 to 387
  VARIANT 98..387: note = Derived polymorphism lacks residues 98 to 387
  VARIANT 314..387: note = Derived polymorphism lacks residues 314 to 387
MLPSHLNGHSALGRRRPRLSAAAGESPAAAGVEAAAPLEEHDRIYFQAYSHLGIHETMIKDRVRTDAYHAAIMRHQKFIEGKVVLDVGCGTGILSVFCARAGAKRVYAVEACEIVVQAREIVKANNLTDQIVVIHGRVEDVDLEEKVDVIISEWMGYMLLYESMLPSVLFARDKWLKPGGLILPSHATLFMAPVTNRERYEDSVDFWRDVYGINMSALVPLAKKFTSEEPSIETIGGENVISWPSVFKRFDCYNFTAEEFKSITSKYKVSSMMLAPIHGFGFWFEVEFNEPIESSHNFPSSLDPLEIIQKKRRRSSEDIVLSTAPEDEPTHWQQTILYFPDPIEVKQDQIIEGSVTVSQSEENPRFLNIHLECFTGGQTLVKDCAMR

SEQ ID NO: 3931 - protein, 728 aa, Zea mays
  VARIANT 442..728: note = Derived polymorphism lacks residues 442 to 728
MGLFDRLLLGGGDRSRGTEDQERGGAEAAAMGSDVPPPSAIPPLSAAAASVVRQCARIAGVPVDQLLRRVDAEEQARGPLEYARSVVEYCSHVALRVEARRPDHLGDREFHTLTYDMMLAWEAPDEETDAVFQKTAFSVLRGDDADDDDSGSIFYSSPTQMAIQVDGRRTVGPEAFAKIAPACPAMAHPITVRNLFDAITNSTGGRLHFLIYHKYLRILNEAFCSAKRVLGGHRAPALQLSDDEVILDIHGAATTKPVLQHIGTSTWPGRLTLTNHALYFEAIGVDFSYGEAVVYDLARDLKQSVKRESTGPWGAHLFDKAVMYKSSLTSEPVFFEFPQFKGHTRRDYWFAAIKEVLHAHKFIRKYKLAGFQKAEALSVATLGILRYRTVKEGFHILPAHFKTILAFNLAEKLPKGDKILEALYGQLKQHCPRFRGGQDLGQSSSEELMLADPFPLSAYTMVTMGLLKLKEEDNAEERDFAVRDVQIGGTSSVQMALERSVGYSGRVEAARATLDQVRVEDIDTNVAVLKELLFPLIEIGKRLLALSGWEEPFKSYVFLLCFLYMAYSGWIWLMFPGFLLGSTIFMLWNKHYRHGRSVGAFEIITPPRRRTVEQLLALQQAISQLEAHVQAGNIFLLKLRSLMLAAFPQSTNRVAAALVAVAAIFTFVPLRTIVLLILLEEYTRQMPVRKKSSEKLVRRLREWWLRIPAAPVQLVKPRETRRWRSRLR

SEQ ID NO: 3932 - protein, 139 aa, Zea mays
  VARIANT 39: note = Ancestral polymorphism is L, Derived polymorphism is P
  VARIANT 45: note = Ancestral polymorphism is A, Derived polymorphism is E
MMSRSCYLAVSVLLAVAATASGAIAPALLHEVRLEEEGLLVAEGARVASTWAGNKVSRAQPMEAWPSGGVATQGDDQSSSGGGEHAKEEGSSKEGEKQGRSCLTKEECHKKKVLCGKACTLSAHSKCAAKCTKSCVPTC

SEQ ID NO: 3933 - protein, 910 aa, Zea mays
  VARIANT 401..910: note = Derived polymorphism lacks residues 401 to 910
MATNTKRAYKLQEFVAHASNVNCLKIGRKTSRVLVTGGEDHKVNLWAIGKPNSILSLSGHTSAVESVGFDSTEVFVAAGAASGTIKLWDLEEAKIVRTLTGHRSNCMSVDFHPFGEFFASGSLDTNLKIWDIRRKNCIHTYKGHTRGVNAIRFTPDGRWVVSGGEDNIVKLWDLTAGKLLHEFKCHEGQIQCIDFHPHEFLLATGSADKTVKFWDLETFELIGSTGPETTGVRSMTFNPDGRTLLCGLHESLKVFSWEPIRCHDTVDVGWSRLADLNVHEGKLLGCSFNQSCVGIWVVDLTRLESYATGTSTKLNGHSELKTVSSGTMPLQNDSGSRANIGQSSVLQSSENNLKASSGRLSVSQNSDSAPKETKSTPSSGLVPSTPQRAGFSSNNRSVGNSTFQSGGTTTTLKRSSLRSNSASNVHNFSKADIVPVIVPRASSGGELVTGSRSDAGDVAPVLPKVTRRADPSSDSRKESNDVEPVIPRASSTMEIASDSAPISTSKSGRRLEAAPDSKKESADTAPAVPNPRANARMEMASDSAPALLKTNKKLDSGTDSKKESADAVPVILISDSRREPSAGRVSPFRIQSRYAELRKLAHAKIDRGSKTTGTDDFNCQIFLPRKNGVFQTISSEETRKDVKCGPVDRTEFSNSSEPNASVRSENYVSRMRKPRDNCYIEVSRKGRARSSVCNWEGRDQSPSHEEPMTASSSLAPTGRPNSSRGSSQASETPIIANDEDVISLFMEQHELFLSSTKSRLTKLQIIHQMWERNDIRGVLSAMERMGDHAVCADMASVLMEKSDVITLDLCTSILPAATDLLESKIDRHLGVALELLVKLVRTFGPMIHSTVSSGPCVGVDLEAEQRRERCNLCFIELENAKNKLPSLTRRKGAVANAAQELALVFQEIMS

SEQ ID NO: 3934 - protein, 415 aa, Zea mays
  VARIANT 13: note = Ancestral polymorphism is E, Derived polymorphism is D
  VARIANT 19: note = Ancestral polymorphism is T, Derived polymorphism is I
  VARIANT 24..415: note = Derived polymorphism lacks residues 24 to 415
  VARIANT 32..415: note = Derived polymorphism lacks residues 32 to 415
  VARIANT 145: note = Ancestral polymorphism is L, Derived polymorphism is S
  VARIANT 147: note = Ancestral polymorphism is V, Derived polymorphism is I
  VARIANT 153: note = Ancestral polymorphism is G, Derived polymorphism is D
  VARIANT 154: note = Ancestral polymorphism is A, Derived polymorphism is V
  VARIANT 155: note = Ancestral polymorphism is G, Derived polymorphism is R
  VARIANT 164: note = Ancestral polymorphism is A, Derived polymorphism is T
  VARIANT 183: note = Ancestral polymorphism is E, Derived polymorphism is K
  VARIANT 197: note = Ancestral polymorphism is S, Derived polymorphism is R
  VARIANT 215: note = Ancestral polymorphism is A, Derived polymorphism is T
  VARIANT 216: note = Ancestral polymorphism is S, Derived polymorphism is F
  VARIANT 226: note = Ancestral polymorphism is D, Derived polymorphism is E
  VARIANT 234: note = Ancestral polymorphism is T, Derived polymorphism is A
  VARIANT 244: note = Ancestral polymorphism is F, Derived polymorphism is L
  VARIANT 253: note = Ancestral polymorphism is R, Derived polymorphism is C
  VARIANT 255: note = Ancestral polymorphism is L, Derived polymorphism is H
  VARIANT 270: note = Ancestral polymorphism is G, Derived polymorphism is V
  VARIANT 279: note = Ancestral polymorphism is S, Derived polymorphism is L
  VARIANT 281..415: note = Derived polymorphism lacks residues 281 to 415
  VARIANT 285: note = Ancestral polymorphism is A, Derived polymorphism is V
  VARIANT 335: note = Ancestral polymorphism is S, Derived polymorphism is C
  VARIANT 339: note = Ancestral polymorphism is G, Derived polymorphism is S
  VARIANT 345..415: note = Derived polymorphism lacks residues 345 to 415
  VARIANT 346: note = Ancestral polymorphism is E, Derived polymorphism is K
  VARIANT 350: note = Ancestral polymorphism is R, Derived polymorphism is C
  VARIANT 354..415: note = Derived polymorphism lacks residues 354 to 415
  VARIANT 396..415: note = Derived polymorphism lacks residues 396 to 415
MLSSFILRELSGEDLKVKTVPLPQRNSMFSSRPKYKKKSSTYNTTTPFHSLQAEKLREKLRQECLRKGTELAHGVADALFAVPPTEDLDGPIVHLPLPVVRLPREKHVSEEAGNHLFVESCIPLHDYMYIIVSQDNATVTLLSNSHVSFLQLGAGTSLPRLVAAKVGADVTLTDIAQNAEAFKEFMHHLTAVCKKLSQRFCNRSISVTEYAMHFASNHMTSSPIGDLNHLISATMSDVTCCLRFLGQLNSDLCKLAVNLITPRLHFFMVGFAPLTSCGSQQYPYAIFRGKMSTKEVDEQMINVQNKNSSYFVEWIPNNVKSSVCDIPPRGLSMASTFIGNSTSIQEMFRRVSEQFTAMFRRKAFLHWYTDEGMDEMEFTEAESNMNDLVSEYHQYQDATADEEAEYEDEEAIQDE

SEQ ID NO: 3935 - protein, 211 aa, Zea mays
  VARIANT 85: note = Ancestral polymorphism is F, Derived polymorphism is L
MAPAASILSVTAVAGSKRPAASDAELPLLDLDSSSLHQQQGDKAGRKGQDQDHHQQQQLECPRCRSTNTKFCYYNNYSTAQPRHFCRACRRYWTHGGTLRDVPVGGASRRAGGGGKRRRVSSAETSSSSPPVPASLADACLSDLPSVFPFLSDGSFFPQLDLGAVVLAPPAFSSSWRSVAPDFYDGLAPWGDIAGLDLSWTPPGSASRSPS

SEQ ID NO: 3936 - protein, 272 aa, Zea mays
  VARIANT 7: note = Ancestral polymorphism is V, Derived polymorphism is I
  VARIANT 72: note = Ancestral polymorphism is L, Derived polymorphism is I
  VARIANT 113: note = Ancestral polymorphism is I, Derived polymorphism is T
  VARIANT 159: note = Ancestral polymorphism is T, Derived polymorphism is M
MAWIWMVLAAGAVLLWAISLGRVLSSAAPSCVPSSPQFMPPLSGDRRSRNVLLVVAHPDDESMFFAPTILFLKSKGHSIHILCMSRGNADGLGDTRKEELYHACVSLKFLKQIMSLQIPHEQVKVLDHPKLQDGFHEKWDHGLVAELTMEHVQLWAIDTIVTFDSYGVSGHPNHKDVHHGICKFLHTNRQGNVEAWELASLSILRKYSGPIDIWLSSLTSFAWTKQPIYTLVNSSPSRSYEAMAAHRSQWVWFRRLFVMFSSYTYINMLRRI

SEQ ID NO: 3937 - protein, 366 aa, Zea mays
  VARIANT 7..366: note = Derived polymorphism lacks residues 7 to 366
MGPARQSRLSRVAPGPGDGRDACPCSSSPPSALPLPLPQPVSLYPRNEYNTNRGKGASGKPRWGKQGSEAKWSGAGLRLGSARGRSLLPVFHGVGVGGCGDSRSLKRRVVCGGRKEPHGAGRHGEEEEEEEEMVVCSTRKSFKDSLKVLEADIQHANTLAADFSRDYDGACLQMRMSYSPAAHFFLFLVQWTDCSLAGALGLLRILIYKVVSLLLRCAVIFPSLMQLPKGISDVDDRRQKAACTERYRRRDEDEGKRPVSEADIEREEECGICMEMNGKVVLPSCSHAMCIKCYRQWRSRSQSCPFCRDSLKRVNSGDLWMLTDCRDVVDMATVTRENIRRLFMYVEKLPLVAPDNIFYAYDSHVK

SEQ ID NO: 3938 - protein, 397 aa, Zea mays
  VARIANT 324..397: note = Derived polymorphism lacks residues 324 to 397
  VARIANT 294: note = Ancestral polymorphism is A, Derived polymorphism is V
  VARIANT 293: note = Ancestral polymorphism is D, Derived polymorphism is Y
  VARIANT 287..397: note = Derived polymorphism lacks residues 287 to 397
  VARIANT 245: note = Ancestral polymorphism is P, Derived polymorphism is S
  VARIANT 238: note = Ancestral polymorphism is M, Derived polymorphism is I
  VARIANT 207: note = Ancestral polymorphism is L, Derived polymorphism is V
  VARIANT 112: note = Ancestral polymorphism is P, Derived polymorphism is L
MSPCAHAEQQEPDAPPLHNDHHRHQTYVELYHHGLHHVKSSALLCAVGLGIPGAIHRRGGAATVSDLVSGTGVHPAKRAQLRRLMRMLACFGIFGAAGGDEGESETVYTLTPVSSVLVGDKDKEASATSSASSPDMSALLRLLARPSTSVSTFFDMEEWFRDGGTTTLFETALGVPPWSLTKSDAAYNRAMNEACVADTSLSMDIMLKDTSGGASSVFGGGRLTSLVDVGGGHGAAAIAIANAFPHIKCTVLDLKQVIDNKVPPAAAAGTDRIINSTVQFVAGDMFESIPPADAVLLRHVLDCWDDEHCVKILGQCKRAIPGREAGGKVIIINVVVGYGSPDKLVKETQVLFDMYMMRYDGSEREEHEWREIFSRAGFSDYKITPTIGFHSIIEVFP

SEQ ID NO: 3939 - protein, 258 aa, Zea mays
  VARIANT 208: note = Ancestral polymorphism is V, Derived polymorphism is L
  VARIANT 207: note = Ancestral polymorphism is K, Derived polymorphism is T
  VARIANT 174: note = Ancestral polymorphism is H, Derived polymorphism is R
  VARIANT 106: note = Ancestral polymorphism is E, Derived polymorphism is V
MVGGRPLFVLFGSSIVQYSFSNGGWGAVLADIYARKADILLRGYTGWNTRRAVQVMDKVFPKDSAVQPSLVIVYFGGNDSIAAHSSGLGPHVPLDEYIANMRKIAEHLKSLSEKTRVIFLSCPPLNEEMLRKSTSSSIAILSEIVRTNETCRLYSDACVALCKEMELKVVDLWHAMQKREDWMTACFTDGLHLSEEGSNVVVEEILKVLKEAEWEPCLHWKAMPTEFAEDSPFDLVSSSGDATVNPSEWTVHRRIPWD

SEQ ID NO: 3940 - protein, 389 aa, Zea mays
  VARIANT 133: note = Ancestral polymorphism is Y, Derived polymorphism is N
  VARIANT 134: note = Ancestral polymorphism is L, Derived polymorphism is R
  VARIANT 135: note = Ancestral polymorphism is F, Derived polymorphism is S
MAGSAVAVVLLSAVALLCLYHLLFLSLSVPDPAAAAAVPRRAGGHHGSNVPSGSGTANVVLRFGLSGQPLRLHDPASAAGLPDIDTFRGKLERLLPPDDHDPGWSRRFDAELGPVHRYFGPDAPLDVRQRIAYLFAILDRSPRGVGVGVGVGELEAWLRWQAAARLDAVTRREMAPHDTDRDGAVTLREFFADWINMGHDKMGWWMHKFASADRDGDGSLNAVEFNDFLHPEDSSQESVMLWLLKDKLSEMDHDGDGRLSQEEFVAQSHIIISGARHADDGGHAHDLERAEAAKKFTELDADKDNYLTVEEARCVLQSLVTGEFSYATSHAKFLMKVVASSNRTADVNHDGKLSLEEMLDDYISFYSTVYMDDHYASEGEVDSDSRDEL

SEQ ID NO: 3941 - protein, 186 aa, Zea mays
  VARIANT 61: note = Ancestral polymorphism is G, Derived polymorphism is A
MEDGDESAAAAAALGLSPQLFVNEVHGIIADISAEAFEAAAAPGVVGAATAAEKATDLQRGLNAIHHVVKDRLDKRMTNWEKFCYRHCFDVPEGFVAADDDSSCANESQKDGISDSDLDLELDSLRRKFGSANKESENLERELSSLERQATFKRRLDSSVSEIEKLFEEEMVQGNLKVLSSISGEN

SEQ ID NO: 3942 - protein, 492 aa, Zea mays
  VARIANT 278: note = Ancestral polymorphism is A, Derived polymorphism is V
  VARIANT 155: note = Ancestral polymorphism is I, Derived polymorphism is T
MTTSPERGEAPPAPPRDSPCEDAAPAAAVVASSSSGSEREEDGGSRQPKASVLSGVFAPPLAIFEGQQQVSSTPCDASSTKPPSGSYAWSRILRRFVGSGSMWRLLGCARVLTSGDVWFLGKCYRVSPEEEESGGSDSDSGHAAFLEDFSSRIWITYRKGFDAIPGSKLTSDVNWGCMVRSSQMLVAQALIFHHLGRSWRKPSEKPYDPDYIRVLHLFGDSEACAFSIHNLLQAGRNYGLAAGSWVGPYAMCRAWQTLIRTNREQADAVDGKENFPMALYVVSGDEDGERGGAPVFCIDVAAQLCSNFNKGQCTWSPILLLIPLVLGLDKINPRYIPLLKETFKFPQSLGILGGKPGTSTYIAGVQEDRALYLDPHDVQMAVDIAPDNLEADTSSYHCSVVRDLALEQIDPSLAIGFYCRDKDDFDDFCSRASELAEKANGAPLFTVMQSVQPSKQMYKQDDGLCCCSGSSMANEDYDLDASGEAGEEWQIL

SEQ ID NO: 3943 - protein, 479 aa, Zea mays
  VARIANT 207: note = Ancestral polymorphism is V, Derived polymorphism is L
MRILCPPFDEKNTNPKISAPQGSPSTMATGGGANETAVGAGEENASASRIPTRRFFVALHVGAGFHAPANEKAYRRAMKRACLAAAAVLREGTGTSLDAVAAAIQVLEDDPVTNAGRGSNLTESGHVECDASIMDGSTGSFGAVGAIRDVKNPIQVALHLAKEQMAGPSLLGRIPPMFLVGEGAYQWAKSKGMDLVESTSEANSWLVTENARAQWVKYTSLLVNTKKSLYHSTGSGSEHHSVQLEAQATKRIPAPPVHLTCVHFIVGTESENIADAKNIFTESFMGDNTDHITDTVGVICVDSYGNVASGASSGGIALKVDGRVGLAAMFGSGCWASSKGPFGTPFVVACCATGAGEHLIRGFAARESCISSSLSQSGPASACTKVLRSVVQSSSKMSHDTGAGLLLVQADVVKGGDLSELEAAELVAAYSSPSFGVGYFGSNMNNPKVVVLKAPEGPCKTTVNQFATCVKFDRESSEQ

SEQ ID NO: 3944 - protein, 1338 aa, Zea mays
  VARIANT 429..1338: note = Derived polymorphism lacks residues 429 to 1338
  VARIANT 124..1338: note = Derived polymorphism lacks residues 124 to 1338
MVSSSSSVVNVYPLANYTFGTKEPKMEKDTSVADRLARMKVNYMKEGMRTSVEAILLVQEHNHPHILLLQIGNTFCKLPGGRLKPGENEIEGLKRKLCSKLAVNSPSFPPNWQLGQHKSLPVVKKGVHDCHFQVGECVAVWWRPNFETVMYPYCPPHITKPKECKKLFIVHLSEREYFAVPRNLKLLAVPLFELYDNIQLEARATSRKPLKTHVAVAGAPAPHAPTFPAPTDQANGGHAHAMGKPKQQVLSRFFSPKPAPVLSSAAPDPPPPLPPNPKPSAAHPPVSTVASFSPAKRARALSLSPKSPAAKRPNPTPPPSRDAVRRRLLEPLHQEPPRLLDPTGGGKGYTPLEQQVVDLKARHPDVLLMVEVGYRFRFFGEDAAVAAAVLGIVAHPDRSFLTASVPNFRLGFHVRRLVAAGHKVGVVRQTETAAIKAAARGVGGAPFSRGLSAVYTRATIEAAAGELEGGGAAAPEEGSSYLVCIVDKEVEAAGREGLQVKVGLVAIEVSTGEVVHGEFLDSDSRSGLEALLLGLAPVEVILGTPLSFATEKIMMAYVGPTSNVRVERVSCEWFGKDAALAELITLFEKSVNNASRAEDDRKLIETNDDNNNFHGIEGIMAMPELVVQALALSVRYLKGFGMERIICFGSSFRPFSADAEFSLSANALQQLEVFRNNSDGTTEGSLFQIMNNTCTSFGSRLLRNWLTRPLCNRHLICARHDAVSEIFESMGPQHSVNNLQDGGDRSCTASVLSDLCIVLSSVLALLGRSPDIQRGISRIFHCKATAKEFVGVIQSILTSGKQLQKLVLEDIGIVSSPHKSVHSPLLRRLINTASSSTILNSAVKLLSCLNKDAADQGDMLNLFIASVDQFPEVAEGHVNVKMAEHKLDLLIVEYRKQFAMHNLEFKTVAGTTHLIELPVDRRVPSNWIKINSTKKAIRYHTPEILKNLDKLLLAKEELAVICRSMWHKFLTDFGKYYAQFQAVVESLAALDCLYSLAVLAKQNNYIRPIFVHDNEPSQIHIKDGRHPVLESLLGDNFVPNDTELHADGEYCQIVTGPNMGGKSCYIRQVALITMMAQVGSFVPASSAMLHVVDGIYTRMGASDSIQQGISTFHEEMNEASNILHNCSSRSLVIIDELGRGTSTHDGVAIAYSTLHYLLKEKKCIVIFVTHYPKILDIQREFEGSVGAYHVSYLATRKLLEVTDKQVETSPEANDLGEIIFLYKLVAGASDRSFGLNVALLAQLPSRCIKRASVMAAKLQEELSPREEIKLRRTTDAQTVDGPSESSAEVGLFCAHPYQRLAETCRRILLNITLAQSNNDVTNTLPSLKNAQEIAQKTI

SEQ ID NO: 3945 - protein, 127 aa, Zea mays
  VARIANT 76: note = Ancestral polymorphism is A, Derived polymorphism is V
MRQARPYSGIFCGGVSARTGPHALPLARIKKIMKRSAGEAAAAADGGARMISGEAPVVFSKACELFVAELTRRAWAATLDGKRRTVHREDVATAVHNTDLFDFLVDVVTADTAGGTGGGGHDGNGAL

SEQ ID NO: 3946 - protein, 527 aa, Zea mays
  VARIANT 177: note = Ancestral polymorphism is A, Derived polymorphism is G
  VARIANT 83: note = Ancestral polymorphism is R, Derived polymorphism is C
  VARIANT 77: note = Ancestral polymorphism is M, Derived polymorphism is T
  VARIANT 75: note = Ancestral polymorphism is V, Derived polymorphism is M
  VARIANT 69: note = Ancestral polymorphism is P, Derived polymorphism is L
  VARIANT 60: note = Ancestral polymorphism is P, Derived polymorphism is T
  VARIANT 57: note = Ancestral polymorphism is G, Derived polymorphism is E
  VARIANT 50: note = Ancestral polymorphism is A, Derived polymorphism is T
  VARIANT 25: note = Ancestral polymorphism is R, Derived polymorphism is C
  VARIANT 3: note = Ancestral polymorphism is M, Derived polymorphism is R
MAMATTEATTLTALLKEAAAAFPTRRAVAVPGRLELTHAALDALVDAAAARLAADAGVLPGHVVALSFPNTVELVIMFLAVIRARGVAAPLNPAYTQEEFEFYLSDSEARLLVTNAEGNAAAQAAAAKLGLAHAAASLHDAAGPVHLAGLPAHAPENGSHGGGAAGSLSPNDPSDVALFLHTSGTTSRPKGVPLKQRNLAASVRNIRSVYRLAETDATVVVLPLFHVHGLLCALLSSLASGASVALPAAGRFSASTFWADMRASGATWYTAVPTIHQIILDRHASRPEAYPALRFIRSCSASLAPAILERLEAAFSAPVLEAYAMTEASHLMTSNPLPEDGPRKPGSVGRAVGQELAVLDEEGRLVAAGSPGEVCVRGDNVTAGYKGNPEANEAAFRFGWFHTGDIGVVDDQGYVRLVGRIKELINRGGEKISPIEVDAVLLGLPGVAQAVSFGVPDDKYGEEINCAVIPRDGSALREEEVLAHCRRNLASFKVPKKVFITDDLPKTATGKIQRRIVAQHFVQPTSA

SEQ ID NO: 3947 - protein, 1025 aa, Zea mays
  VARIANT 321: note = Ancestral polymorphism is V, Derived polymorphism is I
  VARIANT 714..1025: note = Derived polymorphism lacks residues 714 to 1025
MEERGFPNDATKEGNDAYKLATYKLGVEVVSAHDLMRKEGQGSASACVELTFDGQRFRTVVKEKDLNPVWNERFYFNISDPSNLRALALEAYVYSVNKTIESSRSFLGKVRIAGTSFVPFPDAVVMHYPLEKRGMFSRVKGEMGMKVYITNDPAIKASNPLPAMDPVSNNPPPAPSTAEQIAADIIGTNLHKSQEHRSEAKTLHTIAKEVHHNHGHLPASFGEQPSKYSVDQMKPGSQPPRIVRMYSAASQQPMDYALKETSPFLGGGQVVGGRVIHGEKNASTYDLVERTQYLFVRVVKARDLPDMDVTGSLDPYVEVRVGNYRGITKHFEKQKNPEWNAVFAFSRDRMQASVLEVVVKDKDLIKDDFVGFVRFDLNDVPIRVPPDSPLAPEWYRLVGKSGDRSMGELMLAVWVGTQADEAFPDAWHSDAATLEDPSTVTHMKSKVYHAPRLWYLRVNIIEAQDVAILDKTRCPDVFVRAQVGHQLGRTKPVQARNFNPFWNEDIMFVAAEPFEDHLVLTLEDRVGPNKDEMLGRVIIPLAMVDRRADDRIVHGKWFSLEKPVLVDVDQLKRDKFSTRLHIRLCLDGGYHVLDESTNYSSDLRPTAKQLWKPSIGLLELGVLGAQGIVPMKTRDGKGSSDTYCVAKYGSKWVRTRTIMNNPHPRFNEQYTWEVYDPATVLTVGVFDNGQLGEKTSSGKDGKIGKVRIRLSTLESGRVYTHSYPLLVLHPSGVKKMGELHLAIRFSSTSLVNMLYLYSRPLLPKMHYVRPIPVLQVDMLRHQAVQIVAARLSRMEPPLRKEVVEYMTDFDSHLWSMRKSKANFFRLVTVFSGLFAASRWFIGICSWKNPITTVLVHILFIMLVCFPELILPTVFLYMFLIGIWNFRYRPRYPPHMNTKISHAEAVHPDELDEEFDTFPTSRNPEIVRVRYDRLRSVAGRIQIVVGDIATQGERVQALLSWRDPRATSVFVLFCLIAAIVLYVTPLQVLAALGGFYVMRHPRFRHRLPSVPVNFFRRLPARTDSML

SEQ ID NO: 3948 - protein, 906 aa, Zea mays
  VARIANT 237..906: note = Derived polymorphism lacks residues 237 to 906
  VARIANT 340..906: note = Derived polymorphism lacks residues 340 to 906
MQFLSLPTASSPTPRPFKPVASSASFRRPSPPPPPPAPKPSPPPRPPTLPANPLASKLWLTSKLSPPPPPPAPLQTAEEPSPPPPTPPTEPEQEAPPLRQEDFRQKGKVFVGNLPLWARKPEIAEFFRQFGPLEKVELVRGHDDPERNVGFCFLYYGGDDPEAAAGRAVEVDGVEFRGKLLTVRLDDGRKGRARAEERARWVEAGVVREASSPWHKGREDACREFRRVLESRPEDWQAVVSAFERIPKPSRREFGLMVVYYAKRGDKHHARATFENMRARGIEPNAFVFTSLVHAYAVAGDMRGALSCVEEMKSEGIEMTVVTYSILISGYGKTNDAQQQITWPFHFSLSNIISCSGRSADNLFKEAKTKLDNLNGIIYSNIIHAHCQSGNMDRAEELVREMEEDGIDAPIDVYHSMMHGYTVVQDEKKCLIVFERLKECGFKPTIISYGCLINLYVKVGKVPKAIAISKEMESHGIKHNNKTYSMLINGFIHLHDFANAFSIFEDMIKSGLQPDRAIYNLLVEAFCKMGNMDRAIRIFERMQKERMQPSNRTFRPIIEGFAVAGDMKRAFDTLDLMRRSGCAPTVMTYNALIHGLVRKHQVEKAVSVLDKMSIAGIAPNEHTYTIIMRGYAASGDIGKAFEYFTKIKESGLKLDVYIYETLLRACCKSGRMQSALAVTREMSFQKIPRNTFIYNILIDGWARRGDVWEAADLLKQMKEDGIPPNIHTFTSYINACCKAGDMQRAENVIQEMADVGLKPNVKTFTTLIKGWARVSLPDRALKCFEEMKSAGLKPDEAAYHCLVTSLLSRATVMEGSTYTGIFSVCREMFENDLTVDLRTAVHWSKWLHKIERTGGALTEALQRIFPPDWNSSENLEASNSASDGDSESCSDAEFSDNDEDHDVDDL

SEQ ID NO: 3949 - protein, 299 aa, Zea mays
  VARIANT 48: note = Ancestral polymorphism is V, Derived polymorphism is L
  VARIANT 49: note = Ancestral polymorphism is S, Derived polymorphism is F
MPSVQAEVGGGWRPKQQQYPLEIREVWADNVEREFKLIRAAIERFPYVSMDTEFPGVIHHPPPSVHHSALTPPQRYALLKSNVDALHLIQVGLAFAPSASSPPALAFQVNLREFDPRLHRHAPDSVRLLAASGLDLPAHRARGVSARAFAALLMSSGLVCNPDVAWVTFASAYDMAYLVKVLMGRKLPRALPEFLRYVRVYFGNAVYDVKHMARVASAPALLGGLERVAAALRVRRAAGRSHQAASDSVLTWDTFREMARLYFPKEGSLEMCAGVLYGLELHDDDGRGTKPRAEYALLR

SEQ ID NO: 3950 - protein, 214 aa, Zea mays
  VARIANT 197: note = Ancestral polymorphism is E, Derived polymorphism is G
  VARIANT 82: note = Ancestral polymorphism is D, Derived polymorphism is Y
MVGAAIACARLGRLRPGREVHCVFLRHFEDDNLLVWTALIDMYGKCRRAGVARKLFDRLRMWNLVCWNAMIIGHCVYGEPGDGIKLFQHMITPGNVQPDGVTFIGVLCACARLGLLQDRRAYFNQMSTVYNLKPTFAHYWCMAIFMGALGRLLGLCRFRRDWRLGERIALRLMELEPSNNVHYALLCNVYAAVGRWEEVYRVKAIMKERDERPC

SEQ ID NO: 3951 - protein, 252 aa, Zea mays
  VARIANT 39: note = Ancestral polymorphism is R, Derived polymorphism is Q
  VARIANT 45: note = Ancestral polymorphism is R, Derived polymorphism is W
  VARIANT 49: note = Ancestral polymorphism is S, Derived polymorphism is Y
  VARIANT 62: note = Ancestral polymorphism is H, Derived polymorphism is R
  VARIANT 151: note = Ancestral polymorphism is G, Derived polymorphism is D
MAEESVEIVEDGAADGGGIREMTARSALDEVTDTGAFDRSPSTFRSSVSRDGRFPAVAGRYHLYVSYACPWASRCLAFLKLKGLDHAISVTVLWDKQLKTVVNNESSEIIRMLNAEFNGIARNPGLDLYPAHLQASIDEANELVYDAINNDVYKCGFAKKKDGCVLVPDLGLLTNIHDRARELFYYLKGGQVDYGEEHIKACDHNRALSCLLRAQPSAFCGALCWHVGCEGAATDACRQARLIAAMAISYEL

SEQ ID NO: 3952 - protein, 206 aa, Zea mays
  VARIANT 28: note = Ancestral polymorphism is S, Derived polymorphism is R
MGSASRAVSCLCCPCKCLACGLLSCLCSILVSLAVVLGVVALILYFIFKPHMIAATVDSASLSQFALSASSTLSYDLNVTMTVRNPNTRVGLYYDDVQALALFSDQRFGYAPLDAFYQGTQASTQLSPGFRGTQLLQGDVTAAEFRQEQSAGNFAVDVDLNAKLRVKVWAFKVRGPKAKVTCKLSVPAPGAANASPFQPTVCKVWF

SEQ ID NO: 3953 - protein, 221 aa, Zea mays
  VARIANT 46: note = Ancestral polymorphism is R, Derived polymorphism is H
MAVKDCGGHKGCECERERLYRRCCAAVVALILLVLFIVLVVWLVLRPHKPRFYLQDLSVLCLNVTPPASTYLFTTMQATVAARNPNERVGVYYDQADAYAEYKGVAITVPTRLPVQYQGPRDASVWSPFLRAPEGGVQLPPQLAVALAQDETAGYVLVDVRVDGWVRWKVGTSWISGHYHLRVNCPALLTVNDGRGSYGANTGGGTGYFRFQQAAACAVDV

SEQ ID NO: 3954 - protein, 265 aa, Zea mays
  VARIANT 226: note = Ancestral polymorphism is R, Derived polymorphism is C
  VARIANT 36..265: note = Derived polymorphism lacks residues 36 to 265
  VARIANT 8: note = Ancestral polymorphism is P, Derived polymorphism is A
MEDARVLAVVFVDGEQSVDLGTVTVQPSFGGVKRLQAVVADRVGAAPHQISASLARPRRARHVPLDDATDLAAAVAREGSGCYVIAGFRRSRRGGRSRRDRKGVNGAAVEKTILKRLPPTDLASLVSPLPLPPRASAGASPGPLVLYDDYEARLRELQRQRDWYLMSTAGAGPGLDPAYLHLSVAAGHPDNEDPQQWSPRRRPSPCPECEAAAAAMRQPAFHWCVRDAVVSAGFRSHVGPIEPPPKKTPSPLSPPSPGRRPGLVY

SEQ ID NO: 3955 - protein, 958 aa, Zea mays
  VARIANT 423..958: note = Derived polymorphism lacks residues 423 to 958
  VARIANT 371..958: note = Derived polymorphism lacks residues 371 to 958
  VARIANT 63: note = Ancestral polymorphism is C, Derived polymorphism is R
MDAAALALSIILLAAAAATTLARGATHPADQAALEDLRKSLTNPDALGWPDDGDACAWPHVSCDRTGRVDNLDLKNAGLAGTLPPSLPSLAALRDLSLQGNSLSGALPSFRGMASLQRAFLNDNDFDAIPPDFFDGLADLLEISLANNPRLNASQGGWTLPRGLADSSLQLQALSLDNCSLTGGIPDSLARLTGLQNLTLSYNNLSGPVPAALNGSAIQRLWLNNQQGDAKLSGTLDVVATMTGLQELWLHGNDFSGPVPDAIASCKELYTVRLNNNQLLGLLPPGLAALPALRELKLDNNNLLGPVPALKAPTFTFSGNEFCAAKPGEACAPEVMALLHFLAEVQYPNRLVGTWSGNDPCAGWLGVTCVQGKVTMLNLPGYGLNGTVSQSLANVTTLSEVNLAGNNLTGRVPDSLTRLASLQKLDLSMNDLYGPLPAFSPTVDVNVTGNLSFNTTDTQPTDAQPNGESPRPRPTPGASAGAGGNTSAGGIPGSGKKASSAVLLGTTIPVAVSVVALVSVGAVFLCKRRASVPPQAASVVVHPRNSSDPDNLAKIVVATNDDGSSSGTSHSGSSSGQAGDVHVVEAGSFVIAVQVLRGATRNFAQDNVLGRGGFGVVYRGELHDGTMIAVKRMEAVAVSNKALDEFQAEIAVLTKVRHRNLVSILGYAIEGNERLLVYEYMPNGALSKHLFHWKQLQLEPLSWKKRLNIALDVARGMEYLHNLGHHRFIHRDLKSANILLGDDFRAKVADFGLMKDAPDGNYSVATRLAGTFGYLAPEYAVTGKISTKADVFSFGVVLLELITGTTAIDDSRVGEGEETRHLAYWFSQIRKDAEQLRAAIDPALDVGDGETMESIGVIAELAGHCTAREPSQRPDMGHAVNVLVPMVEKWRPVKDEAEDYLGIDLHLPLLQMVKSWQDAEAGGLTDGGGSVMSLDDSKGSIPARPAGFAESFTSADGR

SEQ ID NO: 3956 - protein, 321 aa, Zea mays
  VARIANT 41: note = Ancestral polymorphism is P, Derived polymorphism is A
  VARIANT 29: note = Ancestral polymorphism is A, Derived polymorphism is S
  VARIANT 27: note = Ancestral polymorphism is A, Derived polymorphism is V
MEQGQGPPPPKPPATERDIGFAERAVAAAGAAVVSAVLVNPLDVAKTRLQAQAAGVVYNPEGIFRLWRGTGASLALAVPTVGIYLPSYDLLRNWIEEYSDRNCPKLRPYAPLISGSIARSLACITCCPIELARTRMQAFKESNVGGKPPGMWKTLIGVLSSRQSIKSPENVRGYHLLWTGLGAQLARDAPYSAICWTVLEPIRRHVTRLFGDQSNATVILGANFSAGFIAGVISAGATCPLDVAKTRRQIEASARKDPERVLSMNTRRILLEVWRKEGVEGLFRGAGPRMGRAGPSVGIVVSSYEVVKHLMHKNTSNAADL

SEQ ID NO: 3957 - protein, 72 aa, Zea mays
  VARIANT 39: note = Ancestral polymorphism is A, Derived polymorphism is T
MEKTTTTAQPVCAQESLALLNCVASVPYDRDRCLALVDALRECIVRKRVKKFSLAEPSSTTTTEALKSDTKP

SEQ ID NO: 3958 - protein, 283 aa, Zea mays
  VARIANT 165: note = Ancestral polymorphism is S, Derived polymorphism is F
  VARIANT 54: note = Ancestral polymorphism is R, Derived polymorphism is L
  VARIANT 29: note = Ancestral polymorphism is G, Derived polymorphism is R
  VARIANT 16: note = Ancestral polymorphism is A, Derived polymorphism is S
MGSTGDTTMAEAEAPAPVGDYELLERLGGRPPYTSVWRAVSRSTGTPVAVKQVRLTGLPARLRDSLDCEVRFLAAVSHPNIIRLIDVVQTQSCLYLVLELCEGGDLAAFIRRNGSVDERVARNFMKQIGAGLQVLHRHHVVHRDLKPQNILLSSPRSSDAILKISDFGLARFLGPGEYADTSCGSCLYMAPEVMLFQKYNDKVDMWSIGAILFELLNGYPPFYGRSNVQLLQYINRSTSLPFSEPLASTLGPDCVDICTRLLCTNPVKRLSFQEFLDHRFFRV

SEQ ID NO: 3959 - protein, 562 aa, Zea mays
  VARIANT 254..562: note = Derived polymorphism lacks residues 254 to 562
MEDDDTEGVGESTCPPAADRGGSSSAGGGGGDSHSYTDIEKEVFDRLMEKRIPEVVADPVAFREELRRHFERLPLSYAVDVNVDKAEDVLLHRRILNECAHPENRPIFHVGFLNCIPPSVDPQYNTQSISTSENGNCGGSQDSTLRKFEPCEGIEDLSLTGQKVVVDSVASSSRGDEEILHVHEIIFSTIDKPKLLAQLSALLSEVGLNIREAHVFSTTDGFCLDVFVVDGWDTKETDTLLQILKETAARNHASLSNPTNSAASERVLELQEKIGDSNIDRNFLQIGEKIASGSSGDLHRGTYQGMDVAVKFLRTEHVNDSSKVEFLQEIIILKSVNHDNVVRFYGACTKQRKYVIVTEYMPGGNLYDFLHTLKNTLDLPTVLRIAIGISKGMDYLHQNNIIHRDLKTANLLMGSDYVVKIADFGVSRNPSQGGDMTAETGTYRWMAPEVINHKPYDHRADIFSFAVVLWELVTSKIPYRNLTPLQAALGVRQGMRLEIPSWVNPQLSKLIQRCWDENPNLRPSFSEITAELEGMLRDHQASKGSNKHSKAKAHKKSQREAE

SEQ ID NO: 3960 - protein, 409 aa, Zea mays
  VARIANT 352: note = Ancestral polymorphism is G, Derived polymorphism is E
  VARIANT 348: note = Ancestral polymorphism is V, Derived polymorphism is D
  VARIANT 323: note = Ancestral polymorphism is C, Derived polymorphism is Y
  VARIANT 286: note = Ancestral polymorphism is R, Derived polymorphism is W
  VARIANT 281: note = Ancestral polymorphism is M, Derived polymorphism is I
  VARIANT 250..409: note = Derived polymorphism lacks residues 250 to 409
  VARIANT 241: note = Ancestral polymorphism is C, Derived polymorphism is Y
  VARIANT 240: note = Ancestral polymorphism is S, Derived polymorphism is P
  VARIANT 235..409: note = Derived polymorphism lacks residues 235 to 409
  VARIANT 224: note = Ancestral polymorphism is A, Derived polymorphism is V
  VARIANT 204: note = Ancestral polymorphism is H, Derived polymorphism is Y
  VARIANT 182: note = Ancestral polymorphism is V, Derived polymorphism is M
  VARIANT 181: note = Ancestral polymorphism is T, Derived polymorphism is M
  VARIANT 180: note = Ancestral polymorphism is G, Derived polymorphism is S
  VARIANT 178: note = Ancestral polymorphism is P, Derived polymorphism is S
  VARIANT 176: note = Ancestral polymorphism is A, Derived polymorphism is V
  VARIANT 174: note = Ancestral polymorphism is V, Derived polymorphism is A
  VARIANT 168..409: note = Derived polymorphism lacks residues 168 to 409
  VARIANT 167: note = Ancestral polymorphism is A, Derived polymorphism is T
  VARIANT 166: note = Ancestral polymorphism is S, Derived polymorphism is F
  VARIANT 165: note = Ancestral polymorphism is G, Derived polymorphism is R
  VARIANT 163..409: note = Derived polymorphism lacks residues 163 to 409
  VARIANT 149: note = Ancestral polymorphism is A, Derived polymorphism is V
  VARIANT 138: note = Ancestral polymorphism is S, Derived polymorphism is C
  VARIANT 135: note = Ancestral polymorphism is S, Derived polymorphism is F
  VARIANT 117..409: note = Derived polymorphism lacks residues 117 to 409
  VARIANT 94: note = Ancestral polymorphism is P, Derived polymorphism is L
  VARIANT 90..409: note = Derived polymorphism lacks residues 90 to 409
  VARIANT 88: note = Ancestral polymorphism is R, Derived polymorphism is C
  VARIANT 87: note = Ancestral polymorphism is R, Derived polymorphism is C
  VARIANT 65: note = Ancestral polymorphism is R, Derived polymorphism is C
  VARIANT 51: note = Ancestral polymorphism is E, Derived polymorphism is K
  VARIANT 44: note = Ancestral polymorphism is P, Derived polymorphism is H
  VARIANT 40: note = Ancestral polymorphism is V, Derived polymorphism is A
  VARIANT 39: note = Ancestral polymorphism is A, Derived polymorphism is V
  VARIANT 30: note = Ancestral polymorphism is V, Derived polymorphism is M
MAAGSGPAPPAEAQPPPPIHHLPPDALHNVLLRLQLRDAVVCRPVSRLFHETLSPQLLALLPSLRLLLLRHPRPDGGGCLHAFDPARRTWLRLPFAHFLPYHSFSPVASSTSLLYLWVETSSSTSPLALPPSTSSASSASPVHPPKSLAVCNPFAGTYRLLPQLGSAWARHGTVLAGPAGTVLVLTELAALSYTPSGSAKWMKHPLSLPSKPRSPILASDAVFALCDVGTPWRSQWKLFSCPLAMLTGGWAPVERAAWGDVFEVLKRPRLLAGAGGRRVLMIGGLRSSFAMDAPCSTVLILRLDLATMEWEEAGRMPPNMYRCFTGLCEAASQGGAIPAAAAGGNNKVKVFGGDGKVWFAGKRVRGKLAMWEEDEMGSSGKWDWVDGLPGYGDGVYRGFVFDGGFTAIP

SEQ ID NO: 3961 - protein, 207 aa, Zea mays
  VARIANT 35: note = Ancestral polymorphism is S, Derived polymorphism is P
MASSVGKMAAVVDTENPAATVVVGPPCAVDDDDLSQRANWLRAAVLGANDGLVSTASLMLGVGAVKADARAMVISGFAGLLAGACSMAIGEFVSVCSQRDVELARLDRGAEEEKALPSPVQAAAASALAFSVGALLPLLAAGFVTDYRLRIGVVAAVATATLAAFGCVGAVLGRAPVARSCARVVSGGWAAMAVTFGLMRLFKASGI

SEQ ID NO: 3962 - protein, 405 aa, Zea mays
  VARIANT 52: note = Ancestral polymorphism is A, Derived polymorphism is T
  VARIANT 59: note = Ancestral polymorphism is P, Derived polymorphism is R
  VARIANT 63: note = Ancestral polymorphism is D, Derived polymorphism is V
  VARIANT 65: note = Ancestral polymorphism is L, Derived polymorphism is P
  VARIANT 66: note = Ancestral polymorphism is S, Derived polymorphism is Y
  VARIANT 100: note = Ancestral polymorphism is P, Derived polymorphism is T
MPATDSSSSSSPAAAPLSSIGRSIRSLRRDQNQIHSFPPPPDATDAFQRRAAQLLADLPAADDVLSLAWTRRLLESFLLCLEEFRALLFGSGDSPAARPPLDRLVADFSDRAVKALDLCNAVRDGLDLVRQWRKHLAIAAAVLASSSDSSSPLGEAQIRRARKALTDLTILMLDDRDGGGVVGQRNRSFGRANEKPPRHHRRSSSGGSSGSGSGSHLRSLSWSVSRAWSAARQLQAIGGGLPVPRPHDNAATGGLASAVYTMGAVLFIVAFALVAAIPCQDRGLHAHFSVIRNLPCSAPITTLYERILDESKKKDRKNSCGLLKEIHQIELCSRHLMEITDAADFPLREDKDAVLREAAQDLVHLCESIKEGLDPLERQVREMFHRIVRTRTEILDCLSKPHGTG

SEQ ID NO: 3963 - protein, 462 aa, Zea mays
  VARIANT 319: note = Ancestral polymorphism is D, Derived polymorphism is N
  VARIANT 196: note = Ancestral polymorphism is G, Derived polymorphism is R
  VARIANT 185: note = Ancestral polymorphism is S, Derived polymorphism is R
MEPQPPLPLANGHGNSIVDRDVWLACAAPLSRLPTVGDDVYYFPDGHAEQCPAHLPAPLPAPHFFPCTVTDISLGADDKTDEVFAKISLRPGLAAASRPDPGSSNSPPREPLSYSIKELSQSDANGGGSFCVPRYCGDHVWPKVDFEADPPMQNLVMHDTTGKQWEFRHVYRAKQPRHVLTTGWSKFVNAKLLVAGDIIVFMRRPNGDLIVGLRRMPRYAGTLHRPGTGGDAQDPDQPPPPPPRNALARVPPKDVMEAARLAAEGRPFTVTYYPRKAAGEFVVPRNEVEGVLDTLWEPGSHVLMQFAEAEDTRRTMWADGHVKAIHQKIWRALEIDWDVASSAISAQLGRFVNAWQVQRIAYPSICGGLGDLCYPLPLMESESQVMAMILEQMPPRTSASPPNNPPRPGPGQKVNTIMLFGATIHVVQSDTDDDGYEQLNRDPPPNAAGGGDDMDHDSAENI

SEQ ID NO: 3964 - protein, 466 aa, Zea mays
  VARIANT 171: note = Ancestral polymorphism is P, Derived polymorphism is H
  VARIANT 181: note = Ancestral polymorphism is S, Derived polymorphism is L
  VARIANT 194: note = Ancestral polymorphism is R, Derived polymorphism is C
  VARIANT 220: note = Ancestral polymorphism is Y, Derived polymorphism is C
MGQWDALVDAALARLEARSLLRATRPIALAAPTAAPRTFDGPGPWDHAAVEIRLDRDTLHQWLAEGDEAGGQEEQLDGNLILFSGNDYMGLSSHPAVREAAVKAAQDYGMGPRGSALICGYTTYHKLVEESLARLKKKEDCLLCPTGFSANMAAITALGSITSLLSPGRKPAEHERIAIFSDALNHASIIDGIRLLERQQEALVFVYKHCDMFHLDFLLYVCSSLCSPVAHWKRKLLSQIGKSPLTKRCLFSMDGDFAPFPELIKLRRKYGYLLVIDDAHGTLVCGENGGGAAELFECEKDIDIGVGTLSKAAGCQGGFITCSTQWKRLIQSRGRSFIFSTALPVPVVASVHAALYVSSKETWRRSVIWRHVQYFASLTKLEITSPIISIVVGSEAGALRASRYLLRSGFHVTPIRPPTVPPNSCRLRITLSASHSSDDIKRLVDALTPWLPVKYGNGSYATASKL

SEQ ID NO: 3965 - protein, 168 aa, Zea mays
  VARIANT 1: note = Ancestral polymorphism is M, Derived polymorphism is V
  VARIANT 14: note = Ancestral polymorphism is S, Derived polymorphism is F
  VARIANT 15: note = Ancestral polymorphism is V, Derived polymorphism is M
  VARIANT 20: note = Ancestral polymorphism is A, Derived polymorphism is T
  VARIANT 24: note = Ancestral polymorphism is T, Derived polymorphism is I
MVYVDSWDEFVERSVQLFRADPNTTRYVMKYRHCEGKLVLKVTDDREMPEPEDILDKGMESVGTGTLDNDGTQTQPSQSQGAADQEVVDLDKDCAQHERKKMAPRSDVWNHFSKIKDDKGIMIAAKSKMIKEFGGKGKGKENPTTSKSQSTPSSIRCPPSKSDERPAT

SEQ ID NO: 3966 - protein, 366 aa, Zea mays
  VARIANT 84: note = Ancestral polymorphism is A, Derived polymorphism is V
  VARIANT 284: note = Ancestral polymorphism is H, Derived polymorphism is Y
MATEPALPQGHGDGDSIVDRDVWLACAVPFSRVPTVGAEVYYFPDGHAEQHLLAPLPASHRFPCTCTVTDVSLGAEDRTDEVFAKISLRPGPAAASRPEPGPGPGSSNSTRQGLSYFVNELLHRDTSTSGMFCIPRYCTEHIFPKLDLNANPPEQDLVMRDTRGKPWQFHHIYVVKIRQHRLTAGWSEFVDAKLLVAGDTIVFMRHPNGDLILGLRRKATRTSWRPRASPPWAGPSRSPTSRDRPPWSSSSRTARWIARSPPAGNEARRLEDENKQRSVWVDGHVVKANRQNIWRMLEIHWWGDSPASASPPSRAMSRFVNVWQVQRVAWFLPRPYYWRVRKKPGPGHEHDIGGATNSCNAKPLSC

SEQ ID NO: 3967 - protein, 549 aa, Zea mays
  VARIANT 20..549: note = Derived polymorphism lacks residues 20 to 549
MDPNGGGDTILGDPLLPLSQSSKQQQDPLAGVSDYLGRSVHRGSSGGWRSALFVVGVEIAGSFAYFGISANLITYLTGPLRQSNASAAASVNAWSGTACIMPLLGAFLADAYLGRYRSVIIACTLYVLGYGMLTLSATVPALQPSHMPCREDGVSSSSCQPGWPQVAFFYVSLYLIAIAQGADKPCGLAFAADQFDAEHQGERASRGSLFNWWFFCMAIGISVSVSVVGYIQEYVGWGLGFGVPCAIVLCAFLVFLLGTPTYRLYAPTPEAKSPFRRLARGLAANANKTGGLSASHSEEEEAAADARCVLRLLPIWAASLAYGVVYAQIMTLFNKQGRTLDRHIGDGLELPPAALQTLGPASILLFVPVYDRAVVPALRWATGNPSGLSMLQRVGAGMAVSLAGVAVAALVEARRLAMAREHGLVDDPSATVPMSWAWIVPQYAMMGVADVLAVVGLQELFYDQMPDGLRSLGLALYLSVMGIGGFISSLLISLIDGVTGSGGGDSWFADNLNRAHVDYFYWLLAGLSAVELALFLYFARSYVYKHKPN

SEQ ID NO: 3968 - protein, 890 aa, Zea mays
  VARIANT 63: note = Ancestral polymorphism is I, Derived polymorphism is N
  VARIANT 201: note = Ancestral polymorphism is S, Derived polymorphism is I
MAASALWQPQEQGLREICAHLEAHISPNSDQARIWQQLQQYSQFPDFNNYLLFILARGEGKSIEVRQAAGLLLKNNLRTTYISMQSSSQHYVKSELLPCIGATNRAIRSTVGTVISVLFQIVRVAGWIELFQALHKCLESNDLDHMEGAMDAIYKICEDVPEELDVDVPGLSERPINVFMPRILQFFQSPHASLRKLSLGIINQYIVVMPSALYMSMDQYIQGLFNLAKDSSADVRKLVCSAWVQLIEVRPSILEPHLKNVTELILQANKDSDDEVALEACEFWSAYCDVSMPPEGLQEFLPHLIPTLLSNMVYADGDESLDDAEEDESFPDRDQDLKPRFHDSRLHGSETGDDDDDADAVNVWNLRKCSAAGLDVLSNVFGDSILPTLMPLIEQNLARTDDDSWKERETAVLCLGAIAEGCISGLYPHLPQIVAFLIPLLDDKFPLIRSITCWTLSRYSKFIVQSLDHPNGRGQFDKILMGVLRRILDTNKRVQEAACSAFAILEEEASEELVPHLEVILQHLMCAYRKYQRRNLRILYDALGTLADAVGAELNQAKYLDIFMPPLITKWQQLSNYDKDLFPLLECFTSIAQALGPGFAQFAEPVFQRCINLIHSQQLSKIDPTAAGAVYDREFIVCSLDLLSGLAEGLGAGIESLVAQSNLRDLLLQCCMDEAADVRQSALALLGDLSRVCPIHLHPRLQEFLTVAAKQLNPQSVKDAVSVANNACWAIGELAIKIGKEIAPVVITVVSCLVPILKSPEGSNKSLVENSAITLGRLSWVCPDIVAPHMEHFMQAWCKALCMIRDDFEKEDSFHGLCAMVAANPTGGAGSLAYICQACASWTEIKSEGLHNEVCQILNGYKQLLGNGGWEQCMATLQPDVVQKLARYGV

SEQ ID NO: 3969 - protein, 132 aa, Zea mays
  VARIANT 30: note = Ancestral polymorphism is E, Derived polymorphism is K
  VARIANT 33: note = Ancestral polymorphism is R, Derived polymorphism is K
  VARIANT 34..132: note = Derived polymorphism lacks residues 34 to 132
  VARIANT 63: note = Ancestral polymorphism is R, Derived polymorphism is H
  VARIANT 64: note = Ancestral polymorphism is R, Derived polymorphism is Q
  VARIANT 102: note = Ancestral polymorphism is A, Derived polymorphism is V
  VARIANT 106: note = Ancestral polymorphism is P, Derived polymorphism is R
  VARIANT 121..132: note = Derived polymorphism lacks residues 121 to 132
MLLLSSPFVSVSPPPPPLISHGARPALRIEAVRQLTRRVVTTKADKTIGVEVVHLAPHPKYKRRERIKKKYQAHDPDNQFKVGDVVELQPSCPISKTKHFLAIPLPPRDTRRKSQLLPPLQSDDSQESSLRE

SEQ ID NO: 3970 - protein, 1339 aa, Zea mays
  VARIANT 972..1339: note = Derived polymorphism lacks residues 972 to 1339
MAAGRGHAEDMLGFKEDDAMRFIFGEDIMGMEDHGAFDRSLMELQVFKEVFCGAAHNVAATTHLPTEMDLGFVHTSAAAAHLKATETSPSPFVSHAQQQQPAAAATADPQLTMDRSQPNYGPRHDLHPQVQEHAHTRAQQNGTELDDAAFMHRFMGSWQPGDKHAIHLLGLSDDQHPFVGADLDVHAQDIGAGMCNAPGLGCSSSTSAVDDPMPSFIEALAEISEFQSATLLPDPFLHQWFQEQQQFPTNACFSYDQGQMDDTTYPLCASTKDFPDREQHLCYSEEAHSTPTIPHQSHIWFSPGQFTQLDGTTICQEGTPDANISCPDEIDVHGCGSSAVHFGSAAAVSKKALGRDIPDQLEAHAHRLFKDAGWTIKPRKRNDRAKMASYFTAPNKEAVHTSLTQAWKFCGKKLYEASPDTERGRYPKEWSDVDSFWKDLTDAMTYVDRMLANQQNALTLLQRWQILDPFVAVVFISRKITALQQYKTLRAVDSSTFVLDGSSDTSSVSKIMHKASELLTSRMIRLTPLITDSDCSTLATESYNGHQSLQSCHDVEDNNYRDTDPKLSCNESLNYNASDETKHHIDASNDGRQTYAQPKTLNSSVKMSSKKPKRIFDISADGLDETNVATMDMADPGDTNAFEEHIMYSGVSTLKDDMKAETKSEKLDKDDQSSKCDMLLSSVVKQLKDYSTFSDTHCTTRESQSDATTFCHDDKVWKKIVPSHGEFYEDSQSEPTGNTAPVELSHDVLGTYLICDSQICERGTAKMKTKDWLKYMKKRPRELRINDEDLLMTAIVKNKDLGTCHKFASGSSAAKKFKKLKSHKKGNKLLSKIGKAGTNLLGGKRVSLARKTVICWLLATGFLSVKDVIQYRDPKSNKIIKDGMVTWEGIVCNCCKKNLSVSDFMAHAGRSHPQSSLGLFLESGKSYTLCLVEAWSAESMSRRSNAWGRKVEAIDESDDTCGFCGDGGELLCCDNCPSTYHQACLSAKELPEGSWYCHNCTCQVCGGPFSEKEVSTFSAIFKCFQCGDAYHDTCIEQEKLPLEDQISQTWFCGKYCKEIFIGLRSHVGTDNILDSDLSWSILRCNNDGQKLHSVQKIACLAECNMKLAVALTLLEECFIRMVDPRTGVDMIPHVLYNKGSNFARVDYQGFYTVILEKGDEILCVASIRVHGTKAAELPFIATSVDFRRQGMCRILMSIIEKMLCSFNVKMLVLSAIPELVSTWVSGFGFKPIEDAERKQLHNVNLMLFPGTSLLTKRLDGFIMATKPGEEKDIHEVSGVPNLKRMPNGKANEHFKLHDLDLSGTEFKAEVSVNGPFRTLKHECGSAAWFQSTKLAVGEV

SEQ ID NO: 3971 - protein, 330 aa, Zea mays
  VARIANT 147: note = Ancestral polymorphism is A, Derived polymorphism is D
MAAAAAPVSLVFLCTRGQQQLVLVDATKPPLPLRSRAFSVRAAQQQQQQQHRARPRPPRRNKPPGPARRPPRVPLDQDEYDGGYDDREEGRFAGGTRAAAMPKPPAGFVLDDQGRCIAAASKRIVTILNIFFLSVVTNEIKPNQHCDMQIDDTNNRPLECIIRRVFRSSQDHDCMLLCPVDMPVQVLKSTNFSGWVAVDDDQLKQIIPSVAYALARVHMHFVESGFCYTARGGFCFPEEAIQEFHDSGEGVPFEGVEICCFNLDGAHYMIYTPVDPLLFVAIKDKDGVLRIAEDDLMEDPAVLDAVDEETEFTALVEEEEALLETVLGER

SEQ ID NO: 3972 - protein, 1046 aa, Zea mays
  VARIANT 40: note = Ancestral polymorphism is R, Derived polymorphism is W
  VARIANT 27..1046: note = Derived polymorphism lacks residues 27 to 1046
MEWLEKDLREKFDLPPKNRSEEALRRWRDAVSVVKNPRRRFRMVADLATRRQNDLKRRSTQEKIRVALYVQQAALHFIDGGKHKDYRLTDDIMKAGFCISPDELASITSKHDAKALSMHGGVDGICAKVRSSPDRGVSAASDDDLDARRAVYGANRYAEKPGRSFWMFVWDALQDVTLVILMACALLSAAVGLASEGWPRGVYDGLGIMLSILLVVVVTAVSDYRQSLQFKELDNEKKKVSVHVTRDGCRQQVSIYDLVVGDVVHLSIGDQVPADGLYVHGYSLLIDESSLSGESEPVYISRAKPFILAGTKVQDGSGKMLVTAVGMHTEWGRLMSTLSEGGEDETPLQVKLNGVATVIGKIGLLFATLTFVVLMVRFLVDKTFTVGLSSRWTSADALAIVDYFATAVTIIVVAVPEGLPLAVTLSLAFAMKKLMNDKALVRHLSACETMGSAGTICTDKTGTLTTNHMVVDRIWVSEVSESVSSSGSGLEDLSSAAVSRPATLGLLLQGVFENTSAEVVREKDGGQAVLGTPTERAILEFGLKLEARRRDAGDRSCTKVKVEPFNSVKKMMAVLVSLPDGRYRWYVKGASEIIVQMCDAMVDGDGNGVPLSEARRKDVLGTINSFASDALRTLCLAYKEGDGFGEDADSPAGGFTLICIFGIKDPVRPGVKDAVKACMSAGIVVRMVTGDNINTAKAIAKECGILTDGGVAIEGPEFRNKSPEEMRDLIPKIQVMARSLPLDKHTLVKNLRGMFREVVAVTGDGTNDAPALHEADIGLAMGIAGTEVAKESADVIVLDDNFTTIINVARWGRAVYINIQKFVQFQLTVNIVALVINFVSACITGSAPLTAVQLLWVNMIMDTLGALALATEPPNDDMMKRPPVGRGESFITKVMWRNIVGQSLYQLAVLGALMFGGERLLNIHGADSKPVVNTLIFNSFVFCQVFNEINSREMQKINVFRGMFGNWIFVGIIAATVAFQVVIVEFLGTFASTVPLGWQLWLVSVGLGSVSLVVGAVLKCVPVEPDDGVRASPNGYAPLPGGPDNI

SEQ ID NO: 3973 - protein, 528 aa, Zea mays
  VARIANT 52: note = Ancestral polymorphism is P, Derived polymorphism is H
  VARIANT 94..528: note = Derived polymorphism lacks residues 94 to 528
  VARIANT 104: note = Ancestral polymorphism is G, Derived polymorphism is C
  VARIANT 170: note = Ancestral polymorphism is R, Derived polymorphism is Q
  VARIANT 187: note = Ancestral polymorphism is G, Derived polymorphism is S
  VARIANT 202: note = Ancestral polymorphism is R, Derived polymorphism is W
  VARIANT 203: note = Ancestral polymorphism is R, Derived polymorphism is Q
  VARIANT 225: note = Ancestral polymorphism is Q, Derived polymorphism is K
  VARIANT 227: note = Ancestral polymorphism is T, Derived polymorphism is M
  VARIANT 238: note = Ancestral polymorphism is E, Derived polymorphism is K
  VARIANT 256: note = Ancestral polymorphism is T, Derived polymorphism is I
  VARIANT 283: note = Ancestral polymorphism is S, Derived polymorphism is L
  VARIANT 288: note = Ancestral polymorphism is V, Derived polymorphism is D
  VARIANT 293..528: note = Derived polymorphism lacks residues 293 to 528
  VARIANT 294..528: note = Derived polymorphism lacks residues 294 to 528
  VARIANT 314: note = Ancestral polymorphism is D, Derived polymorphism is Y
  VARIANT 325: note = Ancestral polymorphism is L, Derived polymorphism is P
  VARIANT 327: note = Ancestral polymorphism is S, Derived polymorphism is F
  VARIANT 330: note = Ancestral polymorphism is G, Derived polymorphism is R
  VARIANT 333: note = Ancestral polymorphism is Y, Derived polymorphism is C
  VARIANT 338: note = Ancestral polymorphism is T, Derived polymorphism is M
  VARIANT 367: note = Ancestral polymorphism is A, Derived polymorphism is V
  VARIANT 417: note = Ancestral polymorphism is A, Derived polymorphism is V
MYSDHKPRNREADLVELTIGFTDQSSSSPNSHCIESGSMLPLSLFVSLLVLHLPHASADGDICIIGGGISGASTAFFLTSYTSTLGGAQLRVFERRQKVGGRLGTVTLAGDSFEAGGSIIHPRNLHARRFADLLGLAVKTGGDDWLGIWDGKSFVFQTARPPPVGSSWWRRKLHSLVNSLLLLRRYGLSLLKMDKFVQEMLRRFMLFYNGMESRPVFATVEEMLQWTGLYGLTRRTLEEELLDAGLNTRTIAELVTVITRINYGQSTHISGLAGAVSLAGSESGLWAVKGGNWQLAAGLLKTSNATLHLQEGIDSITDAGDHYVLRSNSGSEYECMVTVVATPLDELNITFSPPISIPPRKMQHTHATFVRGILNPGYFGLNSASDIPELIGTLELPDIPFSCISVLKRYSEGDMAAYKMFSRAKLDDGLLDQIFRARIETIRINWAAYPHYQAPEEFAPIVLDGKQLYYVNTFESAASAIETGAVAAENVARLIISRLSLLPQAQQQQPHIIKSFAEQESQRRHVDL

SEQ ID NO: 3974 - protein, 202 aa, Zea mays
  VARIANT 8: note = Ancestral polymorphism is R, Derived polymorphism is W
  VARIANT 171: note = Ancestral polymorphism is R, Derived polymorphism is S
MAVGGLLRGLVSPPAWLPCHELFASWHHWLPSLPRLRPPASDGFKLLLVLLLFSAALAEVRYIASSSMAPTLRPGDRAVAEKVTYLFRRPSIGDIVFFKVPTAVQNYGVNKDVVFIKRVLATPGDFIEVRQGQLIVNGVALKEHYAAATSLYTMEAMRLPEGHVFVMGDNRNNSCDSRAWGPLPVANIVGRYMTSFTRSSFQ

SEQ ID NO: 3975 - protein, 174 aa, Zea mays
  VARIANT 86: note = Ancestral polymorphism is S, Derived polymorphism is Y
  VARIANT 18: note = Ancestral polymorphism is A, Derived polymorphism is P
  VARIANT 17: note = Ancestral polymorphism is T, Derived polymorphism is M
MASDSGDFGGENKSLETARRLLEETFTSEAEAEALPSLPSGFYDAFVLRGIRVVQALQPGTLLCHFNVPSRLLNSGGFLHGGATASLVDLVASAAFATAGLRTRGSPLEMNISYLDAAFADVSKQIIQLEEIDIEAKVLRAGKAVGVAVVELKKKSGKIIAQARYSKYLGVSKL

SEQ ID NO: 3976 - protein, 272 aa, Zea mays
  VARIANT 33: note = Ancestral polymorphism is H, Derived polymorphism is Q
  VARIANT 229..272: note = Derived polymorphism lacks residues 229 to 272
MASMAAVFGEAKPDKSNKDADALLRRPVLFHAHSQGGLRVVATDLHSFAWHRSLDLDGLRDLQDDVGIAGSCSDFLDYLYSSLSSDQVRLFFPAAALGPDTAELVATKAKGLPRITLSLDRVAASALKDVIADFSLALYESYKTRQEHASREQERVSQLMENLDSEREKNEVMQKQLEALSFLDKRKATKPKLVTDKFPSVSGAPPSSDQMIVAVQQQTPAYGFANLQWLYLAKFLLLKVRSAWPLCLGGQEYEELCCKILKKMLMIILRYC

SEQ ID NO: 3977 - protein, 208 aa, Zea mays
  VARIANT 70: note = Ancestral polymorphism is E, Derived polymorphism is G
  VARIANT 75: note = Ancestral polymorphism is S, Derived polymorphism is L
  VARIANT 92: note = Ancestral polymorphism is A, Derived polymorphism is V
  VARIANT 93: note = Ancestral polymorphism is A, Derived polymorphism is V
MFLRRLRTSAAVRRGATDGAVLAAVRAELALELSSSAPPPFRSELAPDFDTVSDAPRAQDVLLRRRDGSEEVLVSALLAPLRFVGRDPLPRAALVKVFVSKPGAAPVLHFDCRASWVGEEERGGGAADYAINAVRYHSSPGAGGADEYEGPAFRDLDPRLQAALREYLVARGFNSKLASSILQHLLQKERNQYVNWLKTLEEAFAKHH

SEQ ID NO: 3978 - protein, 215 aa, Zea mays
  VARIANT 202: note = Ancestral polymorphism is S, Derived polymorphism is Y
  VARIANT 137: note = Ancestral polymorphism is G, Derived polymorphism is R
  VARIANT 116..215: note = Derived polymorphism lacks residues 116 to 215
  VARIANT 113..215: note = Derived polymorphism lacks residues 113 to 215
  VARIANT 74: note = Ancestral polymorphism is H, Derived polymorphism is L
  VARIANT 66: note = Ancestral polymorphism is P, Derived polymorphism is L
  VARIANT 57: note = Ancestral polymorphism is A, Derived polymorphism is V
  VARIANT 55: note = Ancestral polymorphism is I, Derived polymorphism is T
  VARIANT 34..215: note = Derived polymorphism lacks residues 34 to 215
  VARIANT 32: note = Ancestral polymorphism is D, Derived polymorphism is N
  VARIANT 29: note = Ancestral polymorphism is A, Derived polymorphism is V
  VARIANT 21: note = Ancestral polymorphism is D, Derived polymorphism is V
  VARIANT 10: note = Ancestral polymorphism is G, Derived polymorphism is E
MVKGENLMNEECTKSKLWLNDLAGSEWAAKTDAQGERLKQAQNINKSLSTLGDVIFAVATKTSHIPFRNSKLTHLLKDSLSGDSKTLMFVQISPNENDVGETLCSLNFASRVRSIELGHAKKQVDVDELSRYKLMVGRAKQDSKNKNAHNKSMEERIQVLEVKNKAKDMLTLNLQEEANPDQYLFMEPNPIYTQSGFNIRLSIIIYAIRNYQQLA

SEQ ID NO: 3979 - protein, 112 aa, Zea mays
  VARIANT 37..112: note = Derived polymorphism lacks residues 37 to 112
  VARIANT 48: note = Ancestral polymorphism is Q, Derived polymorphism is K
  VARIANT 65: note = Ancestral polymorphism is A, Derived polymorphism is V
MASFGEAPGGDAGSGEKIFRTKCAQCHTVERGGAHRQGPNLHGLFGRQSGTTLGYAYSTANKNMAVVWEEGTLYDYLFNPKKYIPGTKMVFPGLKKPKERTDLIAYLKESTA

SEQ ID NO: 3980 - protein, 492 aa, Zea mays
  VARIANT 135: note = Ancestral polymorphism is Y, Derived polymorphism is C
MPRWTENSASTKSAELVKQQDRLEFDDPDEVDEEEEVEYEEVEEEVEYEETEDEYGQTEAVRQVDAKHDSKMVDADTDEGGKGSHDELLALPPHGSEVYVGGIASDVSSDDLKKLCESVGEVVEVRMPGKSGRLYAFVNFRTKELASKAIQKLNNKDLKGKKIRVSSSQAKNRLFIGNIPYNWTENEFKKAAEEVGPGVLKVNLVKAPHSDTNKGYGFIEYYNQACAEYAKKMMSTPEFKLDKNAPNVSWADTKNGGESASTAQVKSLYVKNLPKAVTQEQLKKLFEHLGEVTKVVIPPAKAGHENRYGFVHFKERSMAMKALEDTERFELDGQLLDCSLAKPLADKKDDTSAPKGGPLLPSYTPVGYGLMGAYNPLGNGLAVAGAYNPYGNGLAGAYGVLGAHAAQPMLYVPGAPPGSTMIPMVLPDGRLVYVPQPAGQQPVPMTSPPPPQQGDRHYGGSGGSSSGGRRQQRRDDSGGSNTNSRRGRRRPY

SEQ ID NO: 3981 - protein, 214 aa, Zea mays
  VARIANT 12: note = Ancestral polymorphism is K, Derived polymorphism is N
MRMRAPSSTGLKAIVASAWLAVLLGSASLAACDQDAGFSPPPTAVPAVPPRPALRAAAAAVPVPVPAPLPRKILRSPGVVAGGSGEGAAAAGPVRPSRMDEGCAGAEDIAIYQRHASSLPNGVPAYKVDVMNQCLGDPGGGDCAIAGIHVRCGWFSSVNLVDPLKFRRLRHDDCLLNDGRPLLGGDTISFEYANSFPYELSVRVATCVDPTTAP

SEQ ID NO: 3982 - protein, 234 aa, Zea mays
  VARIANT 64: note = Ancestral polymorphism is T, Derived polymorphism is M
  VARIANT 29: note = Ancestral polymorphism is T, Derived polymorphism is I
MPILKTQPNQLERATQGATPAPACTMGPTTARLLPLLPFVAVFLLASPVDADSALDAATRCAATIVSISPCLPHVAAVAPPLASCPPAPTDACCVAFLRAVSPLAAGGGEEGCLCHLLRNPLLLGFPIDAARLAALLPACAAGNAFAAANVEAATLFADACRDLKVLPGLHFMPQSTTGPEISPAAVPELMSKPKEAVPLPPAGSMVRSGTEVTSSRGIPTAALILAAAGAVIT

SEQ ID NO: 3983 - protein, 746 aa, Zea mays
  VARIANT 288..746: note = Derived polymorphism lacks residues 288 to 746
MELDATLLSISLVLIGLLLHTTQATTQENCERSGLCTYIVRVSPHLNISMDMSRMDLESWYRSFLPPRMDRSPRSTSPFIHTYKEAILGFAVDLTKDDAEYVKSKDGVLMVYKDILLPLLTTHTPDFLSLRPNGGAWSSLGMGEGSIIGLLDTGIDSAHSSFDDEGMSAPPSRWRGSCKFATSGGHCNKKLIGARSFIGGPNNPEGPLDDVGHGTHTASTAAGRFVQGASVLGSGNGTAAGMAPRAHLAMYKVCDEQGCYGSDILAGLDAAIVDGVDILSMSLGGPQQPFDEDIIAIGTFSAVKKGIFVSCSAGNSGPFPGTLSNEEPWVLTVGASTMDRQMEAIVKLGDGRSFVGESAYQPPSLGPLPLMLQLSAGNITGNVVACELDGSQVAIGQSVKDGGGAGMILLGGDSTGHTTIAAAHVLPASYLNSQDAAAVRQYINTSSKPTASIVFNGTALGTAPAPVVAYFSSRGPSTASPGILKPDVIGPGVNVVAAWPFKVGPTTNTAGRDRDDDDQHGAAAATFNSVSGTSMSAPHLSGIAAVIKSAHPDWSPAVIKSAIMTTAYVVYGNNKNQPILDEQLSPASHFSVGAGHVNPSQAVSPGLVYDTDVEQYVLYLCGLGYTDSQVETITHQKDACGKGRRKIAEAELNYPSVATRASVGELVVNRTVTNVGDAVSSYAVEIDLPKEVEATVSPAKLEFTELKEKKTFTVRLSWDASKTKHAQGCFRWVSSKHVVRSPIVIF

SEQ ID NO: 3984 - protein, 86 aa, Zea mays
  VARIANT 38: note = Ancestral polymorphism is C, Derived polymorphism is Y
MVRFSSDDAKEVVHYQTISSKSLAKSVLEEGGWSNFMCSREDTQNNVDVAIVFIGSKLQSSDISKDKQVDPALADTLKVIIGTHLS

SEQ ID NO: 3985 - protein, 284 aa, Zea mays
  VARIANT 26: note = Ancestral polymorphism is E, Derived polymorphism is D
MSSSVGGGSAGGGGVDMVSLLEKAKDLDQLKKEQDEIVADINKIHKKLLASPEMVDKPVDTILLKLRGLYARAKELSENEISASNALIGLLDGLLQSGASTAQKKKIVAFYISEVGEQKKKRIKSDTDSARFSAASMRNQLDQAASLKGEQVAARVKSDDEKDEWFVVKVIHFDKETKEYEVLDEEPGDDEESTQKKYKLPMSYIIPFPKKGDPSSAPDFGQGRQVLAVYPGTTALYRATVASHRKRKSDDYILEFDDDEEDGALPQRAVPFYRVVALPEGHRQ

SEQ ID NO: 3986 - protein, 131 aa, Zea mays
  VARIANT 124: note = Ancestral polymorphism is S, Derived polymorphism is L
  VARIANT 114: note = Ancestral polymorphism is S, Derived polymorphism is L
  VARIANT 107..131: note = Derived polymorphism lacks residues 107 to 131
  VARIANT 72: note = Ancestral polymorphism is S, Derived polymorphism is F
  VARIANT 58: note = Ancestral polymorphism is P, Derived polymorphism is L
  VARIANT 55: note = Ancestral polymorphism is M, Derived polymorphism is V
  VARIANT 54: note = Ancestral polymorphism is V, Derived polymorphism is F
  VARIANT 53: note = Ancestral polymorphism is E, Derived polymorphism is K
  VARIANT 45: note = Ancestral polymorphism is G, Derived polymorphism is R
  VARIANT 36: note = Ancestral polymorphism is A, Derived polymorphism is V
  VARIANT 28: note = Ancestral polymorphism is G, Derived polymorphism is S
MSEDDLPYHVHVMDDGDLETVGRYDFDGQLGCPMIAHPKLDPATGELHALSYEVVRRPYLKYFYFRPDGTKSDEVEIPLAQPTMIHDFSITENLVVVPDHRVVFKLQEMLRGGSPVVLDREKTSRIACGAG

SEQ ID NO: 3987 - protein, 1364 aa, Zea mays
  VARIANT 380..1364: note = Derived polymorphism lacks residues 380 to 1364
  VARIANT 372..1364: note = Derived polymorphism lacks residues 372 to 1364
MAHVSFKSKDVDSGMSRWSEYLSVEEPIPSAMATWRNMSADAPQGSSAGSHKHLQMEPVVQLSKVAEGLLAKMYRLNSILDYPDPNTHTFSDAFWKAGVFPNFPKICITMSKKFPEHPNKLQLERVDKFGLDALNENAEGYMHNLEQWILLLLDLLAFREQALRLILDLSSTVITLLPHQNSLILHAFMDLFCSFVRVNLFSDKMPRKMILQVYNILHIMLKGGRDCEFYHRLVQFVDSYDPPIKGLHEDLNFVSPRIGEVLEAVGPIIFLSTDTKKLRNEGFLSPFHPRYPDILTNSAHPMRAQDLANVTSYREWVLLGYLVCPDELLRVTSIDVAMVVLKENLILPLFRDEYILLHENYQLYVLPKVLESKRMAKSGRTKQKEADLEYNVAKQVERMLTEVHEQALVSCDAMHRERRILLKQEIGRMVLFFTDQPSLLAPNIQMVFSALALSQCEVIWYFQHVGIASSKSTRLKTVDIDATDPTIGFLLDGIGKLCCLVRKYIAAIKGYALSYLLSSAGRIRFLLGTPGMVALDLDATLKGLFQQVLHCLENIPKPQGESVPDITADLADLRKHWLSILMIVTSSRSSINIKHLEKATVSTGKEGLVSEGNAAYNWSRCVDELESQLSKHGSLKKLYFYHQHLTTVFRNTMFGPEGRPQHCCAWLGAACSFPECASAIIPEEVNKIGRDSISYVESLIESIMGGLEGLINILDSEGGFGSLEMQLSPEQAALRLNNTRAKGVSSLLTPGYESYPDNSSSIKMSVKLEAAMQRLTSLCSVLNDMEPIGVLNHVFVLREYMRDCIIGNFRRRFHSMIRTENCIQRPSIIESLLRRHLGIIHLAEQHISMDLTEGIREVLLAESYTGPFPNLQMFETPVGTQGGGSAVEMICNWYIENVVKDASRIGVAFDAIQNCFRSSQPIGGGCLAESFTDKREMKSLVRLFGGYGIDKMDKMLREHTSALLNCIDSALRSNRDALEGLAGTVNSGDRIERDVNLKQIIDLETLADLCIQAGQAITFRRLLVEAVGAVLEEKVPLIYSLLKGLALQLPDEVPDKNEIIRLRKVASSVGVGDKHDAEWVHSILADAGAANDNSWILLPYLCAAFMVSNIWNGAVYDVNIGGLSNNLHCLARCVSAVIGGSEYTRVEREQRINSLSNVHTDELQEAELPSRVSAEANIKSCMQIYVKLSAGIVLDSWNDTSRQHIVPKLTFLDQLCELSPYVPRSTLEAHIPYTILRSIYHQLYGGSLLASEPAEQSPRQSPLISLAHASPSARQMQNRPETTPRSHTFDPGYYSSSGSQHDDGYDADRRTGRLLRSLRRSGPLDFGASRKAKKFVEGSSSGSSHGAGSLQRFAVSRSGPLSYR

SEQ ID NO: 3988 - protein, 488 aa, Zea mays
  VARIANT 206: note = Ancestral polymorphism is G, Derived polymorphism is V
MASLWLARASSQLARRAAARRPPPRPARHGSGQPTSSWFLGSVPQAALGSPALDTSRRGFCSVRRFAGESSAAAAAAAVVDEEPESGFAAGDQQAVDFPGGKVSFVAEMNFLPESTRERINCYRVLDDDGRTISGSRFQEVSRELALKMYSEMVTLQIMDTIFYEAQRQGRISFYLTSNGEEAINIASAAALSMDDIVLPQYREPGVLLWRGFTLQEFANQCFGNKLDYGKGRQMPIHYGSNRLNYFTVSSPIATQLPHAVGAAYSLKMDKKDACAITYFGDGGTSEGDFHAALNFAAVMEAPVIFFCRNNGWAISTPTTEQFRSDGVVIRGQAYGIRGIRVDGNDALAVYSAIHAAREMAVTEGRPILVEALTYRVGHHSTSDDSTKYRPVDEIEHWRTARDPISRYRKWVQGNDWWSDAEESELRSRVRKELLQAIQVAERMPKPPVTELFTDVYDKIPSNLHEQEQLLRDTIMRHPADYPTDVPV

SEQ ID NO: 3989 - protein, 354 aa, Zea mays
  VARIANT 9: note = Ancestral polymorphism is G, Derived polymorphism is R
MSQATEVVGNPYAAELAAAKKAVALAARLCQRVQRSILHSDIQSKADKTPVTVADYGSQVLVCLVLKKELPSHSFSIIAEEDSKDLREDGAQEIIEHITTLINETIVNDGSYNMSLSKEDVLSAIDGGKSEGGPSGRHWILDPIDGTKGFIRGDQYAVALGLLDEGKVVLGVLGCPNLPLKSTNKNNSSSFGDRIGSLFFATIGCGAQVEALEGSEPQKISVCSTNNPVDASFFESFEASHSKRDLTSSIAEKLGVRAPPVRMDSQAKYGALARGDGAIFLRIPHKSYIETVWDHAAGSIIVTEAGGMVKDAAGNDLDFCKGRYLDRDRGIIATNKHLMPLVLKAVQEAMKEEQ

SEQ ID NO: 3990 - protein, 235 aa, Zea mays
  VARIANT 14: note = Ancestral polymorphism is K, Derived polymorphism is N
  VARIANT 19..235: note = Derived polymorphism lacks residues 19 to 235
  VARIANT 97: note = Ancestral polymorphism is A, Derived polymorphism is V
MTAINIQNPRLLIKEMEVGGEVLDTPRGAYGTSPWPICCDRMKDGGVLVGGLKEYLKTIRRCRKGWVLFYWLWNKLQCCLSCKTLFVEELTAPDNLAGIYKSNSSNGDDGVGYRIRPIIYLLELEGKLSSVDLTTFQLAGAGFPPLALQQAAVGDPAAPLAQGDAADSDVLEGGRHRAAVCPSGSCRVIEVPEVACCLQPVINIIPLQLLAYNLTVLQGFDVDQPRNLEKSVTTQ

SEQ ID NO: 3991 - protein, 445 aa, Zea mays
  VARIANT 121: note = Ancestral polymorphism is G, Derived polymorphism is R
  VARIANT 124: note = Ancestral polymorphism is Q, Derived polymorphism is L
  VARIANT 127: note = Ancestral polymorphism is V, Derived polymorphism is I
  VARIANT 137..445: note = Derived polymorphism lacks residues 137 to 445
  VARIANT 150: note = Ancestral polymorphism is K, Derived polymorphism is N
  VARIANT 171..445: note = Derived polymorphism lacks residues 171 to 445
  VARIANT 173..445: note = Derived polymorphism lacks residues 173 to 445
  VARIANT 174: note = Ancestral polymorphism is S, Derived polymorphism is L
  VARIANT 203..445: note = Derived polymorphism lacks residues 203 to 445
  VARIANT 204: note = Ancestral polymorphism is W, Derived polymorphism is C
  VARIANT 207: note = Ancestral polymorphism is V, Derived polymorphism is E
  VARIANT 208: note = Ancestral polymorphism is D, Derived polymorphism is V
  VARIANT 243..445: note = Derived polymorphism lacks residues 243 to 445
  VARIANT 284..445: note = Derived polymorphism lacks residues 284 to 445
MPSFPPPGAVTICEINRDLVAVDALSDDRAKDAYGDVLGMVFAPIPFQPEALLLASREPAAPAADQVEPADTVPTAGLAATISDFFRRMVFPPLDPNLLEEFDTQKVSWNPYKHCLAFVSGKNQVTVQDFEDSDAKEPCILTNDHQTDVKAVEWRPNSGKMIAVACKGGICLWSASYPGNVPFMKSGVTSSSFSAFPRGSGGQWILVDVLRGSSAELVSALCWKPDGRYLASASCNSSSFTIWDVSQGLGTPIRRGLSNISLVRWSPSGDYLLVAKFDGTFHFWETNTWTSEPWSSSNGYVSGANWDPEGRVALLSFSNSTTLGSIHFSSKPPSLDAHLLPVELPEISSLIVSRGIEKLAWDASGERLALSFRDGNEMYRGLIAIYDVRRSPLVSLSLVGFIRGPGEGAKPLAFAFHSKFKQGPLLSVCWSSGWCCTYPLILRPR

SEQ ID NO: 3992 - protein, 1039 aa, Zea mays
  VARIANT 433..1039: note = Derived polymorphism lacks residues 433 to 1039
  VARIANT 392..1039: note = Derived polymorphism lacks residues 392 to 1039
  VARIANT 103: note = Ancestral polymorphism is I, Derived polymorphism is T
MELALGAMTSLALKLGDLLMEEYVVQKGLKPDIESLSRELVMMNAALIDASRVPPDQLTEVEKLWARKVRDLSYDMEDAVDDFILRVAGGDDSAADSKFFKKTLAMVKDVMSMKKFKDRRQISDKVKDIKKLSNELAELRAKYTVRGVGADLAASTGIDPRVINLYKKETDLVGIKKSRNKVIRMLSMETKDDDALESHQALKIVSIVGVGGLGKTTLAKTVHDMLKKQFDCSAFISIGRTPNLNRTFEKMLLKLDREYKQVDMARWDLEQFKNELDEFLKDKRYLIVVDDIWDVDSWEAIRYALKDNNCGSRIIMTTRNFGIVTKLEEVYRLKPLSNANSKKLFYKRIESQEGESLDGELSSKIIHKCGGIPLAIIAIASLLVERSREEWSEVYDKIGLGNEDNTTKIMSYSYYDLPPYLKPCLLQLSIYPEDCIIDTNSTIWKWIGEGLVHLEKEEGSLFKVGERYFKELVNRSMIQPTEDKNDRFVEGFRIHDIVFDLICKLSKDEDFITISGQHSSRDSLRREKKTCVPRSDCKLRRLAVRNQRVQRFPEETIDMPEVLRSLSIIDCNIEVMAPIDSFRVCRVLHLGKSYVPISLKHLGKLLHLKFLEIVYTPIDELPKEIGHLRSLQTLILDRTGLDELPPVVCSLTRLMCLIAQGFERLPADRMGNLTSLEELRLRRVVGRSATQALVAELGKLTRLRVVDITFSEQLEESLQEALVQSLSNLRGLQELTLLFKMTRWGSDMWGDWEPPRQLRRLIIEGIIVFSRQPRWINRSCLPRLCYLSLMVHTLEAQDLDNLARLPELQYLTLDGLSWPPRYTVGPDDFRNLRFCKVGTTFEFRKGAMPRLEVLQFRVFAGYYCWAYNGVPFEQFPTKDLDLDLDNVLLLQQVIVKVNCVGATVTQVEEVEAVVMRAVENHANRPTIKMNRAYEIAILSDEGREALLRRHIEKDCCVRTMKDKSDAFFISQLRRYRHLQKAIIFIDCSGASMCEVQKVEAAFRHAAEVHPNHPSIELIRTNTDGMASSSSDHPNTEPRN

SEQ ID NO: 3993 - protein, 126 aa, Zea mays
  VARIANT 40: note = Ancestral polymorphism is F, Derived polymorphism is I
  VARIANT 25: note = Ancestral polymorphism is S, Derived polymorphism is P
  VARIANT 9: note = Ancestral polymorphism is P, Derived polymorphism is L
MAPADMAEPAMTTVSRVEDAGRMSSIEWEPKTLTLAQIKFAREAALYVVSTKTEQEAIRIFTEGLKPVRIMAVSKSTSSIDSSSSDDDVELGACCCSSTKGCRGGGSKGGRRRRSMDDRDVATTPF

SEQ ID NO: 3994 - protein, 173 aa, Zea mays
  VARIANT 4: note = Ancestral polymorphism is I, Derived polymorphism is R
  VARIANT 6: note = Ancestral polymorphism is V, Derived polymorphism is M
  VARIANT 10..173: note = Derived polymorphism lacks residues 10 to 173
  VARIANT 13..173: note = Derived polymorphism lacks residues 13 to 173
  VARIANT 19: note = Ancestral polymorphism is P, Derived polymorphism is S
  VARIANT 20: note = Ancestral polymorphism is I, Derived polymorphism is V
  VARIANT 22: note = Ancestral polymorphism is R, Derived polymorphism is K
  VARIANT 29: note = Ancestral polymorphism is G, Derived polymorphism is D
  VARIANT 31..173: note = Derived polymorphism lacks residues 31 to 173
  VARIANT 34: note = Ancestral polymorphism is V, Derived polymorphism is L
  VARIANT 35: note = Ancestral polymorphism is D, Derived polymorphism is N
  VARIANT 39: note = Ancestral polymorphism is T, Derived polymorphism is M
  VARIANT 46: note = Ancestral polymorphism is R, Derived polymorphism is W
  VARIANT 58: note = Ancestral polymorphism is P, Derived polymorphism is S
MTKIWVQFTGLPKELRECSVIKVVGSMLGISNEVDMVFTRKFDRARMQVAVLDPNLIPQFIHVVIGDYLYELKFKVEVAGDGEQPTPMDMDHFGANDDDEFHEQNKDDNLGDKGNSRSKLLETSKGSARVVNKVSASKHCSNNSNGKSLRVGYQLLYMALRSRIWNSNRSLGP

SEQ ID NO: 3995 - protein, 281 aa, Zea mays
  VARIANT 247: note = Ancestral polymorphism is E, Derived polymorphism is K
  VARIANT 230: note = Ancestral polymorphism is H, Derived polymorphism is Y
  VARIANT 221: note = Ancestral polymorphism is T, Derived polymorphism is I
  VARIANT 160: note = Ancestral polymorphism is G, Derived polymorphism is S
  VARIANT 156: note = Ancestral polymorphism is R, Derived polymorphism is I
  VARIANT 146: note = Ancestral polymorphism is T, Derived polymorphism is I
  VARIANT 136..281: note = Derived polymorphism lacks residues 136 to 281
  VARIANT 38: note = Ancestral polymorphism is D, Derived polymorphism is Y
  VARIANT 37..281: note = Derived polymorphism lacks residues 37 to 281
  VARIANT 19: note = Ancestral polymorphism is D, Derived polymorphism is N
  VARIANT 14: note = Ancestral polymorphism is D, Derived polymorphism is G
MAIMMRRCELPARDLCHLDLLFVMGLRPISDRLGMVRDFQNRNDIFVFLLNTKAGGLQGEPTSPYPEPHEPERCNIHSFCKTLTTSDTSTHGGFSVLRRLVEEGLPQLDMTHNPPWQELVAKDLHGNEWYFCHIFRGQPRRHLLMTDWSVFVSSKRLVSGDTFIFLSVTALHVKVVLYIYICFLALLNFWINLLTVLHLIEVRTKSCGSGSTLAAKMYVHTVGTPAYIAHDVLLKKEYNGKRITIPEIRNHPWFLKNLLADLMDDSMMSKQYEEPEQPMQT

SEQ ID NO: 3996 - protein, 412 aa, Zea mays
  VARIANT 30..412: note = Derived polymorphism lacks residues 30 to 412
  VARIANT 270..412: note = Derived polymorphism lacks residues 270 to 412
  VARIANT 272..412: note = Derived polymorphism lacks residues 272 to 412
MHGSRGGLDTDLVACVVVALLQVGHVDAPWKAADTGPRGNERTEARQIFKDSCSVQIYSIQACIPKDTAILWNHEFVHAEEIFNQPFDYENCLRDNRYCSLSPFGFLPSLRHAHEGIYSQFCHFTIMHKFCGVLNSFVKRTSNGKHVSSLPPKPLNSAAVVARSKPSVTPKEQFVTARRQDLPVSSKQGAGTKSEKDNSTILDKVGNGPVVKEQSVDTYASKSKAQNGKAMPSNGGSLANMWGRASAKPMPPSTTNSTAVASVAATADAQICAKEEADGNSSDDEHGIKYKRGSTNANNRKRRVNFGCYNELPKQHTPDLVVGIADDAEVNQKSLENEYDLPNNGKGSTTLVDSDFTSECKIKTIDPMNDFGITLKEKSSDPPINDKKQRGHEANLRHSVVMHCIIYHTRKK

SEQ ID NO: 3997 - protein, 174 aa, Zea mays
  VARIANT 59: note = Ancestral polymorphism is Q, Derived polymorphism is L
MALETCFRAWALHAAPAGSKDRLLVCSSGGNLVLPSKRVAAAPLSVGRVATRRARHVCQSKNAVDEVLVADEKNWDGMVMACETPVLVEFWAPWCGPCRMIAPVIDELAKDYAGKIMCCKVNTDDSPNVASTYGIRSIPTVLIFKGGEKKESVIGAVPKSTLTTLIDKYIGSSS

SEQ ID NO: 3998 - protein, 228 aa, Zea mays
  VARIANT 200..228: note = Derived polymorphism lacks residues 200 to 228
  VARIANT 142..228: note = Derived polymorphism lacks residues 142 to 228
  VARIANT 84..228: note = Derived polymorphism lacks residues 84 to 228
  VARIANT 29: note = Ancestral polymorphism is S, Derived polymorphism is L
MAKNKPSNLSSDRKDHHLSLCSLQKQGWSQVYEYRTRSGSHHHNFLVNKIFLENAFDAVMHFVTVAYVGVMQRKCSYKLPQIHQRGFLWRQQSQISWAFRLEKEKNVRAWLCQSEADYQDKLLACGAIIVAQLRVRVLEETQFTCSAGIAHNKMLAKLVSGMHKPAQQTVVPSSSVQDLLASLPVKKMKQLGGKLGSSLQDDLGVETIGDLLSFTEEKLQEQYGVNTG

SEQ ID NO: 3999 - protein, 145 aa, Zea mays
  VARIANT 35: note = Ancestral polymorphism is E, Derived polymorphism is Q
  VARIANT 36: note = Ancestral polymorphism is G, Derived polymorphism is S
  VARIANT 56..145: note = Derived polymorphism lacks residues 56 to 145
  VARIANT 116..145: note = Derived polymorphism lacks residues 116 to 145
  VARIANT 117..145: note = Derived polymorphism lacks residues 117 to 145
MNSSFIGLKPAAAAAQANTAAASSPMKQQVQVAPEGRRAALLGLAAVLAVTATTAGSAKAGVFDEYLEKSKANKELNDKKRMATSAANFARAYTVEFGSCQFPYNFTGCQDLAKQKKVPFLSDDLEIECEGKEKFKCGSNVFWKW

SEQ ID NO: 4000 - protein, 144 aa, Zea mays
  VARIANT 1: note = Ancestral polymorphism is M, Derived polymorphism is I
  VARIANT 2: note = Ancestral polymorphism is T, Derived polymorphism is R
  VARIANT 12: note = Ancestral polymorphism is P, Derived polymorphism is T
  VARIANT 25: note = Ancestral polymorphism is P, Derived polymorphism is L
  VARIANT 28: note = Ancestral polymorphism is S, Derived polymorphism is F
  VARIANT 35: note = Ancestral polymorphism is G, Derived polymorphism is S
  VARIANT 45: note = Ancestral polymorphism is G, Derived polymorphism is W
  VARIANT 47: note = Ancestral polymorphism is R, Derived polymorphism is H
  VARIANT 52: note = Ancestral polymorphism is F, Derived polymorphism is L
MTLGSIHFSSKPPSLDAHLLPVELPEISSLIVSRGIEKLAWDASGERLALSFRDGNEMYRGLIAIYDVRRSPLVSLSLVGFIRGPGEGAKPLAFAFHSKFKQGPLLSVWHPFCSHVVLILTAYAVLEQWLVLYVSADTSSSLNP

SEQ ID NO: 4001 - protein, 399 aa, Zea mays
  VARIANT 35: note = Ancestral polymorphism is R, Derived polymorphism is L
MTEKVLVLIVGAGPSGLAVAACLGEHGIPYHIVEREDCSASLWRKRTYDRLKLHLAKEFCELPRMSHPSDAPKYITREQFVRYVDDYVERFNILPRYSTSVESCEYDEASGRWDVRARDLADGGGRVAEYTTRFLVVATGENCEGVIPDIPGLRDFPAGEVVHSSSYKSWKNYAGKRVLVVGCGNSGMEIAYDLAYNGVETSLVIRSPVHVMTKGLIYLGMRLLKWHLPVKLVDFIILTLANIQFGDLSRYGIVRPDMGPLLLKAKTGRSAVLDVGTTQLIKTGDIKVVGAISRIRGNTVEFEDGKERDFDSLVFATGYRSTANTWLKDGGSLLDDNGMPKKKAAGPQQGSRPWKGGNGLYCVGLGMAGLAGISRDAVSVAADIKAAVDSMVGPPAFWF

SEQ ID NO: 4002 - protein, 126 aa, Zea mays
  VARIANT 2: note = Ancestral polymorphism is A, Derived polymorphism is S
  VARIANT 21: note = Ancestral polymorphism is S, Derived polymorphism is L
  VARIANT 25: note = Ancestral polymorphism is T, Derived polymorphism is M
  VARIANT 32: note = Ancestral polymorphism is A, Derived polymorphism is T
  VARIANT 58: note = Ancestral polymorphism is A, Derived polymorphism is V
  VARIANT 83: note = Ancestral polymorphism is A, Derived polymorphism is V
  VARIANT 85: note = Ancestral polymorphism is A, Derived polymorphism is E
  VARIANT 117: note = Ancestral polymorphism is D, Derived polymorphism is V
  VARIANT 118: note = Ancestral polymorphism is A, Derived polymorphism is T
MAEEHLLALALPPTKGNKEASPGATAAEAERARRRRMSRLYAELGAQLPGLPPRANMARILEDAIAYVGVLRATVAGLEARAAFARSARTAAPADVLVARKASCFVVRLAEAPRRADARAGGVPTA

SEQ ID NO: 4003 - protein, 1043 aa, Zea mays
  VARIANT 766..1043: note = Derived polymorphism lacks residues 766 to 1043
  VARIANT 632..1043: note = Derived polymorphism lacks residues 632 to 1043
  VARIANT 458..1043: note = Derived polymorphism lacks residues 458 to 1043
  VARIANT 433..1043: note = Derived polymorphism lacks residues 433 to 1043
  VARIANT 293..1043: note = Derived polymorphism lacks residues 293 to 1043
MELALGAMASLAPKLGDLLMEEYVVQKGLKPDIESLSRELVMMNAALVDASRVPPDQLTEVEKLWARKVRDLSYDMEDAVDDFILRVAGGDDSADDSKFFKKTLATVKDVMSMKKFKDRRQISDKVKDIKKLSNELAELRAKYTVRGVGADLAASTGIDPRVINLYKKETDLVGIEESRDKVIRMLSMGTKDDDAHESHQDLKIVSIVGVGGLGKTTLAKTVHDMLKKQFDCSAFISIGRTPNLNRTFEKMLLELDREHKQVDMARWDLEQFKNELDEFLKDKRYLIVVDDIWDVDSWEAIRYVLKDNNCGSRIIMTTRNSGVVTKVEEVYRLKPLSTENSEKLFYKRIESQEGESLDGELSSKIIHKCGGIPLAIIAIASLLVERSREEWPEVYDKIGLGNEDNTTKIMLYSYYDLPPYLKPCLLQLSIFPEDCFIDTKAVIWMWIGEGLVHLEKEEGSLFEVGERYFKELVNRSMIQPIEEKYHWFVERFCIHDIMFDLICKLSKDEDFITLSGQHSSQSLQSLFNLRSDCKLRRLAVRNQRVQRFPEETMDMPEVLRSLSIIDCNIEVMAPIDSFRVCRVLHIENNYVPISLKHLGKLLHLKFLEIFDTTIDELPREIGHLRSLQTLVLVSTGLDELPVAVCSLTRLMCLIAYGFERLPADRIGNLTSLEELQLHRVVGRSATQDLVAELGKLTRLRVVRITFSEQLEESSQEALVQSLSNLRLLQELVLFSEMPERGSDMWGDWELPRQLRRLIIEGIVFSRQPRWINRSCLPRLYSLYLMVHAVEAQDLDNLARLPELQYLMLFGFSWPPRYTVGPDDFRNLRFCEVGTTFEFRKGAMPRLEVLRFGVCVPFEQFPTKDVIEDLDFDLDNVILLQQVRVKVNCAGATVTQVEEVEAVVMRAVENHANRPTIKMDRVYEQNILSDEEREALVRLFSLNMFVYFNSQLQRHIEKDCCVRTMKDKSDAFFISQLRRYRHLQKAIIFIDCSGASMCEVQKVEAAYRHAAEVHPNHPSIELIRTNTDGMASSSSDHPNTEPRN

SEQ ID NO: 4004 - protein, 604 aa, Zea mays
  VARIANT 460: note = Ancestral polymorphism is R, Derived polymorphism is C
MASAAAGTPKRCYYEVLGLSRDCSPTDIKLAFRRLALSLHPDKQPPGSDLAAATAAFQELQHAHSVLSDPQERAYYDSHRSQILFSDPASAGAKSASIVPDLFAFFSSSAFSGFSDTGRGFYKVYGDVFDKVFAQELAYARRMGVPDPAAPPVIGNLDSPYAQVTAFYSYWLGFGSVMDFGWAAEWDAARGESRRVRRLMEEDNKKAMRKARREYNDAVRGLAAFCKKRDKRVVDMVLKKKLEEEKRKAEEKERKKEEDKRKKERAMACQEPEWARAEEVEEGLYDEDEEEEMRAKKEELYCVACNKKFKSDKQWKNHEQSKKHRDKVSELRMAFREEESLKEAEEGEGDWNEVDVGFDFKPTQESDDESAFSDAAEELAEEFEEGLEVHDKENGDKDFDSAEQEVGSYDEASVLEAMLSSCKNRKGGYVAPPEEALSGTAEDDDHHRSSEVNNAKRKGRRRRAAKKEQDESNYAGNEHHGKCEVQPEGSVHGNDVDDIMEGPSSSNVNNGSVSKGDKQNGENTNPKKNKKGTKKKPTVSTDQKSMSKADQKSTSKGKKQKEVSKAPSNDCDTCGGTFESRNKLFSHLEETGHAMLKTRQKNRR

SEQ ID NO: 4005 - protein, 219 aa, Zea mays
  VARIANT 32: note = Ancestral polymorphism is H, Derived polymorphism is Q
MLMAAATHYLGGSAHSSSTTSSSISPSPPPWHPVLVVPSNQRQAVVYDLTEDLATPPSPSPSPSTTPQHLRPASRRRAGKPRRPRPSRKLPTTYISADAASFRRMVHQVTGAGVGADVDAVHQGTEQLLCRPAPPSRAVLSTATTTLVPTLDTSAFLLDAGGGGRPGAACFHGSAAAAEAEACGCGGGGGIGGGGEYSCSNGGGGGFPSLESWDDHDLF

SEQ ID NO: 4006 - protein, 411 aa, Zea mays
  VARIANT 140: note = Ancestral polymorphism is A, Derived polymorphism is V
  VARIANT 119: note = Ancestral polymorphism is R, Derived polymorphism is C
  VARIANT 58..411: note = Derived polymorphism lacks residues 58 to 411
  VARIANT 33: note = Ancestral polymorphism is R, Derived polymorphism is C
MASAAACAPKRCYYEVLGLSRDCSPTDIKLAFRRLALSLHPDKQPPGSDLALATAAFQELQHAHSVLSDPQERAYYDSHRSQIIFSHPASAGAKSASTVPDLFAFFSSSAFSGFSDTGRGFYKVYGDVFDRVFAQELAYVRRMGVPEPAAPPVTAFYSYWLGFGSGMDFGWAAAWDAARGESRRVRRLMEEDNKKAMRKARREYNDAVRGLVAFCKKRDKRVVDMVLKKKLEEEKRKAEEKERRKEEDKRKKERAMAYQEHEWARAEEGLYDEDEEEEMRAKKELSEEESLKKAEEGEGDWNEVDMGFDFKPTQESDDASAFSDAAEELAEEFESNYAGNGHHGKCEVQPEGSVHVNDVDDIMEGPSSFNVNNGAVIMCYNGCSISGVILRAGQSSLEQNCPDLVWKQWEH

SEQ ID NO: 4007 - protein, 466 aa, Zea mays
  VARIANT 48: note = Ancestral polymorphism is S, Derived polymorphism is F
MASAAAGAPKRCYYEVLGLSRDCSPTDIKLAFRRLALSLHPDKQPPGSDLALATAAFQELQHAHSVLSDPQERAYYDSHRSQIIFSDPASAGAKSASTVPDLFAFFSSSAFSGFSDTGRGFYKVYGDVFDRVFAQELAYARRMVVPEPAAPPVIGNLDSPYAQVTAFYSYWLGFGSGMDFGWAAAWDAARGESRRVRRLMEEDNKKAMRKARREYNDAVRGLAAFCKKRDKRVVDMVLKKKLEEEKRKAEEKERRKEEDKRKKERAMAYQEHEWARAEEGLYDEDEEEEMRAKKELSYCAACNKKFKSDKQWKNHEQSKKHRNKIAELRKAFREEESLKKAEEGEGDWNEVDMGFDFKPTQESDDASAFSDAAEELAEEFESNYAGNGHHGKCEVQPEGSVHVNDVDDIMEGPSSSNVNNGAVIMVLQLPSPLPVLCCSRRNKLFSHLEETGHAMLKSLVGSAWFS

SEQ ID NO: 4008 - protein, 225 aa, Zea mays
  VARIANT 150: note = Ancestral polymorphism is P, Derived polymorphism is L
MARRAEVVPLPTHPPSGVNLHDVRNHSPICCRDLIQPCCGSGSEFAPALIWNFICSFLYSGIPLLYVPLKVVMSKYYGESERLLGSIFYLANDLPEGGNIFLDETAFVPFITANDRDLATTAKARRILDVCGLDVIELGVPDFDPLAECPVIQLRLFAYTICSYTILSMWSFILYGASRIHLLQKHHKSCLGHYTRASHSATWHSQSEVLEERQIQLPAYLGSGR

SEQ ID NO: 4009 - protein, 175 aa, Zea mays
  VARIANT 35: note = Ancestral polymorphism is G, Derived polymorphism is V
  VARIANT 38: note = Ancestral polymorphism is G, Derived polymorphism is S
  VARIANT 42..175: note = Derived polymorphism lacks residues 42 to 175
  VARIANT 55: note = Ancestral polymorphism is I, Derived polymorphism is T
  VARIANT 107: note = Ancestral polymorphism is V, Derived polymorphism is L
  VARIANT 117: note = Ancestral polymorphism is C, Derived polymorphism is Y
  VARIANT 124: note = Ancestral polymorphism is C, Derived polymorphism is Y
  VARIANT 167: note = Ancestral polymorphism is R, Derived polymorphism is Q
MTIQIGEVLQMQIEVQRKLNEQLEAVITEINENIGTTGVVSQECKAIVSQCGQQILDLLLAEHSSKRQPFRSYEIKIFSGPKPMKGSSSEIELRRVDYFSSKELPQVLERIMRKKLCFLSYCICFWPVLFFYHYFRKSLEVDYFSSFTMKLLEEGFDLCAHLLALRRYNFMEISD

SEQ ID NO: 4010 - protein, 466 aa, Zea mays
  VARIANT 311..466: note = Derived polymorphism lacks residues 311 to 466
  VARIANT 166: note = Ancestral polymorphism is A, Derived polymorphism is V
  VARIANT 144: note = Ancestral polymorphism is G, Derived polymorphism is V
  VARIANT 132: note = Ancestral polymorphism is V, Derived polymorphism is L
  VARIANT 126: note = Ancestral polymorphism is G, Derived polymorphism is R
  VARIANT 71..466: note = Derived polymorphism lacks residues 71 to 466
  VARIANT 48: note = Ancestral polymorphism is S, Derived polymorphism is F
  VARIANT 33: note = Ancestral polymorphism is R, Derived polymorphism is C
MASAAAGAPKRCYYEVLGLSRDCSPTDIKLAFRRLALSLHPDKQPPGSDLALATAAFQELQHAHSVLSDPQERAYYDSHRSQIIFSHPASAGAKSASTVPDLFAFFSSSAFSGFSDTGRGFYKVYGDVFDRVFAQELAYARRMGVPEPAAPPVIGNLDSPYAQVTAFYSYWLGFGSGMDFGWAAAWDAARGESRRVRRLMEEDNKKAMRKARREYNDAVRGLAAFCKKRDKRVVDMVLKKKLEEEKRKAEEKERRKEEDKRKKERAMAYQEHEWARAEEGLYDEDEEEEMRAKKELLYCAACNKKFKSDKQWKNHEQSKKHRNKIAELRKAFREEESLKKAEEGEGDWNEVDMGFDFKPTQESDDASAFSDAAEELAEEFESNYAGNGHHGKYEVQPEGSVHVNDVDDIMEGPSSSNVNNGAVIMVLQLPSPLPVLCCSRRNKLFSHLEETGHAMLKSLVGSAWFS

SEQ ID NO: 4011 - protein, 323 aa, Zea mays
  VARIANT 22: note = Ancestral polymorphism is R, Derived polymorphism is P
MALASLAASLPVAATAAAVRFPFRFRIGRAMASAAAGASPARVAVVQMTSVGDVDANYATCSRLTKASPPLEAAASGVKFLCFPEVFSFIGSKDGEAMKLAEPLDGPIMQRYCSLAKESSMWLSLGGFQEKGPDDSHQYNTHVLIDDTGKVRSSYRKIHLFDVDVPGNMVYKESRFTAAGDTIVAVDSPFGRLGLTVCYDLRFPELYQILRFKHQAQVLLVPSAFTKITGEAHWEILLRARAIETQCYVIAAAQAGKHNEKRESYGDSIIIDPWGTVIARLPDRLSTGFAVADLDLSKVEAVRTRMPISEHRKFDSDWKPTPL

SEQ ID NO: 4012 - protein, 485 aa, Zea mays
  VARIANT 422..485: note = Derived polymorphism lacks residues 422 to 485
MAARKKKPLLIACQATSARITRSQAAANSTRSGLAPSVPVPLKTEHNHAAKKKMKREASDENASADAGASAPLPKRRTVLKNVTNISCAKISKRCTAVTGLKLGPSQKAGQSINKQCTNKISMLLPLAVGGSSLVDDSNNAEETQMVDLLAQKEKQIVLLKEAQPLQNTEQNKGGACDEASVEERNAMNVHETAALKAGVSNGLNIVDIDKNNGDPQMCVTYVAEIYRNLMASELIRRPRSNYMETLQQDITASMRGVLIDWLVEVSDEYKLVADTLYLTVYLIDQFLSQNCIQTHKLQLLGITSMLIASKYEEYSAPSAEEFCNITAGTYAKAEVLEMEQQVLNDLGFHLSVPTTNTFLRRFLRAAQASRTAHLTTLNYLASYLAELTLISYDFMKFLPSEVAASSIFLAKWTLDQSDHPWNPTLEHYTSYKSFDIRTCVRALQELQHNTSNCPLNAIREKYGQQKFECVANLRSPELLRSLFS

SEQ ID NO: 4013 - protein, 658 aa, Zea mays
  VARIANT 354..658: note = Derived polymorphism lacks residues 354 to 658
MEDSAPSSAAPDPPLSPPPSTPPHPHPHPPEEEGGCWVLVPASEVEGAHAPKVIHWDDLQQELARLWSLSAALQPAEDRKAHLTARLESALQVRQAFLEQDNELAEMRQRLQERTDRLGDLKTRAKKLSEDVVVRREQLCVKIRTLSGASKALEAARSNLKEANELLSGENGCGRLKDLEQQLRMRQQYMVAQVAQIYPVRPLDEQSSDHKPGFTSNITKTSNVESVLPNSPQNRPLVILGLQLSKLSVKKTGYFSDKTEVQKSSTVLGYAAHAVSLIASYLNVPLRYPLRFGGSRSYVLDPAPSVEPSSITSVGTSVPPSTSMRTTEFPLFLDSQETTRSSYAIFLLNKDIEQLLNYIGAESLGPRHVLANLKQLTTIIQSQGYISDGRRRPDADPATETTPLHPSFFHDIPLSPPPAGTYIVQVPKDQVLREPPPDRARRYKKLAGQPARRRRLRRACCLSCAALLAILLAAAAFAGAVCLAFRPRAPSFSVPSALAIRGLANATATATGAAAPLSPALDAAVRADNGRNGKVGVEYRAGGAVAVSYAGQRLAAGPWPAFRQAPRNVTVVAAAMRGQGVRLSDARRRQLAADRAAGAVPLTLEARVPVRLRFGKVLRTWTVHVRARCEVAVDRLDGDATAVNRGCRVRVKPLWWWW

SEQ ID NO: 4014 - protein, 379 aa, Zea mays
  VARIANT 14: note = Ancestral polymorphism is A, Derived polymorphism is S
MAPLSWRHHTLLQSLLHRGPLSERDFHAIFAGVSGKNPAAMAPPSWRQRHHTLLQALLSRGPLAEPDFRALFTAVSDRDPATHQQLFNDTLLKINKDLAYLQFELRACINQYDGMVYYGVVNNIADEESKLGTKYSVPQIAFYKGLLEAIVQEAGNDGSITSIDALNVRLDNQVAVLDGSQDSQSRLPSSIKNFSMSQKEKTLDELIRDRWLSYTATGKIGLGTRSFLDLRSWFRGNDIPSCVVCNEACIKASSCPNEGCDVRIHEYCLKKKFSQRKASRACPSCGTGWPCQDGEGEADEVNEPGEEDLASPANHPSRKKRSRVKAELVEENDIAGPSTEVPRTRRTLRSAKAEAVEADQEASSTAASQPGRGSKRRKK

SEQ ID NO: 4015 - protein, 236 aa, Zea mays
  VARIANT 54..236: note = Derived polymorphism lacks residues 54 to 236
  VARIANT 132: note = Ancestral polymorphism is K, Derived polymorphism is M
  VARIANT 155: note = Ancestral polymorphism is E, Derived polymorphism is D
  VARIANT 206: note = Ancestral polymorphism is A, Derived polymorphism is S
MSRPLSSFCLHRIRSGGTASTAAPPSICANKDDGGGGGGGESRSLKDGKQKDEWEEANEKGSAEAVVVGRKVMVAAADGGGEEARTALQWALSHAVRPCDTVVLLDVASGKNRRDPRGSPHLEALRSICQAKRPEVCVELSLAEGGKDRGPAIVEAARKQGVSLLVVGQKKRSVTWRLLSMWIAGVKGGGGGGYTSAADYCVQHAACMALAVRRKSRRGGGYLITTRRQRDFWLLA

SEQ ID NO: 4016 - protein, 128 aa, Zea mays
  VARIANT 31..128: note = Derived polymorphism lacks residues 31 to 128
  VARIANT 34: note = Ancestral polymorphism is T, Derived polymorphism is M
  VARIANT 58: note = Ancestral polymorphism is P, Derived polymorphism is L
  VARIANT 94..128: note = Derived polymorphism lacks residues 94 to 128
  VARIANT 95: note = Ancestral polymorphism is R, Derived polymorphism is L
  VARIANT 97: note = Ancestral polymorphism is A, Derived polymorphism is T
  VARIANT 103: note = Ancestral polymorphism is R, Derived polymorphism is G
MALKASGAYRHCKPCAGSSSLAASRRQQPYYHGTYAESGSDRFHCAYQRAGSSAASTPRLHTGGAMSSGDITPSVSARTDFLADDEEGDMKRERRLAAARRMRRRSGSPRWSPGCSSPSSRCRGAAMV

SEQ ID NO: 4017 - protein, 296 aa, Zea mays
  VARIANT 92: note = Ancestral polymorphism is W, Derived polymorphism is S
  VARIANT 68..296: note = Derived polymorphism lacks residues 68 to 296
  VARIANT 30: note = Ancestral polymorphism is T, Derived polymorphism is I
  VARIANT 26: note = Ancestral polymorphism is R, Derived polymorphism is G
MKTTKEKLVEAQEKCKEALDGAKRKGEVKTVRELELREEVHVSRVGGSEEVTCVGSSEPHKLGPMDKWTKAIDPTTTKSESLTQQRLNKELWKERLREVHKYIARWAFNNAISFNACDNDEFKQMCEAIGQFGPGIEPPTMFDLRGRLLEEEYARTKSLLQEREAEKMKNGCSIMTDAWSDKKRRSIMNVCTNCADGTSFISSKEMSDVSHTSEVIFELVDKSIEDIGPDDVVQVVTDNASNNMGAKKLLHVKRPHIFWISCATHTINLMLQGIGNMPRFKNARTSSQHRTPEVSE

SEQ ID NO: 4018 - protein, 243 aa, Zea mays
  VARIANT 3: note = Ancestral polymorphism is P, Derived polymorphism is H
MPPSSQMVAILQLTLLLISCSLYSMLHSSSSSSPSSSSSSSSSAPSSLALLVLLVVSTCLSLLFASLKRLLRDTTAHRGANNRAPAPSMEEAAAAAAAVFPEKSVVSSSPLPQDEAAEDFTVGGSGTSPSDSSECATTNDDEDEGTEEEGSVSDETDADNDDDDDDESLIEISLVDGHYVGSEQRRAYNCNYKKDLLADLLPDLLLDRRDFIFDILSEIGEEDDSLIEIDLARGSIKCDVVKA

SEQ ID NO: 4019 - protein, 469 aa, Zea mays
  VARIANT 313..469: note = Derived polymorphism lacks residues 313 to 469
MTIGVALLLDLTSRLPRAGASAASAAVRSHPGLSTTAFAATAAAALSSSGVPLSARHLFGTHLIMVTIALALNLHHCKFGSCVMLAERKFPFHGFTVAHCDAGTPAGWNDGSDDLVNEINTKIIDSLQYARKDYFQNTTKEYPSELKPLFSAFGLKNFTITTLRSFLLYYLPLIQPKPHTGSDDEDDDLLHDTQEKTMDLVTPFYNSVKQIVRETSIVTTRRVFERIVVRHVSQRTAWKLLKGNNASLMRSLDISKSYHYALGYCGFMDPLFGDNRHCIISSCSYILSVYDDTSMNLCIYLALISQFICFNLWLIIITIFMQTISNYISIDASKSSKRKAARGMPTPQYTYCVARTTFRAHALGITAAWVVQSIIEVYRCFIRKPSEDCEALSSDGNEQFDDMNKFRLFGRKIYGITIKSCFSLVLASAGAGIGALVHPVHGQWLGCALGDVAGPIIAIIVFKKMQLPL

SEQ ID NO: 4020 - protein, 204 aa, Zea mays
  VARIANT 164..204: note = Derived polymorphism lacks residues 164 to 204
MERPTVRSGRPSVSSTTARPQLSNLGLGYSIAIALGFLILFASFLLAFYFCFGRGGDYWAGEAVTTASSSGHLSITVPRVLFVAEGSESPEDDAYPSSSAAAACSPVGLDAAAIASYPKVAFSSRAAEANAMCSICLSEYRDGETLRVMPECRHGFHVACLDAWLSRSASCPVCRSSPVPTPNATPLSELVPLSQYAADRRRRR

SEQ ID NO: 4021 - protein, 260 aa, Zea mays
  VARIANT 28: note = Ancestral polymorphism is R, Derived polymorphism is Q
  VARIANT 61: note = Ancestral polymorphism is G, Derived polymorphism is R
  VARIANT 65: note = Ancestral polymorphism is T, Derived polymorphism is I
  VARIANT 142: note = Ancestral polymorphism is L, Derived polymorphism is S
  VARIANT 209: note = Ancestral polymorphism is A, Derived polymorphism is G
  VARIANT 217: note = Ancestral polymorphism is G, Derived polymorphism is W
  VARIANT 244..260: note = Derived polymorphism lacks residues 244 to 260
MGEVAPVIPVTRRRTMSRKAAGAVEADRPAEDVSEEKTSKITIALNQEAEAVAVASKEEKGTGCTVPLRLYHFLNIVYKTREYEFLRLTSLGVIGALVKLFQLPELFDDQVMHRCCQFLWADLIPCRTQQSSIIFLHDSKMSQVAAATPQTTAIRADQKRQERAPHVFILLSHPPFLAPTHCHCTCVVLCCVLQEEEEEEEHVLRSLPARFTTSIYGGDHQAFAKQKLPKMAYDYYASGAEDEWTLQENMEAFSRILSSG

SEQ ID NO: 4022 - protein, 228 aa, Zea mays
  VARIANT 101: note = Ancestral polymorphism is A, Derived polymorphism is V
MAMSIFGGCVGGDSGALIAPSASSLRPPFRLVAGPKGHFCTFPHGASSNHSRLCVQHQRCSRSSTQNYALSRKDFSPITQDVEGFLHNVVNMGFLDRLKLAWKIMFSAPTTKDTSNANIAKQRLKMILFSDRCEVSDEAKKKIVENIIEALSEFVEIESRDNVQVDISTDAGLGTVYSVSVPVRRVKPEYQESEEQYRGKIVGVDFKDTGESSGSVDVTFDFFVPNEN

SEQ ID NO: 4023 - protein, 198 aa, Zea mays
  VARIANT 117: note = Ancestral polymorphism is R, Derived polymorphism is W
  VARIANT 105: note = Ancestral polymorphism is R, Derived polymorphism is C
  VARIANT 95: note = Ancestral polymorphism is P, Derived polymorphism is L
  VARIANT 91: note = Ancestral polymorphism is L, Derived polymorphism is M
  VARIANT 82: note = Ancestral polymorphism is E, Derived polymorphism is D
  VARIANT 76: note = Ancestral polymorphism is G, Derived polymorphism is W
  VARIANT 74: note = Ancestral polymorphism is C, Derived polymorphism is S
  VARIANT 66: note = Ancestral polymorphism is F, Derived polymorphism is S
  VARIANT 62..198: note = Derived polymorphism lacks residues 62 to 198
  VARIANT 8..198: note = Derived polymorphism lacks residues 8 to 198
MWLGARYWQQALHELDPVFKKFSFSESVASLFSSLGYKRPAVIQSMYIFKQPGIGGEVVPHQDNTFLYTEPRTCTGLWLALEDATINNGCLWAIPGSHKKGLVRRMVRDENGTHFDRPSPVYDQKEFVPLEVKSGALVVIHGDLIHQSFENLSPASRHAFSLHVVDTEGCKWSEDNWLVHNFIFIMVLLKNSLFIILF

SEQ ID NO: 4024 - protein, 324 aa, Zea mays
  VARIANT 195..324: note = Derived polymorphism lacks residues 195 to 324
  VARIANT 178..324: note = Derived polymorphism lacks residues 178 to 324
  VARIANT 36..324: note = Derived polymorphism lacks residues 36 to 324
MVLHGVDAKRMRFHTDLKNRRFDHIVFNFPRGGFRGKENDLPCTRSWCGVFFRNARHIVRQLGEVHVIHKSGEPYDSWDLEHLASESSFAMVDKVPFQREDYPGYNQKRGDGKRCNKPFDLGACCTFKFQIRNLKKLKQMNRRSRLIPNLGGSNFHPGHSVTDRGVFHPVAPVEARSWHHFSPLAHTGSMLMSPQPYTVNQCQRSGRCGSYPKPVESCHPVVSMPGPCLNDLPAQGGIPPPLPMSRIPSPDLLAPREQPWYQQRTILDHLGVDDYFFAREHQMSLQREYEMKRQVIPLEHRHTDRESVEKLEWLHRMITLYGRK

SEQ ID NO: 4025 - protein, 182 aa, Zea mays
  VARIANT 72: note = Ancestral polymorphism is Q, Derived polymorphism is R
  VARIANT 80: note = Ancestral polymorphism is P, Derived polymorphism is T
MQQPMHMQPQAPAITPAAGISTEQIQKYLDENKQLILAILENQNLGKLAECAQYQSQLQKNLLYLAAIADAQPQTAVSRPQMAPPGGSPGVGQYMSQVPMFPPRTPLTPQQMQEQQLQQQQAQLLNFSGQMVARPGMVNGMAQSMQAQLPPGVNKQDAGGVASEPSGTESHRSTGGDDGGSD

SEQ ID NO: 4026 - protein, 398 aa, Zea mays
  VARIANT 206: note = Ancestral polymorphism is V, Derived polymorphism is D
MVNRQDSRARRGEGCRMEQQTKTTTQQEGKGLTTMQRSIVDKPPFTLADLRKAIPPHCFQRSLIRSCSYLAHDLAIAAGLLYLALAVIPALPGVLLRAAAWPLYWAAQGSIMFGVWVIAHECGHSSFSRYGLLNDALGLVLHSCLLAPYFSWKYSHQRHHANTASLERDEVFVPKQRPEMPWYSPLVYKRDNPVARLVLLAVQLTVGWPMYLAFNTWGRRYSRFACHFDPYSPIYGDRERAQIAVSDAGVLAVSFALYRLAAAHGLWPVVSVYGVPLLVTNAWLVVVTYLHHTHRALPHYDSSEWDWMRGALATVDRDYGVLNRVFHHIADTHIAHHLFPAIPHYHAMEATRAIRPVLGDYYRSDSTPIAEALWREAKECIYVQRDDQKGVFWYRNVF

SEQ ID NO: 4027 - protein, 103 aa, Zea mays
  VARIANT 39: note = Ancestral polymorphism is S, Derived polymorphism is P
  VARIANT 44..103: note = Derived polymorphism lacks residues 44 to 103
  VARIANT 80: note = Ancestral polymorphism is P, Derived polymorphism is S
MLLYTIYNQTKHGCFAYVEFLEQEAVQEAIQEALNLNESELHGRQIKVAPKRTNVPGMKQRPPRGYNPYHGYPYRSYGAPYFPPYGYGRAPTFRRPMRYRPYF

SEQ ID NO: 4028 - protein, 48 aa, Zea mays
  VARIANT 42: note = Ancestral polymorphism is S, Derived polymorphism is L
  VARIANT 37: note = Ancestral polymorphism is G, Derived polymorphism is R
  VARIANT 32..48: note = Derived polymorphism lacks residues 32 to 48
  VARIANT 16: note = Ancestral polymorphism is N, Derived polymorphism is D
MSHDFGFLLWQLNSSDLRSSNYVEHRHDLDTQVLLIGRLLYSGKSGAS

SEQ ID NO: 4029 - protein, 386 aa, Zea mays
  VARIANT 27: note = Ancestral polymorphism is T, Derived polymorphism is M
  VARIANT 52: note = Ancestral polymorphism is T, Derived polymorphism is I
  VARIANT 100..386: note = Derived polymorphism lacks residues 100 to 386
MATLPREGAAAADSDQLLVEAHGSTRTLILNRPKQLNALSSEMIKGLLWYFTAFEKDDGVRLLIMKGNRRVFCSGGDIAQCARCLYNGNWKWVDDFFQNEYLLNYIIATYIKPQVSILSGIVMGGGAGVSIHGRFRVATDNTIFAMPETALGLFPDVGASYFLSRLPGFYGEYVGLTGARLDGAEMLACGLATHFVPSKRLPLLEESLKKLDTSSTFAVSGIIDQFSQRPLVKDSSSLNRMETINKCFSKRTVEEIIDALEQEISNVSDKWVAATIKSLKKASPTSLKISLRSIREGRTQTLGECLRREYRVVCHVLRGTFSRDLSEGFRAVLLEKDNKPEWIPPRLEQVPDEAVEQYFLRIDDPQWEDLNLPARLPHRRNIESKI

SEQ ID NO: 4030 - protein, 479 aa, Zea mays
  VARIANT 438: note = Ancestral polymorphism is S, Derived polymorphism is F
  VARIANT 390: note = Ancestral polymorphism is M, Derived polymorphism is T
  VARIANT 199: note = Ancestral polymorphism is R, Derived polymorphism is S
MKVDREMEILLNEIPLLHHVGLLGGSEAGADDDADLSFLIHELAAMGLVDGDDELPAPGAATGYGFPTKGENLVAMHSFSMASHYAHMRSLFVPVTFDDAAAADGWDIRCSPPPYVPLPSPATPRARCKSVRRKNGSVMTTSPKKCGAAAAAKWHGESLAGLRGVMYHMARDQHGCRLLQQRLDDGKREVDYIFAGVSRHAAQLMVDPFGNYLMQKLLAVCDDGQRMTLVLTLTADPFALVRISLNVHGTRAVQKLIERLSAREEIGLVMDALRPGFLELIKDTNGNHVVQKCLHSFASNDNKAIFAAAALHCVDIGMQIHGCCVLQRCIARSRGEHRDKLVAAIAHNGFKLAEDAYGNYVVQVVLDLKIPTANSSLAQQFGGKYIHLSMQKFSSNVVEKCLKVFKEVDKAKIILELLATPHLEQLLPHCYANYVVYSALKNSKGSLHSALINAILPHEELLRTSPYCKRIYSKFFLKN

SEQ ID NO: 4031 - protein, 130 aa, Zea mays
  VARIANT 19: note = Ancestral polymorphism is R, Derived polymorphism is Q
  VARIANT 20..130: note = Derived polymorphism lacks residues 20 to 130
  VARIANT 21: note = Ancestral polymorphism is R, Derived polymorphism is Q
  VARIANT 28: note = Ancestral polymorphism is P, Derived polymorphism is S
  VARIANT 39: note = Ancestral polymorphism is R, Derived polymorphism is C
  VARIANT 44: note = Ancestral polymorphism is D, Derived polymorphism is N
  VARIANT 89: note = Ancestral polymorphism is E, Derived polymorphism is K
  VARIANT 91: note = Ancestral polymorphism is P, Derived polymorphism is L
  VARIANT 102: note = Ancestral polymorphism is L, Derived polymorphism is F
  VARIANT 113: note = Ancestral polymorphism is E, Derived polymorphism is K
  VARIANT 121: note = Ancestral polymorphism is V, Derived polymorphism is M
  VARIANT 123: note = Ancestral polymorphism is G, Derived polymorphism is R
MAEENRQQRRLFANLRSVQWQIDLGIVPASPGASVDKLCHAAADSRRRYVSLRRRLMVDPHLPKEEDRSSNLVVDNPLSQNPANECSIEVPGVLNVQRLQQLLLTLATLIKRELCDSSFLVIGYIMKKIL

SEQ ID NO: 4032 - protein, 843 aa, Zea mays
  VARIANT 223: note = Ancestral polymorphism is E, Derived polymorphism is Q
MNFLYRTTQPAAPELPRISEQDHRNALQKTTSTLEGLIADDSHHQPSSAHSEDGAANNGSRDISGDSSSVDLKSPVPLGTHADVMEDEGWITIPCKALPESWNDISEMVQLQALDRSFLFPGEQVPILACLSASKQDLQVISPFRIAAVMSKNGTSMQNFTNKSSPVSANGHDNGAAGESGYQDVELNGEASPSGHDILETQSLLQMEDHKQQIEHVLRRFRESNFFVRIAESVEPLWSKKSVTSTTMADERSDNQGNSKSSRSNVYNTISDKGVFDGNTSGGVARDVVKCYSLQNGDIVVVLQVNVSVNKLEDPVLEVLQFEKSISNNCMPGNLVDGQCDSNDDPCQELLSWLLPLDRTLPPRSLAPPTLNPSVSHKQSYSASGSQIFNFRSYSMPSASSVQTPNNIRPPPISESQEFMPEKPAKTPDIINDGQLSFRGVPLEPERYSVRCGLEGVYLPGKRWRRKVEIIQPIEVQSFAAKCTVENLLCVTVKNIAPTHAKDIVVFIDAITIVFEEASKGGAPLSLPIASIEVGHGHSLPNLALRRGEEHSFILKPATMSSRERKTNSHAPLALSLPTMTGATLNTHTPKAGEPYADLSDQYAVLVSYRCNYTGKLLLNQDISSKEEWSGFFMISAFIYVESKLFFKQATSWRPSAASDLMISVSSELSLRNPSLGARVPQLPVQILTLEATNMTSENLTLTVLAPEASGSSSVVSLNSSPTTPNGSFDGVNESAKRSGVGKDGIGFRRLNSVLATPKEGDNGGNRMSNASGCTHLWLQSAVPLGCVPARSSTTVKLELLPLSDGIITLDTLQITAREKGLAYIPEHSLEIHATSGMSSGRS

SEQ ID NO: 4033 - protein, 166 aa, Zea mays
  VARIANT 99: note = Ancestral polymorphism is R, Derived polymorphism is S
MEQSQGQGGRRRQIPAFGRWNQHSVGDEVPITQYFESAVQASLLARPGHCYHDAGAGEVLLFRSSASPPPHKPPKKVRSTTECHGHHQQVQVEEVGSRRRQQQRRRQEPLPPFVSGDVSRAARPRVVRAAVDEDLYKVPSDMLRKKKGRKHVRSVWMGCVGLTCVA

SEQ ID NO: 4034 - protein, 212 aa, Zea mays
  VARIANT 11: note = Ancestral polymorphism is A, Derived polymorphism is V
MASAVAAVKEACLLAAVCVVLLHSSSSMGQQPLAPESSSASPYYYTGQQPPPPPASPVDCPYTGQQPTPPPVVVPPAPTPTPTPTPAPAPSPTINCSYSDCGAQCTTSCQASYNATARNCTALGDGAFQGCYGSCTNNSCPGKSCVHSVCDSSCSCDNPHASSCCQSCRTAVNAAMGVGGEYQRCLSYNDRYMGYCMMSCVDSCYKNCTQGA

SEQ ID NO: 4035 - protein, 289 aa, Zea mays
  VARIANT 39: note = Ancestral polymorphism is A, Derived polymorphism is V
  VARIANT 192..289: note = Derived polymorphism lacks residues 192 to 289
MGRPPCCDKAGVKKGPWTPEEDIVLVSYVQEHGPGNWRAVPVSTGLMRCSKSCRLRWTNYLRPGIRRGNFTPHEEGIIVHLQALLGNRWAAIASYLPQRTDNDIKNYWNTHLKKKLRKQQAIGAIFAPPRPSEPTAGHADCRRHDMTRSSKDSHAACPADSTPAADEVVTQLIAQQFAATDGDTSSSSSYSYASSTDNISKLLNGFMMKSASPARDDATDTIKTSSAIDIDPFDHKSGGAALPPPKKRQQQQHLSSIENWLFDDATEQLVVQLMEEISGGSCSVPMLLY

SEQ ID NO: 4036 - protein, 528 aa, Zea mays
  VARIANT 226: note = Ancestral polymorphism is F, Derived polymorphism is C
  VARIANT 91: note = Ancestral polymorphism is A, Derived polymorphism is T
MELTWDVIVLAACSFLIPLVFLRNAKKHRRRRAPPGPATVPIIGNLAWLELRHGWMDEMNILRRMHSRFGPLLKVRLGSSEQVNVMDRRLAHALLVERGAAVADRSPLLVSTDRFGVFDSFSIHVSSYGPRWSVLRRNFAAEIVSPARFRQMAASRELALSGLIRKLQLEEGGVVCRDAFQHAMSSLFIAMCFGKVLDDSSVDSIAVAVRDFVLHDDGSETGMAKFLFLPALTTRLFRDFVREREAKLQKLETVYCLPLIHERRERRKKQQTQELEHPHCYVDTLLDLRLGEGRQDGGRPPLTDHEIASLCIEILIVGSDLPGTALEWTMAELVKNPGVQDKLYEEMMKAKGTGGVVAAGGVPFSEDDLPKIPYLRAVVLEGLRRHPPAQQMPPRRVREDVEVDDYVVPKGSAINFMLYDLGMDDATWDRPALFMPERFLPGGEAEELDITGAKEMKMIPFGAGRRICPGLRIALLLLEYFVANLVAAFHWKEVEPGDVDVTSEDVRVSILMGKPLRARLLARLPAAP

SEQ ID NO: 4037 - protein, 285 aa, Zea mays
  VARIANT 30: note = Ancestral polymorphism is P, Derived polymorphism is A
MKKGPWMPEEDLVLVSYIHEHGPTKWRHVPASTGLMRCSKSCRLRWTNYLRPGIRRGNFTPREERVIVHLHSLLGNRWAAIASHLPQRTDNDIKNYWNTHLKKKLVVVEEQHRAAAAAAIVAAAARGHVDDDGVTTSSSPRLLAKDDSYGYGYDARPAAAYPCSMDNVSKLVKVKAGCMKSASSSSPPAQDGSSIRRPFFSLDQTSRSTAPLPPISNVVPQLAGTVLAGQGQGRHGGRFFHEPPQQQLSSIMENWLFLPKHQHQQQMTQSSPTPTAAAHCPCCFS

SEQ ID NO: 4038 - protein, 98 aa, Zea mays
  VARIANT 92: note = Ancestral polymorphism is S, Derived polymorphism is Y
MGPQQGRRSNGGAAARSKQEEEGGAKVVRYRECQRNHAASLGGHAVDGCREFMAAGADGTAAALACAACGCHRSFHRREVEQPAADCDCDCSSTTSGA

SEQ ID NO: 4039 - protein, 99 aa, Zea mays
  VARIANT 12..99: note = Derived polymorphism lacks residues 12 to 99
MSSLQAPEVVEEQSQSQSAAGCSTSRLWKLRWHPQAAHASAAAVPSAPAAMNSRHPSTACPPRDAAWLRWHSRYRTTFAPPSSSCLLRAAAPPFDRRPC

SEQ ID NO: 4040 - protein, 299 aa, Zea mays
  VARIANT 37: note = Ancestral polymorphism is V, Derived polymorphism is A
  VARIANT 54: note = Ancestral polymorphism is P, Derived polymorphism is A
  VARIANT 65: note = Ancestral polymorphism is S, Derived polymorphism is N
MESRPPMPWCACDRAGTTTTMTTAIKKGPWMPEEDLVLVSYIHEHGPSKWRHVAASTGLMRCSKSCRLRWTNYLRPGIRRGHFTAREERVIVHLHSLLGNRWAAIASHLPQRTDNDIKNYWNTHLKKKKVVVEEQQRAAAAAAKRHVDDGGITTSRSPRLLAKDDSYGYDYDARPAAAYPCTMDNVSKPLKVKLGCMKSASSSSPPAQDGSSSIRRPFFSLDQTSGSTAPLPPISNVVPQPVLAGQGRHGGRFFHEPPQQQLSSIMENWLFLPKQQHQQQMTASSPTPTAAAHCPCCFS

SEQ ID NO: 4041 - protein, 99 aa, Zea mays
  VARIANT 74..99: note = Ancestral polymorphism lacks residues 74 to 99
MSSLQAPEVVEEQSQQSAAGCCSTSRLWKLRWHPQAAHASAAAVPSAPAAMNSRHPSTACPPRDAAWLRWHSRYRTTFAPPSSSCLLRAAAPPFDRRPC

SEQ ID NO: 4042 - protein, 350 aa, Zea mays
  VARIANT 121: note = Ancestral polymorphism is T, Derived polymorphism is I
  VARIANT 258: note = Ancestral polymorphism is A, Derived polymorphism is S
MAMAAATGTVVLVDAALAPYEHPDLRWLVRKHVLAVLQDFPTLSPSVDTYTSDSGASAVLLNARGLLTVSPALPPVLLTLWLPLEYPYLPPLVYVFPAAPPASLARDHPFVDHRTGRVRQTLPYLEDWAVPRSSVAGLVRSLVGALRMCHPLTSRFGSVVHATATARATTTTTPTPEEEEQERMHAALLDELVSRLGRDAAAFRGHVDEDIHALSSSQGNLRARADAMDRAVRDLEGERMRLERAVTASLSHRGELLSWLHKTSCAPDDAGAALLLAPHGAAGGDAPRWLESKASELAMDDTVDALGRALEDGERVIGFHEYIKRVKVLAREQFFHCYAASTSMSKVTKY

SEQ ID NO: 4043 - protein, 129 aa, Zea mays
  VARIANT 59: note = Ancestral polymorphism is N, Derived polymorphism is K
  VARIANT 44: note = Ancestral polymorphism is G, Derived polymorphism is S
  VARIANT 21: note = Ancestral polymorphism is V, Derived polymorphism is A
  VARIANT 18: note = Ancestral polymorphism is A, Derived polymorphism is V
MASRNKAAALLLCFLFLAAVAASAAEMIAGSGIGDGEGEELDKGGGGGGGHHKHEGYKNKDGKGNLKPSQCGGECRRRCSKTHHKKPCLFFCNKCCAKCLCVPPGTYGNKETCPCYNNWKTKKGGPKCP

SEQ ID NO: 4044 - protein, 484 aa, Zea mays
  VARIANT 121: note = Ancestral polymorphism is G, Derived polymorphism is V
  VARIANT 325: note = Ancestral polymorphism is M, Derived polymorphism is T
MAPRGRTLLPLAAATVLVASTIFLFAAAGARWRPADTDLPVPPHAFPTAVPAAVTASSYSNATAGKELSFLDENGRPDDPSSASASSSTSGATPAAGVVRCDPRDAVRVFMYDMPPEFHFGLLGWSPPSPDSVWPDVTAASPPPRYPGGLNQQHSVEYWLTLDLLSSSPPCGRHSAVRVSDSRDADLVFVPFFASLSYNRHYRPVPPEKVSRDRVLQEKLVRYLAARPEWRRYGGADHVIVAHHPNSLLHARAVLHPAVFVLSDFGRYPPRVASLEKDVIAPYKHMAKTYANDSAGFDDRPTLLYFRGAIYRKEGGSIRQELYYMLKEEKDVYFSFGSVQDHGASKASQGMHSSKFCLNIAGDTPSSNRLFDAIVTHCVPVIISDDIELPYEDVLDYSKFSIFVRSSDAVKKGYLMRLLSGVSKQQWTKMWDRLKEVDKHFEYQYPSQKDDAVQMIWQALSRKVPSIKLKVHRSNRFSRSNRGK

SEQ ID NO: 4045 - protein, 95 aa, Zea mays
  VARIANT 62: note = Ancestral polymorphism is M, Derived polymorphism is K
  VARIANT 58: note = Ancestral polymorphism is R, Derived polymorphism is H
  VARIANT 50: note = Ancestral polymorphism is G, Derived polymorphism is R
  VARIANT 46: note = Ancestral polymorphism is G, Derived polymorphism is R
  VARIANT 38: note = Ancestral polymorphism is Y, Derived polymorphism is H
  VARIANT 36: note = Ancestral polymorphism is Q, Derived polymorphism is H
  VARIANT 32: note = Ancestral polymorphism is R, Derived polymorphism is W
  VARIANT 28: note = Ancestral polymorphism is T, Derived polymorphism is M
  VARIANT 16..95: note = Derived polymorphism lacks residues 16 to 95
  VARIANT 14: note = Ancestral polymorphism is R, Derived polymorphism is C
MFLRYLFSLLRFGCDWKKIEEHVGTKTTVQIRSHAQKYFLKVQKLGLAVGLPLMYPRRHFAMQQQQQSSVAGGSSATAMPLLHGRQPTCAPVAMP

SEQ ID NO: 4046 - protein, 248 aa, Zea mays
  VARIANT 223: note = Ancestral polymorphism is M, Derived polymorphism is T
  VARIANT 211: note = Ancestral polymorphism is G, Derived polymorphism is V
  VARIANT 210..248: note = Derived polymorphism lacks residues 210 to 248
  VARIANT 187: note = Ancestral polymorphism is T, Derived polymorphism is A
  VARIANT 155: note = Ancestral polymorphism is G, Derived polymorphism is R
  VARIANT 148: note = Ancestral polymorphism is E, Derived polymorphism is K
  VARIANT 136: note = Ancestral polymorphism is S, Derived polymorphism is L
  VARIANT 135..248: note = Derived polymorphism lacks residues 135 to 248
  VARIANT 130: note = Ancestral polymorphism is G, Derived polymorphism is C
  VARIANT 85: note = Ancestral polymorphism is R, Derived polymorphism is G
  VARIANT 32..248: note = Derived polymorphism lacks residues 32 to 248
MPRLSLTVTDDAAAMPFVLRLGGSPALRPGSQSPSWLRFGGRAGARKALFCSAEDARRCGSDDDAEAEECRRRGGSRVPSDRRIRGRNAAATVGDLQSGDNVQITGPVGKEMLMPKDPNATIIMLATGTGIAPFRSLLWKMFFEKHDEYKLQEFRKMKERASENFRVDYAVSREQTNAAGERMYIQTRMAEYKEELWELLKKDNTYVYMCGLKGMENGIDDIMVSLAEKDGMQIIFNFEPLVPNKVDI

SEQ ID NO: 4047 - protein, 161 aa, Zea mays
  VARIANT 56: note = Ancestral polymorphism is T, Derived polymorphism is I
MVSGSISEEIAVAVPAERMWKVAFAETKSALLPKACAGYVDAVEVDGDGGPGSVTTMKLNPSLGENKTLKSRVVALDAAARVVRTEVLQGGTVSAQLRTHFAEIRVEAAGEGACVAKVKVDYERLDGAPLAPEDEARLAQGYVRLVRMVEAYLVAHPDEFA

SEQ ID NO: 4048 - protein, 461 aa, Zea mays
  VARIANT 261: note = Ancestral polymorphism is W, Derived polymorphism is S
  VARIANT 123: note = Ancestral polymorphism is P, Derived polymorphism is L
MAPCWLQVALASMVAVLVLGLACAEAEPQCTRRRPPAPPRPHSVTITEFGAVGDGVTLNTVSFQNAVFYLRSFADKGGAQLYIPRGRWLTGSFNLTSHLTLFLESGAVIVGTQDVSQWPVVEPLPSYGRGMDLPGSRHRSLINGQNLVDVVITGNNGTIDGQGSTWWNWFRSNKLNYSRPHLVEFVDSEQIVISNITFLNSPAWSIHPVYCSNVVVHSVTIQTSLDAPLNHGIVPDSCSNMCIEDSSISVSHDAISLKSGWDKQGIAFGRPTSDIHISRLDLQSSLGAALAFGSEMSGGISDIHADRLLIHSSSRGVFFKTAPGRGGYIRDTVISDVQMEDVDVAIAFTGDWPSHPDDQFDPAALPVVSHITLKNMTGTRISVAGVLSGIAGDPFTDICLSNINFSLADSASPTSHWSCSNVSGYSELVFPEPCLDLQTQSSDASVCSTLPSFHAAAIAAA

SEQ ID NO: 4049 - protein, 603 aa, Zea mays
  VARIANT 27: note = Ancestral polymorphism is D, Derived polymorphism is H
MGAKGMATAAGTAVLLYLVLSGRLCGDAAGDGGNLDDQLISSAVSAAAEARRRRKEDARARREQRRASRTKWRWPERAPDGWGEAAALAARTVRFTWAETLGKWALGEVSFGIKHYMRQQGNLQHEYAGSDSVLLDGPEVRQELISLLRYLKQCMYFSKKPYNVFLEYGGYGQNDVLIKKSKARILKPAFTIVCDRSSQCFLLFIRGAISVKERLTAATGAEVPFHHVVVQEGQVSNLVLGYAHCGMVVAARWIAKQAIPCLSKAIEQFPEYEVKIIGHSMGAGIATILTYILRENEKLASSTCIAFGPAACMTWDLAESGKDFVTSIVNRNDLVPSLGLVSAAKLRAEVMSSSWAHDLRKQIQQTRFLGFVNRSVSFIRSHVPFVSDPRSKVVDVDMMQSQSPEAGSKPSADTHAVVKKRPALACWSCVAAPKQSMESSIQIEGTKVQTDTGVQTEKTTEAATAALVSIHLGELNLQEPDNREEKGSALTETDEDAMELLESLTDEKQLPSSSSSGQEPHQLYPPGKILHMVGLPAAEEATTSQQGAQEEVIALYETPRHLYSKIRLARSMIGEHYMPKYIKTMEQLIDKLAEDIDDQLDSL

SEQ ID NO: 4050 - protein, 242 aa, Zea mays
  VARIANT 37: note = Ancestral polymorphism is F, Derived polymorphism is C
MKNRLDSPLHVAAYMLNPYYSYTNSSIFCDSTIMEKFMLCVETFYHGEDEKAYRAVNDDLDRFQTKQGSFSKNMARSCQRLDFNPASWWRLYGGGAPDLQAIAIRILSLTTSSSGCERTWSVFEQTHTKRRNRLTTERLNNLVFIQFNNRMLSKKERISQNKNYEVLLSSDCSEAQGFFFEEGDEQALVQIRDEDEGEMQGTGIPWSVLGDAMGVEDELQPRRSARVAREVDKEDWESKKRR

SEQ ID NO: 4051 - protein, 288 aa, Zea mays
  VARIANT 50: note = Ancestral polymorphism is P, Derived polymorphism is T
  VARIANT 104..288: note = Derived polymorphism lacks residues 104 to 288
  VARIANT 182: note = Ancestral polymorphism is R, Derived polymorphism is S
MLLSDKESLLDDLEGENSDQSDSDHVTLAISIEDTGVGIPLQAQDRVFTPFMQADSSTSRNYGGTGIGLSISKCLAELMGGQISFVSRPFVGSTFTFSATLKRSYKDTSVDSNGRPVRSAVTRYHLKRLGIIVQVVNNLSAVAKAFPGQNGATVSREKATILFIESDFWRPETDVQLLNHLRENKNHKDKYGSIFDIVMCKPIRASTIASSIQPLLRVVMPERRDNQNRPSFLRSLLVGKNILVVDDNKVNLRVAAAALKKYGANVVVLKVARMLSVYFNPHIDLMHV

SEQ ID NO: 4052 - protein, 926 aa, Zea mays
  VARIANT 186: note = Ancestral polymorphism is P, Derived polymorphism is L
MHAFRRSLNDLVKFLRADPSSTGEAAAVARALSEIHREIRAPDAATKSVALQKLTYLSSLHFAPIASHPLAFLAIELLASPHLPHKRLAYLAASLSLHPVSLSLLPLATHQLHKDLSPSAGVHHHVSALALQLLASPAAAAAPDLPVHLAQDLVPHLARGCPRAIAAAARVIAASPSAAVPVLFKPLAACLASPDPRASTAAVAAFCDLSAPPADATPFLPLAPDLYNLLTTSRSNWALIKVLKLFARLAPLESRLAARIVDPVCQLLTRSAAMSLTFECIRTVLTALPAHDAAVRLAIGKAMEFIAAADDSNLRYLGLLALGMLGPAYASTVNDCREAIAKSLGDADTNIRQEALRLIMGMVNENNIMDIAALLISHVAKSDPEFANDILGAVLAACGHNVYEMVVDFDWYVSLLAHMARTLHCAQGDEIGRQLVDVGLRVQDARPELVRSARTLLIDPALLGNHFLFPVLSAAAWISGEYVDLTKDPVELVEALLQPRTSLLPISVRAVYIHAVFKVITWCFSAYIGRLGDSDLAMDVMFDRLAADETVNLESNAALGSGDEQDIGASTVQKDPFSHESILYMINLIQTTVGPLINCNEVEVQERAHNLIGFVHLVREIQGLNKRKVADGDKSSRLKELVKTMRAVFCQELGPVYVNAQMKVSPPDGLILNENLVELAGMVSEDDTTPSTSIFFYPRSRHSVDTRDEPAVSIGLSSLSEHRKRHGLFYLQTGKAEDEPNDYPQANDSLPSSSNNSANDDKWKTAERVFAGKKSTATKTRPKVVKLDTEDFLSSMMPSAIVPKEDPLSGALRDVLLGSDAKALSSQKASDMNLEVMLNKANSNESSSQQIENLGSHPASHSRTSKQQNHDKEKVTDRPESDGKEPRKHRSSGRSGHRQGKNKHREKSSAQPDIVPQTPVIQDFLL

SEQ ID NO: 4053 - protein, 407 aa, Zea mays
  VARIANT 347: note = Ancestral polymorphism is D, Derived polymorphism is G
  VARIANT 288..407: note = Derived polymorphism lacks residues 288 to 407
  VARIANT 260: note = Ancestral polymorphism is A, Derived polymorphism is S
  VARIANT 224: note = Ancestral polymorphism is A, Derived polymorphism is S
  VARIANT 215: note = Ancestral polymorphism is D, Derived polymorphism is H
  VARIANT 25: note = Ancestral polymorphism is P, Derived polymorphism is L
MAARPVAATVLLLSLQLAWWSSSYPGVQVLADAAVLGRKAGGLLLAMRDGNDDDNDNDNDKPVINAESSVNAAAAGPGRYAVIFDAGSTGTRMHVFRFDNHMDLVGIGHGIEFFAKVKPGLSSYAGEPQEAANSILPLLKKAKRVVPSELIEKTPLKLGVRDLVHTKSKTQFQYNPDWINVIEGYQEGSYLWVALNYLLDKLGVGDYSQTVGVVDMGGGSLQMAYAISAKDAAKAPKAPDADDRYVTREYLKGKDYNIYAHSCCGCCTFNGVWSGGGGPGLDTLYLASSFHFLAAQVGMIDGKLPSAKSTPSAFRVAAKKACQMSVEEAKAAYPGVQDIHVPYLCMDLTYQYTLLVDGFGLKSIKKVTLVSKVKHGEYYVQAAWPLGTAIEALSPKMGHRHRAHGFE

SEQ ID NO: 4054 - protein, 120 aa, Zea mays
  VARIANT 65: note = Ancestral polymorphism is Y, Derived polymorphism is C
  VARIANT 27: note = Ancestral polymorphism is A, Derived polymorphism is V
  VARIANT 21: note = Ancestral polymorphism is C, Derived polymorphism is R
  VARIANT 4: note = Ancestral polymorphism is K, Derived polymorphism is N
MGQKPSYLLLLVGLLAIAMLCAGPGHALRQLNDANGGGLELSLGSKAATAGAKTEPLDPSLSDDYEVCAVMGYGDGCFVAGGGRMAMALRWGCALLSGAGCGSCRRARGWVAGALWTLMF

SEQ ID NO: 4055 - protein, 660 aa, Zea mays
  VARIANT 595..660: note = Derived polymorphism lacks residues 595 to 660
  VARIANT 18: note = Ancestral polymorphism is G, Derived polymorphism is R
MSREAQKLDCAAGAGGIGVLSLDLLGQVLEHLREPRDRKTCRLVSRAFERAEAAHRRALRVLRREPLPRLLRAFPALERLDLSACASLDDASLAAAVADAGGGLAGLRSVCLARANGVGWRGLEALVAACPKLAAVDLSHCVTAGDREAAALAAASELRDLRLDKCLAVTDMGLAKVAVGCPKLEKLSLKWCREISDIGIDLLAKKCPELRSLNISYLKVGNGSLGSISSLERLEELAMVCCSGIDDEGLELLSKGSDSLQSVDVSRCDHVTSEGLASLIDGRNFLQKLYAADCLHEIGQRFLSKLARLKETLTLLKLDGLEVSDSLLQAIGESCNKLVEIGLSKCSGVTDGGISSLVARCSDLRTIDLTCCNLITNNALDSIADNCKMLECLRLESCSLINEKGLERITTCCPNLKEIDLTDCGVDDAALQHLAKCSELRILKLGLCSSISDRGIAFISSNCGKLVELDLYRCNSITDDGLAALANGCKRIKLLNLCYCNKITDTGLGHLGSLEELTNLELRCLVRVTGIGISSVAIGCKNLIELDLKRCYSVDDAGLWALARYALNLRQLTISYCQVTGLGLCHLLSSLRCLQDIKMVHLSWVSIEGFEMALRAACGRLKKLKMLCGLKTVLSPELLQMLQACGCRIRWVNKPLVYKD

SEQ ID NO: 4056 - protein, 385 aa, Zea mays
  VARIANT 297: note = Ancestral polymorphism is M, Derived polymorphism is T
MGEVGAGRLRCHSVGHQCPRLVHAVCSECTDTVGSQARRRRSRNNAASTARGICVSAFSNRQHRSRSRTKKRVRSFQLPPGATMLRHLQRSLRAIHYSPIIGRDAACNPIPLHRFWDSHIEHATRDFSTSTRLTGHPIYQQNELEPTTPVKLLSLEDSREAVYGTLDAWVAFEQDFPLASLKQALSVLEKEEQWHRIVQVIKWMLSKGQGNTMRTYELLACALEKDNRAEEAHRIWQNKVGHDLHSVPWRFCRLMLAIYYRNNRLDRLVKLFKELEACGRKPPSKDIVRKVEDAYETLGLLEDKKVLLDKYKDLYNKPSRDDRKKGSKSKKIESDKPSALLFCSQMVTVRKARWKHLRTLKTAVSLWMQNQMPLLRLITEPPTSP

SEQ ID NO: 4057 - protein, 107 aa, Zea mays
  VARIANT 95..107: note = Derived polymorphism lacks residues 95 to 107
  VARIANT 93: note = Ancestral polymorphism is E, Derived polymorphism is K
  VARIANT 78: note = Ancestral polymorphism is G, Derived polymorphism is R
  VARIANT 73: note = Ancestral polymorphism is S, Derived polymorphism is L
  VARIANT 68: note = Ancestral polymorphism is K, Derived polymorphism is N
  VARIANT 56: note = Ancestral polymorphism is L, Derived polymorphism is P
  VARIANT 33: note = Ancestral polymorphism is G, Derived polymorphism is C
  VARIANT 32: note = Ancestral polymorphism is R, Derived polymorphism is H
  VARIANT 30..107: note = Derived polymorphism lacks residues 30 to 107
MIWNNVYEKGLVDVMHDHKDNPKFKGQNGWNRGRWNSITTKFNEKFPLAHFSKQQLQEKERELKGYYKAIMDSRKESGVGWNDTLCMVLAELEVWPRLILVVCLPES

SEQ ID NO: 4058 - protein, 547 aa, Zea mays
  VARIANT 354..547: note = Derived polymorphism lacks residues 354 to 547
  VARIANT 105..547: note = Derived polymorphism lacks residues 105 to 547
  VARIANT 104..547: note = Derived polymorphism lacks residues 104 to 547
  VARIANT 91..547: note = Derived polymorphism lacks residues 91 to 547
MAGMRWGRWLGLVMAVWVQCISGNNYTFSNYSHALKTLMGLTQLQLNGLSVAKDVGKAFGLLAGLAYDRVPTWLLLTVGSLEGLLGYDAQWMVVSGAVAPLPYWQICVFLCLDGNSTTWMNTAVLVTCIRNFRRSRGPVSGLLKGYVGLSTAIFTDTCSALFTDDPTSFLVMLAVVPAAVCALTMVFLREGAAAVDDEDDGLCFAAINLLAVAIALYLLAADLTRLGTGAGSSLSPCSWCSSRPPLPCRRSWRGDRGDPTVSANADLEEADSLVAAAVPLLLMVKEARAPEERLWLGEEHTIAQTLTSLDFWLMFASFLMGVGTGLAVMNNLGQMDVAMGYIDVSLFVSMTSIWGFFGRIASGTISEHFIKFFTLSRTALTCASCYSAGTTNKTGPTTQSTYKHLSAELGAELGKTQKDLEGTKSALHDLEEKYNEAKSTIKEKEYVIFILLKSGGKGRIPSCTCSDDNEWSYKEKIEFTTYFAQEISEGLLFEMEDQIPSLAELIKFGSLLDFQQQCSERYRYKDEVQKNAMEILESKIGNWIHFM

SEQ ID NO: 4059 - protein, 656 aa, Zea mays
  VARIANT 362: note = Ancestral polymorphism is S, Derived polymorphism is F
  VARIANT 445: note = Ancestral polymorphism is T, Derived polymorphism is M
  VARIANT 493..656: note = Derived polymorphism lacks residues 493 to 656
  VARIANT 496: note = Ancestral polymorphism is S, Derived polymorphism is L
  VARIANT 563..656: note = Derived polymorphism lacks residues 563 to 656
MKGHQHQQQSSSPLLPMPPPSKRRCSALAAAVPALVVCSTLLPLVYLLALHRPAGYGSDDRAAVVISTELAGLGARGSRHLENGGAMKHKLLKDVSKKVSGSDGVSAERSTRSRFSQDHAAKSKAKLKGAFSLLGLNNDTFKGKGPRTSKRFQLKDLSWRSKDTTVNGKENHDQETVHEENTKSCEHEYGSYCLWSTEHREVMKDAIVKKLKDQLFMARAHYPSIAKLKQHEAFTRELKQNIQEHERMLSDTITDADLPPFFAKKLEKMEHTIVRAKSSEVGCSNVERKLRQLLDITEDEAYFHTRQSAFLYHLGVQTMPKTHHCLNMRLTVEYFKSGSNHVDQLNDQKLESPALHHYVMFSRNVLAASTTINSTVMNSQDSDHIVFHVFTDAQNFYAMKYWFDKNSYLESTVRVTNIEDNQKLSKDVDSLEMQQLWPTEEYRVTIRNHSEPFQRQMKTKYISIFGLSHFLLPDLLPGLNRVVVLDDDLIVQKDLSPLWNLDMGGKVIGAVQFCGVRLGQLKPYIADHNVDDDSCVWLSGLNVIELDKWRDTGITSLHDQSVQKLRKDSLKSQRLQALPAGLLAFQDLIYPLEDSWVESGLGHDYGISHVDIEKAATLHYNGVMKPWLDLGILDYKNYWRKYMTSGEKFMTECNIH

SEQ ID NO: 4060 - protein, 171 aa, Zea mays
  VARIANT 40..171: note = Derived polymorphism lacks residues 40 to 171
  VARIANT 49..171: note = Derived polymorphism lacks residues 49 to 171
MAEEASAPAAGTEAPPGKMTMVVGVDESEHSFYALQWALQHFFPPGQPQQYRLVVVTAKPTAASAVGLAGPGAADVLPYVEADLKRSALRVVEKAKGLCTQASDAVFEALEGDARNVLCEAVERHGAEMLVVGSHGYGAIKRAVLGSVSDYCAHHAHCTVMIVKKPKQHKH

SEQ ID NO: 4061 - protein, 237 aa, Zea mays
  VARIANT 166: note = Ancestral polymorphism is D, Derived polymorphism is A
  VARIANT 33: note = Ancestral polymorphism is F, Derived polymorphism is S
METMSALARTAPPLAGTIRRPSCALRPTASLSFAAASTTPRGRLGLGLSTAPAGSGRAARARAVPRRIVASSVGLPCIFGLTSFNLLEVEQSYIMIKPDGVQRGLVGEIISRFEKKGFLLKGLKLFQCPKDLAQEHYKDLKDKPFFPKLIDYITSGPVVCMAWEGDGVVASARKLIGATNPLQAEPGTIRGDLAVQTGRNVVHGSDSPDNGKREIELWFKEGEVCQWESVQAPWLIE

SEQ ID NO: 4062 - protein, 299 aa, Zea mays
  VARIANT 215: note = Ancestral polymorphism is R, Derived polymorphism is C
  VARIANT 220: note = Ancestral polymorphism is I, Derived polymorphism is T
  VARIANT 231: note = Ancestral polymorphism is A, Derived polymorphism is V
  VARIANT 234: note = Ancestral polymorphism is G, Derived polymorphism is S
MAPPAAAVAAVHHRSPHLLLRRGGGGLLPSPSGPATLPFSSRGAACTPARLRLPPPRFSLSPVPKSLSAASSSHVPVRSLFTGIVEEVGRVRRLGPPLTPSGGGGGGEAPGLDLEVETKNLLAGTQLGDSVAVDGACLTVAAIDPAASTLTFGVAPETLRRTSLGGRAPGDGVNLERALTPSSRMGGHFVQGHVDGTGEIAAFRPDGDSLWVTVRAPPEILRLLVPKGFVAVDGTSLTVVSVDDEGGWFDFMLVRYTQDNIVLPTKKVGDKVNLEADILGKYVEKLLAGRVEAMAKVDS

SEQ ID NO: 4063 - protein, 499 aa, Zea mays
  VARIANT 401: note = Ancestral polymorphism is S, Derived polymorphism is L
  VARIANT 242..499: note = Derived polymorphism lacks residues 242 to 499
  VARIANT 106..499: note = Derived polymorphism lacks residues 106 to 499
MEPDPVAARASSSPPPYPASATSPPWQTRVENAEVGSEVEQEEPKKEAMAGVGETLRSFMKEFGDQGEDSIILSPWLKEISTPDRPTALRFLGEKYNNLMERYKKQVVKCSEECEPRYNALKKKYTDKCVERRRLYNELIELRGNIRVFCRCRPLSSNEVNRGCLSVVEIDPSHKTELQFVLNEKEKKPFKFDHVLGPEDGQGVQFAIGTLATFVNCKTISQRERTCHFGRMVVTGRGHVTLVGDFYLPSYFSAEQFFTGEYISEIHFFFEAIVYRLRKDNEKAKDAFEKASKGQEMISSPWDVAKHMESAAALAKELGCWNEVSDFYHRASELYRECGRPQPASDALAKGASVLEEKSPEEAIKMYDEACSVIEEDGKEQMAFDLYRAAAALYIKMEKYLDAAALFLRLGLAADKCNAINSQCKAYLSAIIIYLYAHDFQQAQECYNDCSEVQAFLNSDQNRCATKLLSAYEEGDAEEIKHIAQSSAFNHLDHVAKSQ

SEQ ID NO: 4064 - protein, 954 aa, Zea mays
  VARIANT 15: note = Ancestral polymorphism is G, Derived polymorphism is D
  VARIANT 145: note = Ancestral polymorphism is D, Derived polymorphism is Y
MAMAAAVLEEALRWGGGSVGDDNVAARRAEEAAIRRHEAASWLRKTVGIVCAKDLPEEPSEEEFQLGLRNGIVLCNALNKVQPGAIPKIVGVQSDTAVPADGSALCAYQYFENLRNFVVVIQDFGLPTFEVSDLEKGGKSVRIVDCVLALKSFSESKKTGRQAACKYGGILKPLVSGNYFILKNCDAFMNKNARIHTEEATLNGFRGEQNLSLDCSPESYEITSDNLSTIIRTILLDKKPEEIPLIVESLLNKVIQEYELRFANQNLMDEEKQNNLTTKEEASFAVNGSNAAQKFHLKAEINFDLQHKQIKGLRGTVSSIKSGMEQLKLHYSEEFTKLGKHLYTISNAASGYHKVLEENRKLYNQIQDLKGNIRVYCRVRPFLPGQISSLSSVAGMEERTITIMTPTKYGKDGNKSFTFNKVFGPAATQDEVFSDMQPLIRSVLDGFNVCIFAYGQTGSGKTYTMSGPKVLTEESLGVNYKALNDLFNLQAQRKGTIDYDISVQMIEIYNEQVRDLLQDSGNRRLEIKNTSQKGLAVPDASIVPVTSTSDVVELMNQGQKNRAVGSTAINDRSSRSHSCLTVHVQGRDLTSGTVLRGCMHLVDLAGSERVDKSEVVGDRLKEAQYINKSLSALGDVIASLSQKNTHVPYRNSKLTQLLQDSLGGQAKTLMFVHISPELDAAGETISTLKFAERVASVELGAAKQNKEGSEIRELKEQIASLKAALAKKEGEPENILSTRSSPSIYRIRKGNATPATPKDRQPMEEVGSLEVQNVFTPAQKRSKMHLLGILTENNSSNSVQNCNVPQKEIGLGGWVDKMALGDNHFENSNSILELEPDTAQLPTSFYHQRYSPVQQSCRTESVPSLGLHGFDSATSCSNQEIVVSTMGLKASGVANRGASTVKKYEATSTRSTNLASKSPLLQKKLQTPTRNRNQLTSSTIGGRRTPNGKIGIAK

SEQ ID NO: 4065 - protein, 75 aa, Zea mays
  VARIANT 45: note = Ancestral polymorphism is S, Derived polymorphism is L
MGCFHSMAKQQHPSYKDPVHLASQTAFSVSEVEALFELFKSISGSVIDDGLINKVDNRDSSVPKVTPEEAAKLCD

SEQ ID NO: 4066 - protein, 700 aa, Zea mays
  VARIANT 52: note = Ancestral polymorphism is R, Derived polymorphism is L
MLSLPLRRRRRLLRFCARRNPTFLRLSIAASAAALSTAPTVASAVVTPISDRLRVLRSLHAVAPDHLLSHPLPSSAHICLAAHLAARARLFAHSRRLLSRLLGAGHRPHLAASLVDILHRAALALGPHRSALPSVFDTLLSLLADHGLLDDAVRALARVRQLRVPPNTRTCNHILLRLARNRQGGLVRRLFEHLPAPNVFTFNIVIDFLCKQGELVEARALFVRMKAMGCSPDVVTYNSLIDGYGKCGELEEVELLVSEMRKSGCAADVVTYNALINCFSKFGWIEKAYSYFGEMKRLGVMANVVTLSTFVDAFCKEGLVREAMKLFAQMRVRGMMPNEFTYTSLVDGTCKAGRLDDAIVLLDEMVHQGLVPNVVTYTVMVDGLCKEGKVAVADDVLSLMERAGVKANELLYTTLIHGHFMNKNSERALDLLNEMKNKGMELDVSLYGTLIWGLCKVQKLDEAKSLLHKMDDCGLRPNTVIYTTIMDAFFKAGKESEAVALLHKIPDSGLQPNVVTYCALIDGLCKAGSIYEAISHFDKMRELGLDPNVQVYTTLIDGFCKIGSLSKAVHLMNEMVDKGMSLDKVVYTSLIDGHMKQGDLQGAFALKAKMIETGLQLDLYCYTCFISGFCNMNMMQEARGVLSEMIGTGITPDKTAYNCLIRKYQKLGNMEEASSLQNEMESVLSSCTEEDTASGSGCET

SEQ ID NO: 4067 - protein, 157 aa, Zea mays
  VARIANT 34: note = Ancestral polymorphism is T, Derived polymorphism is A
MILATSTVSTFVKYIFYVSDMLMEGQWEKKAVYTFYLVHELYVTFRNFRIRITDYVRYRKITSNMNERFPDATSEELDVSNATCIICREEMATAKKLLDGHLFHVHCLREIGEQAEEEVPLRLLHGSFSSTGRILSTGTVPCCLPQCARLLYINSQQ

SEQ ID NO: 4068 - protein, 315 aa, Zea mays
  VARIANT 73..315: note = Derived polymorphism lacks residues 73 to 315
  VARIANT 75: note = Ancestral polymorphism is A, Derived polymorphism is V
  VARIANT 234..315: note = Derived polymorphism lacks residues 234 to 315
  VARIANT 256..315: note = Derived polymorphism lacks residues 256 to 315
  VARIANT 287..315: note = Derived polymorphism lacks residues 287 to 315
MAAVNLLAESVAVRLRAPAPPGAGEELAARLTECGFPATARRGGAAASAGESARKWREMAARKEELLLRSRDRVVFALPKSGTDMLELERYKDGNDLDDVKQIVVSFIQLAKRLGNPRYIFERNGAAAQDSLDISQYSFDTKLKKKQNKTRANLVAAGADNSSRAFDLEIKRSLSKLKKKDVCSGSETSDDDGYSEGDETESETTVSDTESDFDVNSGAWDLKGNGLKLTEHGESVIDDRILGARMTKRKSIESSQLVTHPIDEILYWHNAVPRELSDIAGFNMRLQFIADVRIFHRHILVPSTLVQSAANPWEI

SEQ ID NO: 4069 - protein, 171 aa, Zea mays
  VARIANT 61: note = Ancestral polymorphism is E, Derived polymorphism is K
  VARIANT 51..171: note = Derived polymorphism lacks residues 51 to 171
MEQAFKSMMTQAPPNSFGSNSSFPFGMPQQAYPTAPSSFSYLELKKDTSPQVSTVDVSATEVDAAGTSKEVDVTETPKPSKKFAFVDVSPEDLRQKDLQSSLEMVDVKHDSTESETKEDTEEKAPTNGVTFKLNEDAARGPTESSQSGPMLSVETIEKMMEDPAVQKMVYP

SEQ ID NO: 4070 - protein, 298 aa, Zea mays
  VARIANT 245: note = Ancestral polymorphism is G, Derived polymorphism is V
  VARIANT 219: note = Ancestral polymorphism is I, Derived polymorphism is T
  VARIANT 23: note = Ancestral polymorphism is G, Derived polymorphism is E
MAPPAAAVAAVRHHSPHLLLRRGGGGLLSSPSGPATLPFASRGAASAPARLRLPPPQFSLSPVPKSLSAASSSHVIVRSLFTGIVEEVGRVRRLGPPLAPSGGGGGEALGLDLEVETKDLLAGTQLGDSVAVDGACLTVAAIDPAASTLTFGVAPETLRRTSLGERAPGDGVNLERALTPSSRMGGHFVQGHVDGTGEIVAFRPDGDSLWVTVRAPPEILRLLVPKGFVAVDGTSLTVVSVDDEGGWFDFMLVRYTQDNIVLPTKKVGDKVNLEADILGKYVEKLLAGRVEAMAKVDS

SEQ ID NO: 4071 - protein, 101 aa, Zea mays
  VARIANT 28: note = Ancestral polymorphism is R, Derived polymorphism is M
  VARIANT 73: note = Ancestral polymorphism is D, Derived polymorphism is Y
  VARIANT 77: note = Ancestral polymorphism is A, Derived polymorphism is V
  VARIANT 78: note = Ancestral polymorphism is A, Derived polymorphism is T
MAGLEDDDASHNMPHSPCTKGIIQHFVRLVKTHMEGLDNDVQVTNEKMGQLEATQIDTNTKLANVEVIVAHIDKSLATLLRRFDEMHANTNRGHEESVEDN

SEQ ID NO: 4072 - protein, 942 aa, Zea mays
  VARIANT 367: note = Ancestral polymorphism is R, Derived polymorphism is C
MDRSINFRGIAGSAGNIMQGMGKFVFGNEGIESKEDSYVERYLYRISNGTIPDDRRSAMTELQSLVAESRSAQMSFGAMGFPILLNILKEDREDVELVRGALETFVSALTPIETSQGPNTEVQPASVNSDLLSQETENISLLLSLLSEEDFYVRYYTIQLLTALLTNSLKRCPVTRSNSIDSSWYNSSHGHAYGPCSPLVNVAYFCYTLQVIRNEALLLLTYLTRDAEEIQKIVVFEGVFEKIFSIIREEGYSDGGVVVQDCLELLNNLIRHNASNQMLLKETMGFDPLISILKIRRGSAFNFTQQKTVNLLGALNTVELLLMGGPSGEAGKDANKNANQTALAQKNILDHLLLLGVESQWAPVVLRCMALRCIGNLVLRNPQNLDSLARKQVGEEPHVQPALNAIFSIILRTSVAQEFVAADYVFKCFCERNPNGQALLASTIVPHPNQGNMHEPAIDMPFGSVLLQALVSSDVNGDMEACCRASSVLSHIVKDNMQSKDRVLQIQLETLTPSLGRTEPVLHRIVTCLSIAASTEGENNQNNQPEEPYIQPVILRLLIIWLVDCSNAVNCLLESAVHLNYIIELASSKRYTACVRGLAAVVLGACILYNASHEKGRDAFAVADAISQKIGLTTYFLRFDELRRSLAHPLPEQHHRKELSRSSANSMSDFQEIEEDETNKDDQHPVLSEIFDSQFVNFLSKLEADIRENIMDIFSRTKTATALLPTELEQKNGEVDGEYIKRLKSFVEKQCNEMQDLLARNAMLAEELVRTGGGTTTDTSQRPNNGRERVQIEALRQELEGARRQIEALETDKSQIEAEANNQRNLAVKLESDLKSLSEAYNSIEQANYRLDAEVKTLRQGGSVPYPDVEAIKAQAKEEAEKDSEAELNDLLVCLGQEQTKVEKLSTRLAELGEDVDALLQGIGDDTAIPDDDDDDDEDSEE

SEQ ID NO: 4073 - protein, 1044 aa, Zea mays
  VARIANT 65..1044: note = Derived polymorphism lacks residues 65 to 1044
  VARIANT 433..1044: note = Derived polymorphism lacks residues 433 to 1044
  VARIANT 573..1044: note = Derived polymorphism lacks residues 573 to 1044
  VARIANT 733..1044: note = Derived polymorphism lacks residues 733 to 1044
MELALGAMASLAPKLGDLLMEEYVVHKGLKPDIESLSDELVMMNAALLDASRIPPDQLTAVEKLWARKVRDLSYDMEDAIDDFILRVAGGDNSATDSKLLKKILVKVKDVMSIKKLKDRRQISDKVKDIKKLSSELAELRAKYTVRGAGADLAASIGIDPRVINLYKKESDLVGIQESRDKVIRMLSLGTKYDDAHASHQDLKIVSIVGVGGLGKTTLAKTVHDMLKKQFSPSAFISVGRTPNLNRTFEKILVELDAKYKQVDMTRWDLEQFGKELHEFLQNKRYLIVVDDIWDVGSWEAIRYGLKNNNCGSRIIMTTRNFELVTKVEEVYRLKPLSNENSKKLFYKRIQSQEGESLDDELSTEIIDKCGGIPLAIIAIASLLVERPCEEWSKVYHSISLGNGDNTTKILSYSYYDLPSYLKPCLLQLSIFPEDYQFDTNAAIWMWIGEGLVHLEKEEGSLFVVGERYFKELVNRSMIQPIEDKYDRLVEVFRIHDIVFDLIRKLLKDEDFITLLDSGGQHSPQASLRREKKTCVPRSDCKLRRLAVRNHHVQRFPEDIMDIPEALRSLNIIYCNIAIMTPLHSFRVCRVLCIEYSYVPISLKHLGKLLHLKYLELYGTPVDELPKEIGHLRSLQTLLLVNTGLDELPPAVCSLTRLMCLMAEGFKRLPADKMGNLTSLEELRLESIVGQSATQALVAELGKLTRLRVVNITFSEELEESLQEALVQSLFNLWGLQELALSSKWSQQGSAMWGDWEPPRQLRRLIIKGIIFSRQPRWINRSCMAHLCFLSLAVHAVEAQDLDNLARLPELRYLKLDGVSWPPRYDTGPDDFRNLRFCDVGTMLVFHMGAMPRLEELVFGVCAGYWSWEHNGVLLEQCPTMDVIEDLDLGLDNLLSLEQVTVVVDCSGATAAKVQEVEAVVMRAMENHANRPTIKMERVCENFILSDKEQEDLLQRRIEKEGRLLEFKDKSDAFFITFLRLLRHPLKSVISHDCAGASMCEVQKVEPAWRHAAEVHPNHPSIELIRKNNDEIASSSDHPNTELRN

SEQ ID NO: 4074 - protein, 765 aa, Zea mays
  VARIANT 159..765: note = Derived polymorphism lacks residues 159 to 765
MSCPAFFFLLFFFRSKGDPSDPLNSSRSSVGPSKHLSLPNGNDATMTSVSGHADDLSYRCSSDTFDPQGRTFDISENWTVLSTEGDKPIPRFYHAAAIVSSKMVVFGGDSGNRLLDDTKVWSLLFPYICCLDLDCCLSFGCFGMNFTYSINVFLLEAGYVMLLWKIVCWTLCLTYLHFDIIQNSKYYKSMIYHSKKAMIVHDDGLFVCTALLLEKYLYMCDVQVPWGNSVILVGGKTEPASDHLSVWTFNTETELWSLIEAKGDIPAARSGHTVIRAGATLILFGGEDTKGKKRHDLHMFDLKSSTWLPLNYKGTGPSPRSNHIATLYDDRVLLIFGGHSKSKTLNDLYSLDFDTMVWSRVKTHGPHPSPRAGCSGTLCGTKWYIAGGASKKKRHAETWVFDVLQCKWSVCVVPPSSSITTKKGFSMVPFYHKDKIALIAFGGNKKEPCNKVEVLVVLQNEHSFSWRSAPEVDTMVYEYSPSNKELADHLHKCAPLYSNSSIARHSLTSVIEHPPRREPLSESLLKQSSLGTSLHTQLDHAEECSLGQKLQKPIDDDRYDDVDDSSSCQDSTPKGPYSKRTGPGFQNGAENMVTGGSKVRRIARCSSDVGQSHLYNTKIADLIRRNTTLEDQLATALASKDQLDKSLASVIHSRGQLEKMLANKDKEAEMLKEKIACLELAQEESNSLSNTVHADNVRLEREVAFLKAVTGETQKARKLDELHSTRRVLAGEQSRAFQLQVEVFHLKQRLQILEGRSGTPNKQPL

SEQ ID NO: 4075 - protein, 104 aa, Zea mays
  VARIANT 90: note = Ancestral polymorphism is G, Derived polymorphism is A
  VARIANT 10: note = Ancestral polymorphism is T, Derived polymorphism is M
MAERVSRLSTEKAVVIFTTSQCPMCHTVSSLFSELGVCAAVHELDKDPRGRDMERDLARRLGRAPPVPAVFIGGRLVGSTDKIMSLHLAGKLVPMLKGAGAIWL

SEQ ID NO: 4076 - protein, 104 aa, Zea mays
  VARIANT 21: note = Ancestral polymorphism is C, Derived polymorphism is G
  VARIANT 8: note = Ancestral polymorphism is A, Derived polymorphism is V
MDRVMQLVSERAVVVFTLSSCCMCHTVTQLMADLSVNALVHELDSDPRGKDMERALLKMLGGRAPAVPAVFIGGKLVGGTNNVMSLHLGGELVPMLMNAGALWV

SEQ ID NO: 4077 - protein, 72 aa, Zea mays
  VARIANT 34: note = Ancestral polymorphism is A, Derived polymorphism is V
  VARIANT 35: note = Ancestral polymorphism is M, Derived polymorphism is T
  VARIANT 39: note = Ancestral polymorphism is G, Derived polymorphism is R
  VARIANT 42: note = Ancestral polymorphism is W, Derived polymorphism is C
MEDGGADTMGVVNGILQEVDTDKDGKISYEEFVVTMKTGTDWRNASQHYLRGGFNSISIKLIKHGSVKLGSK

SEQ ID NO: 4078 - protein, 105 aa, Zea mays
  VARIANT 100: note = Ancestral polymorphism is G, Derived polymorphism is S
  VARIANT 84: note = Ancestral polymorphism is M, Derived polymorphism is L
MAKRVSRLSKKAVVIFTTSQCPMCHTVWSLFQELGVCAAVHELDKDPRGPEMERELARRLGRAPSVVPAVFISGKLVGSTDKIMSLHLDGKLVPMLKGSGWDIWL

SEQ ID NO: 4079 - protein, 104 aa, Zea mays
  VARIANT 82: note = Ancestral polymorphism is R, Derived polymorphism is G
MERVMKIASERAVVVFTLSSCCMCHTVTRLMADLGVNALVHELDSDPRGKDMERALLKMLGGRGPAVPAVFIGGKLVGGTNRVMSLHLAGELVPMLKSAGALWL

SEQ ID NO: 4080 - protein, 418 aa, Zea mays
  VARIANT 30: note = Ancestral polymorphism is F, Derived polymorphism is S
  VARIANT 101: note = Ancestral polymorphism is R, Derived polymorphism is S
  VARIANT 287: note = Ancestral polymorphism is Y, Derived polymorphism is N
  VARIANT 312: note = Ancestral polymorphism is S, Derived polymorphism is R
  VARIANT 369: note = Ancestral polymorphism is Q, Derived polymorphism is L
MAPPHFCGGRLDRRLLLAAANDDLRGFKRSARALDGGKGRIREAVETAAMISAAAALGALHVAAANGSTRVCAYLVEELEMDVNATAVGSVRSKKNVDAVRYLLDHDADPNKRVHHGCTPLTIAVGKGICVMVELLLSKGADVNILSCCGTPLHVAAMENQGAVMKILLDNNADCNKEVPPMFTPLFTALKARSLSCVKHLIKAGADVMKGVHKCTPLILAANEGLTDFYECLLEAGADPNVPDDSGLLPIEIAAFKNRRKDVEILLPVTSRIPSVHDWSVDWLIAYVKSLSTDEDDPVYKMNLADLKSEASKAYNEKDYPTAVKFYSVAIKNVDSFDATLFSNRSLCFIKMGKGLSALLDAEACRLLLPYWPEGCFRQGSAHMLLQNYEDACDAFLDGLKLDPADAEMEEALKYCLF

SEQ ID NO: 4081 - protein, 202 aa, Zea mays
  VARIANT 137..202: note = Derived polymorphism lacks residues 137 to 202
MKRKPPHPRSGDDSPAGERGSDGGLKKGKGGGRWGGGSRRRNDQRLGGGGGGALSLAAFASAKSRTSGYNPALIKKQKEFYKNAKLISKYKKTKKQQSQSNNHPEIPVHEDGGDTVRYVAKPHHKGKKHPVHSLKEEYEKKRAEEEKAKEERDAMVQAKREHREKSEAKRKELREKMFKKTRSGQPVMRYRIEHLLETALSK

SEQ ID NO: 4082 - protein, 349 aa, Zea mays
  VARIANT 126..349: note = Derived polymorphism lacks residues 126 to 349
  VARIANT 7: note = Ancestral polymorphism is R, Derived polymorphism is W
MLTVLVWRMGPYLPLLHHVLLLEQAYLAIYSATLALTATATGLEPPRFIHAASPAAYAWTHAAQSLDFMAYLVLQMVDLVVVFSGTTSPEDDDNGTPPRPSGSRRWWSASPPACTAMSPSSTAPRQGPHPAPTGACTLKWDMTTVMEYKGLPLQQVVDYYKQKPTRRSAMAGEGGGRLPLDLSLATAGPSAGERRPRARPNRRTLSSLYAELGAMLPNLPIDRPASKEEIVDAAAARVKVLEDTVAVLETYHSVRSPLHGAGAGAGAAAARRPEVSVAVGAVCFCARLPARSPGSLTRVLEAFHRRGVEVLVATVGPHGHGGAAVVTVTAAAAPPEVLQMIRADITGIC

SEQ ID NO: 4083 - protein, 143 aa, Zea mays
  VARIANT 104: note = Ancestral polymorphism is E, Derived polymorphism is G
  VARIANT 89: note = Ancestral polymorphism is P, Derived polymorphism is R
  VARIANT 85: note = Ancestral polymorphism is A, Derived polymorphism is D
  VARIANT 81: note = Ancestral polymorphism is G, Derived polymorphism is R
  VARIANT 25: note = Ancestral polymorphism is G, Derived polymorphism is S
MAAALKDAFPAQPARDRPPVSPALGPYRVNLMALCKEINARTQRYKPDTPIRVTVTVYRDSTFQLVVKPPSVSWLLKKAAGIQTASRFPGHVTAASLTVRHVYEIARLKLGDDPSCKYASLEAMCKSVVATARSMGIAIVRDL

SEQ ID NO: 4084 - protein, 501 aa, Zea mays
  VARIANT 296: note = Ancestral polymorphism is L, Derived polymorphism is V
MEMPFLVNQMMDLADPQQQQRLIAGAALLLATAAFLRLLLGSRSGGGKRLPPTIPGAPVVGGLVKFMRGPIPMIREQYARLGSVFTVPIITRRITFLVGPEVSAHFFKGNEAEMSQQEVYRFNVPTFGPGVVFDVDYSVRQEQFRFFTEALRANKLRSYVDQMVAEAEEYFSKWGESGTVDLKYELEHLIILTASRCLLGREVREKLFDDVSALFHDLDNGMQPISVLFPYLPIPAHKRRDRARARLAEIFATIIKSRKASGQSEEDMLQCFIDSKYKNGRSTSEGEVTGLLIAALFAGQHTSSITSTWTGAYMLRFKQYFAEAVEEQKDVMKRHGDKIDHDILAEMDVLYRCIKEALRLHPPLIMLLRQSHSDFTVTTKEGKVYDIPKGHIVATSPSFANRLPHIYKNPDSYDPDRFGPGREEDKAAGAFSYISFGGGRHGCLGEPFAYLQIKAIWTHLLRNFEFELVSPFPENDWNAMVVGIKGEVMVNYKRRKLVVDN

SEQ ID NO: 4085 - protein, 140 aa, Zea mays
  VARIANT 35: note = Ancestral polymorphism is M, Derived polymorphism is R
  VARIANT 36: note = Ancestral polymorphism is T, Derived polymorphism is A
  VARIANT 45: note = Ancestral polymorphism is S, Derived polymorphism is R
MAHSLAASFSPAAARRQVTNVIPSWTSVSFQSHRMTSVSIRSRQRSLGFKICCSAKKETVDKVCSIVKEQLALPDGTAITAESKFAELGADSLDTVEIVMGLEEAFNITVDETSAQDIATVQDAADLIEKLMLEAPPKVV

SEQ ID NO: 4086 - protein, 182 aa, Zea mays
  VARIANT 124: note = Ancestral polymorphism is R, Derived polymorphism is P
MLSSTSLAALLHGRPHYPFRPSKAHLFLALPNNPTRFLASASVRVAYPPRWHLRAADGERDNRVQELRVPDSWLTPAGATQRNLPPFFADRQESEWLRETLRKWLDDEYCPEPANVDISSTAARSYRESLIAGQSDLGEILLRMVGDLDKLSYRESFHGPFSAANAAVRLIAQRMEESLPDE

SEQ ID NO: 4087 - protein, 180 aa, Zea mays
  VARIANT 161: note = Ancestral polymorphism is H, Derived polymorphism is P
  VARIANT 145: note = Ancestral polymorphism is V, Derived polymorphism is A
  VARIANT 107: note = Ancestral polymorphism is G, Derived polymorphism is R
  VARIANT 101: note = Ancestral polymorphism is S, Derived polymorphism is P
  VARIANT 68: note = Ancestral polymorphism is M, Derived polymorphism is I
MASPAARLASPPIAPDTYDCVRTFECGMVMTCLVVMDGFRSPPHGHKYLVGSSASQALLGGDMAQINIEKAERVLGKVATAHRPPAEDSRPPETITDEERSMFRKLGLRIKAFLLLGIPLMKKLCHHNILLFIGAFMPPQRHCIVTEFLPWYVPTLCTSIHVRERLLLCDISSLFHIYMS

SEQ ID NO: 4088 - protein, 579 aa, Zea mays
  VARIANT 142: note = Ancestral polymorphism is S, Derived polymorphism is F
MATAMSVSAVSPPAAAVTRPRTMVCVPATARAPREMAAELAAAAALGADVAELRLDCLAGFAPRRDLPVILAKPRPLPALVTYRPKWEGGEYEGDDESRFEALLLAMELGAEYVDVELKVADKFMKLISGRKPDNCKLIVSSHNYETTPSSEELANLVAQIQATGADIVKIATTATEIVDVAKMFQILVHCQEKQVPIIGLVMNDRGFISRVLCPKYGGFLTFGSLKKGKESAPAQPTAADLINLYNIRQIGPDTKVFGIIGKPVGHSKSPILHNEAFRSVGFNAVYVPFLVDDLAKFLDTYSSPDFAGFSCTIPHKEAAVRCCDEVDPVARDIGAVNTIVRRPDGKLVGYNTDYVGAISAIEDGIKASESEPTDPDKSPLAGRLFVVIGAGGAGKALAYGAKEKGARVVIANRTFARAQELANLIGGPALTLADLENYHPEEGMILANTTAIGMHPNVNETPLSKQALRSYAVVFDAVYTPKETRLLREAAECGATVVSGLEMFIRQAMGQFEHFTGMPAPDSLMRDIVLTKTYKQYTISTMFKSSYSSHQGCKDLDDYKFRAIASSLDNPNTMKPRL

SEQ ID NO: 4089 - protein, 354 aa, Zea mays
  VARIANT 25: note = Ancestral polymorphism is V, Derived polymorphism is I
  VARIANT 67: note = Ancestral polymorphism is V, Derived polymorphism is L
  VARIANT 94: note = Ancestral polymorphism is G, Derived polymorphism is E
MARSCIMTATAPPPLVGAGVRLLAVVVAMLVVAGGGGGGGCCHGALLKAHFYRHSCPAAEAVVRDIVLARVAADPAKLPPKLLRLFFHDCFVRGCDASVLIDSTPGNTAEKDAAPNGSLGGFDVIDTVKAVLEAVCPGTVSCADIVALAARDAVSFQFGRDLWDVQLGRRDGVVSRASEALANLPSPSNNFSTLEAIFSSKGLDVKDLVILSGAHTIGVAHCNTFAARLSGSTTSAPGGGADPALNAAYAAQLRARCGPASTASSNNVTAVPMDPGSPARFDAHYYVNLKLGRGLFASDAALLADRRAAGMIHRLTRQGYFLQEFKNAVRKMGRVGVRTGAARGEIRRNCRAVN

SEQ ID NO: 4090 - protein, 67 aa, Zea mays
  VARIANT 4: note = Ancestral polymorphism is T, Derived polymorphism is A
  VARIANT 19: note = Ancestral polymorphism is R, Derived polymorphism is H
  VARIANT 25: note = Ancestral polymorphism is A, Derived polymorphism is V
  VARIANT 26: note = Ancestral polymorphism is C, Derived polymorphism is F
  VARIANT 28..67: note = Derived polymorphism lacks residues 28 to 67
  VARIANT 30..67: note = Derived polymorphism lacks residues 30 to 67
  VARIANT 42: note = Ancestral polymorphism is R, Derived polymorphism is C
  VARIANT 45: note = Ancestral polymorphism is V, Derived polymorphism is M
  VARIANT 56: note = Ancestral polymorphism is A, Derived polymorphism is T
MASTKVQRIMTQPINLIFRFLQSKACIQIWLFEQKDLRIEGRIIVSFLALFLVQTAKLSTSNYLLVP

SEQ ID NO: 4091 - protein, 136 aa, Zea mays
  VARIANT 16: note = Ancestral polymorphism is V, Derived polymorphism is L
  VARIANT 99: note = Ancestral polymorphism is G, Derived polymorphism is V
MSSGGGRGKPKGSKALSRSTKAGLQFPVGRIARYLKAGKYAERVGGGAPVYLSAVLEYLAAEVLELAGNAARDNKKNRIVPRHIQLAVRNDEELSKLLGAVTIAAGGVLPNIHQTLLPKKAGGKGKADIGSASQEF

SEQ ID NO: 4092 - protein, 237 aa, Zea mays
  VARIANT 175: note = Ancestral polymorphism is P, Derived polymorphism is L
  VARIANT 173: note = Ancestral polymorphism is S, Derived polymorphism is L
  VARIANT 172: note = Ancestral polymorphism is F, Derived polymorphism is S
  VARIANT 152: note = Ancestral polymorphism is S, Derived polymorphism is L
  VARIANT 149: note = Ancestral polymorphism is L, Derived polymorphism is S
  VARIANT 111: note = Ancestral polymorphism is G, Derived polymorphism is R
MVRRRPATGAAPRPHLAAVGRGLLLASVLAAAASSLPVAESSCPRGAPPPFPDFLKLSNLSLSLSSRSQCTDDILMYPDNSLVRDISRMQQRNYGREGFSHITVTGALAHGTKEVEVWLQTFGPGQRTPIHRHSCEEVFIVLKGKGTLLLGSSSLKYPGQPQEVPVFQNTTFSIPVNDPHQVWNSNEHEDLQVLVIISRPPVKIFIYDDWSMPHTAAKLKFPYFWDEDCLPAPKDEL

SEQ ID NO: 4093 - protein, 644 aa, Zea mays
  VARIANT 64..644: note = Derived polymorphism lacks residues 64 to 644
MSSPTSPWFADLFADDRVRTLSHQVSTLGDRVWELEHKITQLMGEKAKLEKQLEEAKAISSHKEEVGRSLKAENDKLQSEVLVAEEKCSKSAAEVERLTKELGALAEAKEAAAKEFNDEKEKITLESEDLKMRLEEMLAIKDLTESENDKLRSEALIAAEKQNMSEAEIERLKKELSGLLEAKEAAAKAFDVQKAEITNELEELQRKLKEIEANKDLVEGENSKLQSEILTAQEKYRQSEAEVKCIKQVVCSVVEAKEAAARASEAEKAEIMEEMDNLKRTIEEIKANRDLVESQNQELRSKISSAEQERSLFEGEIKSVRMELGAVEEAKQILTREFDAEKAEILKELDDLEKKLEELQTNKGLLEAENDKLQLEVLTAQHKQSMSEAEAESLKMELGALVEAKEAATKAFGAEKAKTTKELEDLKRKVEEIQTKKDLVEGEKDKLRLEILIAEQRHAMAELEVKRLKMDLAASAEARETVVRSCDAEKAKFMAEIENLRRKIEEIHASKEAAEKAARNKDAEADRLKDELARIRLSVSQLQASCDELDAKQSRLNDEKNSVQKALVSEKVEGNKLKLKIEELENHIAGKDGEKGKLKAALEEKMTEINALSKDNAMLHRTILEAQEKNKGSILSFLSPCGSK

SEQ ID NO: 4094 - protein, 300 aa, Zea mays
  VARIANT 76: note = Ancestral polymorphism is E, Derived polymorphism is K
  VARIANT 12..300: note = Derived polymorphism lacks residues 12 to 300
MEAEVKAKLEEQEVLSAKKAEVDSRVQILELAAANNLPTFKLYSTNNTIYSTKYCKSSSLANVQVPRVELSALVKEKESTAKTFDAEKARITTGIQLIPIGLEPTGITNSRRSELVNRLKNKVEEIRADKETTEGATHEKDAHASKMRAQLKDLQAWMSRLQACCDDLNTQRSHLHDEKNSVVKSLNVEKDEVAKLRLKIEELENYNGEKDGDIRKLKAALDEKKGKIDTLGKEIELLQLVVAEDQKKGGIWTCLYAATTTMVAAISFIYATRSNLRTAFFHFSFIFLYALCSLYPLNNV

SEQ ID NO: 4095 - protein, 252 aa, Zea mays
  VARIANT 190: note = Ancestral polymorphism is P, Derived polymorphism is H
  VARIANT 188: note = Ancestral polymorphism is S, Derived polymorphism is L
  VARIANT 187: note = Ancestral polymorphism is F, Derived polymorphism is S
  VARIANT 167: note = Ancestral polymorphism is S, Derived polymorphism is L
  VARIANT 164: note = Ancestral polymorphism is L, Derived polymorphism is S
  VARIANT 135..252: note = Derived polymorphism lacks residues 135 to 252
  VARIANT 47: note = Ancestral polymorphism is S, Derived polymorphism is L
  VARIANT 28: note = Ancestral polymorphism is A, Derived polymorphism is V
  VARIANT 27: note = Ancestral polymorphism is R, Derived polymorphism is H
  VARIANT 24..252: note = Derived polymorphism lacks residues 24 to 252
  VARIANT 5: note = Ancestral polymorphism is P, Derived polymorphism is A
MSTQPRRQRWSLEAGAGAISVSLQSTRATLSLAASLPALASRTRTTSSSRAMCASRATPRTFRSLRMRENRLNGTLDGVEDAGECTDDILMYPDNSLVRDISRMQQSNYGREGFSHITVTGALAHGTKEVEVWLQTFGPGQRTPIHRHSCEEVFIVLKGKGTLLLGSSSLKYPGQPQEVPVFQNTTFSIPVNDPHQVWNSNEHEDLQVLVIISRPPVKIFIYDDWSMPHTAAKLKFPYFWDEDCLPAPKDEL

SEQ ID NO: 4096 - protein, 342 aa, Zea mays
  VARIANT 48: note = Ancestral polymorphism is A, Derived polymorphism is V
  VARIANT 96: note = Ancestral polymorphism is N, Derived polymorphism is S
  VARIANT 174: note = Ancestral polymorphism is S, Derived polymorphism is F
MGFLICRVCLLQLLLLLLLAFTSSPASAQPAAPPGSARALDAALQEYAFRALAARPRTGIIYNATIPSSLAGVAASALRLRSGSLRRKGVAGGYFNFAVPPGVATRPRVERVVLVYHDLGNLSDRYYPLPAGYAYVAPVVGLLAYDAANLSAAAAAAGGLPELGLVAASGRPISVAFNGGGGGGAAARCVVFGLDGVPRFRDLEEGGNNVCATYEQGHVSIVVNSSGGSAPGPPPPPPPAGAIAPPIPTEEGGEKKGGSGSAAWKVAVAVGVVAGAAALGLVGALMLCLVRYRRDKKLEAMERNAEAGEALRVARVGRAQARAPVASGTRTQPVIENEYAAS

SEQ ID NO: 4097 - protein, 629 aa, Zea mays
  VARIANT 147: note = Ancestral polymorphism is E, Derived polymorphism is V
MSGGGCSIRAIWILTPNDTVAFSRRFAVVEKRWRAAWEEEEGDGERHRWGTGAAKMPLPADHEVAAAFAERRRREGTARSSGIRTNVSSVGLDSWVDDPITRHIISLHMDKEEGDPFMLWPVVLQKRGGYYVLVLPLVDPQPFRAYENLLKRSDCGGSAKENNNLSSILFNLPCITGAFMVAQVVGDIITGDIAEPEVIVSSGPSVGGLLDSLTGSIGISARAKPIAAPVAAPTASVSSPVGAAQSDSLKGGVRPFDKDLLQNFIIGAMPFGTPQDLNYANVTSIRTTGFSGDPLPTDQKQPAWKPYLYKGRQRILFSSLETINAALYDRDDVPDFLSVSGQVTCRAELEGLPDVSLPLTGLKTAHIEVSSFHHCVQASEPTANKQTLVFQPPLGNFVLMHYQAPCNIAPPVKGFYQLSMVSENEGAFLFKLSLMEGYKSPFIMDFCMITMPFPRRRVASYDGNPSIGTVSMTEHSIEWRIVSSGRGLSGRSIDATFPGTVKFQPRTTQRINSSSRFISSTGYTEDSDSEQDNVKNGASLDDYIMEKINKDLQAVDLEEPLSWQAYNYAKVSFKVTGGTLSGLAIDPKSVNIYPSAKAPAEYSMQASSGDYILWNTLGKCPTAALPREL

SEQ ID NO: 4098 - protein, 658 aa, Zea mays
  VARIANT 203..658: note = Derived polymorphism lacks residues 203 to 658
  VARIANT 424..658: note = Derived polymorphism lacks residues 424 to 658
  VARIANT 529: note = Ancestral polymorphism is R, Derived polymorphism is W
  VARIANT 564..658: note = Derived polymorphism lacks residues 564 to 658
  VARIANT 577..658: note = Derived polymorphism lacks residues 577 to 658
MGMGSDAAALFPFSTSTTATSPRLCGATAVSHRRIFSDVAEDVTVSVDGQSFLLHKFPLVSRCGRIRKMLADSSSSNSKDADGHQKLELANVPGGAYAFELAAKFCYGTNFEITAANVAQLRCVAEYLEMTEDQHADNLVARAEAYLAEVALRSLDGALEVLRRCDDGGPVAEQVGLVARCVDAVAASAGKEQLVSGLAAHLETCDCAAAARCREDWWVEDLSLLRIDHYRRVIAAMRRSGVRPETIGASVAHYAQTWLKGVDVEQRRRQRACWDGSGPFVGDGQRMVVETLVDVLATENVAAVTLSFLFGMLRVAVEVDASLDCRIELERRVGMRLEMAALDDLLVPAAQTSDSMFDVDTVHRILLSFLQRIDEDSSGDLSSPPCGYDSDGLKSPSHGSVLKVGRLMDGYLAEVAPDPYLKLQKFMALIELLPDYARIVDDGLYRAIDIYLKAHPSLTESECKRLCKLIDCQKLSQDASSHAAQNDRLPIQMVVRVLYFEQLRLKSSFSGGGSGCVGLGGADGSFSQRFVCSSSGVPSSCVSPQRDNYASLRRENRELKLEISRMRVRLTELEREQGLMKQQGRMRGGDGGGGGGRGGGGEHGRAFLASLSRGIGRITMFGGGPAAADRRRKKSGGRSSQCSDGKARRRQKASFAYD

(The sequence listing continues in the following parts.)